United States Patent Application Publication US 2020/0377945 A1 - sequence listing, part 57

SEQ ID NO: 12666 - DNA, 113238 bp, Unknown
  gut microbiota DNA sequence
cttagctcagctgggagagcatctgccttacaagcagggggtcacaggttcgagccctgtaggtcccacttgtacaattaaacagtacaatgccggcgtggcggaactggcagacgcgcaggacttaaaatcctgttgtggcaacacagtaccggttcgattccggtcgccggcattaagaaagcatctctaaaagaggtgcttaagtgcgtgtagctcagttggatagagcgtctggctacggaccagaaggtcgtgggttcgaatcctgtcacgcacacttaagtgttaatgaactgtcgcagacttgcggcagtttttttataataaaggttgttaaaaacattatcatatgctatattatttaaaatttttatatgctttggaggagggtatgaaaagatggataaagtatatataagagaacaggattttcatatagcaactaaggacgaagtagcagatattgatttgcattataaattgaaaaatagaagaatttggataaaactttttattgcatctatttttttggttgtaattggagttatttttcaaataattgctcataggatttctccctggatacattctaatctgggatattatatgaaagtttacattgttgcaattatagtttttgttggttttaatcttttatcatatggagcattaaaaatagagcaaggccttgaatataatagtgaaagaactcctattttaaaattaaaagttaatactaagcttcatgttgatgatttgacagttataagacagcagaagtggtttattatttgtgaaactgatcagggattaatcgatgattatgttatagtaaataataagagggattttaataatattaaagaaggggatatggtatatgtaaaaaggtccagagatgatggacattatttatatttttatattgcataaactactttaaattaatttgtataagcaggcgtttgagataccgatttcaagaagttagagtgctaatctagcttttgaaatcggtttttttatggcataagagaacttcctgaaaattccactaaagaaaaaatgaaaaagactttcaaattcgttgactttttgaaacaataagtataaaatgaaaaggattttcaaattggaaagttattgtcaaaggaggaattaccgtggcaggaaagtataaaacaaaacagcagtcagctattaaggagtgtctcgaaatgcacaaagatggctatgttactgttatggacatagaaaattatttgaaagaaaatgattgccaggtagggcttactactatttacagacatttggagaagatggaaaaggatggcattgtaacgaagtttagcgtggaaggccagccgggagcttgctttcagtacatagaacagggtgagaatcaggattgtttctatattaaatgtgaagagtgcggagaagtgacgaagatggaatgccatcatttggcggagttatatagtcacgtgaacgcagaccatcattttagtattaatcctaagaaaactatattctatggaaaatgcgagaaatgcggaaagtgtgaagaaaaaaataaataaaataatgatttatgaaagtgtttattaaattatgaaaagtaatagagttataaaagtattttcgaaaaataaaattttgaaaaaagaatttattcgagaaaataaatttagcaggaaaacagaatttttaagaaaatcagtagtttttattgtgaccatatctatgatttttggaatggctggttgcggcaaaactactgaaaaagaagataactatagattgaaaatagtgacttctctttttccatattatgatatggcaagagcggttataggggatgttaagggaattgatttaaagatgattgttacaccgggacaggacagtcattcttttgaaccaacacctagcgatgttattcagatggaaaatgcggatgtgcttatatataatggtggttcacttgaaacatggattgatacgttgcttgattccttaaataataagaatcagattcagatgaaaatgatggattatgttgacgttcttaatgaagagattgtggaaggaatggatacaagatttgacagccatgatgagcatagtcatagcgaagacagtcataatcataaagagcatagtcatagtgaagacagttataatcaggaagaaggcagtcatagtgaagatagtctgaagcacgaagagcatagtcatgatagtgaagtaagcgaccatgaagaagaaagtcataacgaaactgatgagcatatatggacatcacctgttaatgaaataattatgacagagaaaatctgtgaaacattaagtcaggctttacctgaggaaaaagaaaattttaagaagaatgcagagtcatacattaaacaattaaaagagttagacagtgaaatcagaatagtggtaaacaattcgaaaactaaggaaataatttttgcggacaagtttccgttacagtattttgcaaaggaatatggcttagagtattatgcagcttttccgggatgtggaagtgatatggagcctagtgccaaaactattgcgttccttgtggacaagattaaggaagacaatattaaggctgtattttatttggaattaagcagtcatattgtggcggacgcaattgaaactgacacaggagcaaaaccgcttcagtttaattcctgtcataatattacgcagaaacagtttgacagcggagtaaattatgttgatttaatgaaggaaaatgttaataacttaaaaatagcattaggagaatgataatgatttttgaatgtaaagacgtaacgttaggttatgaaaataaagtagttgcaaaaaatttgaattttaaaatcgaccaaggagattatctttgtgttgttggtgaaaatggtacaggaaaaagtacacttataaagacattattagggttgattaaacctttaaatggcgaagttattgccaatgtgcagggaaaaaatcacaaaggagtaggatatttgccacagcagacacaggcacagaaagattttccggcaagtgtttgggaagtagttttgtcaggggtgctaaataacgatcatagatgtccattttataataaaaaagacaaggcagaggctgaaaaaaatatggagaagcttaatattttggatttgaaaaagcgttgctatagagagttgtcaggaggacagcagcaaagagttcttctcgcaagggcactttgtgcaacagacagcgttttgattttggatgaacctgtaacagggcttgatccggcagcttcaatggagttttatgaaactataaaggatttaaataagaaagagaatgtaacaattattatggttagccatgatataaagaatgctttaaattatgcaacacatattttgcatttagaacaggaaaatgatttctttggaacagttgaggaatataagaaatcaaatgtttcaaatatgtttttgggaggtgtagcaaatgattagtgaaatgtttgcccatggatttatacagagggcttttatcggaggagtattggtatcactttgcgcagctcttttaggcgtcagccttgttttaaaaagatattcaatgataggtgacggtttgtcacacgtttcatttggagcattgtccatagcaatagcttttggatttgcaccaattaagttttcaataccaattgttataattgcagcctttttcttacttagattggcagaaaacggtaagatgaaaagtgatgcggcaatagctatggtgtcagcttcatcattggcaattggtgttattgttacatcgttaacaacaggacttagcacagatgtgtgtagttatatgtttggtagtattttggcaatgtctaaagatgatgttatttttagtgttgcactgtctgttgttgtacttataatgtttggattttgctatcatagaattttcgcagtgactttcgatgaaagtttttcgaaagcaacaggtgtgaaagttggaatgtacaatacacttatttctatttttacggcggtaactgttgtacttggaataaaaatgatgggagcaatgttgatttcaagtcttattatttttccggcgcttacttcaatgagagtttttaaaagttttttaagtgtaacgatatgttctgcaattcttgcggtaataaattttacggcaggtttgctttgttcctacgctttttcaattcctgccggagcaagcgttgttgttgctaatttgtgtatgtttattatattttgcattattggaaatttggcatttctaaagagaaaatagtcaggtataatagtgttatgttaaaagatgttgtcaaagtgtattagataattatgcataaaatatgtttatttatggcagtgacaggttaggaggaaaaatggatattaacggttttatagaagagttggatagtttgtatacggaaagaagaattaacgatgtcgagccattttttaatgaaagcatagaacaggcaaaaaaagaaaatgacttggcagctcagtttacaattcttaatgaaatgatgggatttttcagggatacaagtcagtttgaaaagtctattaaggcatgtaatgattgcatagaattaatgaagaaaatggggattgaaggaactgtggattatgctacttcccttcaaaatgtggcaaacgcttacagagcggcaggaaaacttgcggaatctttagaagtttataaagaagttttttctatatataatgagaatattccaagtgatgattatagaatggcaagtcttaacaataacattgctcttttgtatcaggagatgaatgattttcctatggcagtccaacatcttaaaaaggcactgtccattatagaaaaaatagaaggaatggatattgaagttgccacaacttatacaaatctggcagcgtcattgattgaaattaatcaggcaagtcaggctgaagactaccttaagaaggctttggaaatatttgacagagatgaagtgaaaaactttcattacagcggagccctttgtgccatggcaagtgttaagtgtagcttaaaacagtatgaagaggcagctaagttatacgaaaaggcgttgccggagatagaagcaaatatgggacgtggcagtgcttataatattacaaaagaaaatctggcaaaggttttcgacaaaataaaagaagaaaagaaagaacttacaggtatagagctggcaaaaagtttttatgaagagtacggcaaggatatgattcacaataatttttctgagtatgaggacaaaatagcggtgggcttcgttggggaaggttcagaacgatttggctttgatgatgtttattcaagagaccacgatttcggcccgggattttgtatgtggattacggaagatgtttatgagaaaatcggtgaaaaacttcaggatgaatataacaaacttccaaaaagttataagggcattacaagagttgacaccattatggctgaaggaagagtaggcgtttgtgtagttgaagatttttataaaaagtatacaggttccggagatggaaatctaacattagaacaatggattaatcttgaagattataaaattgcaacagttactaacggtgaagtttttagggacgatttaggatatttttctaagataagaaaaaattttgaaaatcagccttttaaggcaagacttgttaagcttgcaagacagcttggggcaatggcgcagacaggtcagagcaattatgaaagagcaatggcaaggaaagattatgtaacggcacagatttgcatttctgattttatgaaagagacaatgaaatgtgtgtacattttaaataataagtttgcaccgtactacaaatggctttttaagggagttagtagcttggatggaactgagaagattgtttcattgcttgaaaaattaagtcagcttcctgctcagaagaatgcttgggatggttatttgtatgacaatactaagtttaatgaaaaagatgaaaaagctattattatggaagaaatagcaaaaattataattgataaattattggaattaaaactaataaagaatagaaattcaaattttttaaatgactatgtgagaccaattatggatttggcagaagggaaagttgaaatgtttgacagagaaaaaacaatagataaaatagtaaaacttgaatttgaagcttttgataaagtgcagaatgttggtggaagagcgtcttgtcagaataattggcctttcttctatgttatgagaaagagtcagtatatgacttggacagatgaaatgctagagtgcatttgcaatctttgggaagaaaacaaggctaagggttggaatatgattaccgagaaatatggaagaatgatggaacacacttcacctgaagaatatgagaagattaaagataattttactgaaaaatcggagagaacaatagcaattgtaaatcagattgcacagattcaggtagactggatgaaggattttgctaagagttatccaaagcttgcatctaatgccagggatataacaagtgatgctgatcagattgacaacacttcttatgaaacttatttaaagggagagttattaacatattcagaagaattgttgaaactttatgcacaatttattgtaaatctggcaagagagggaaaaaatcttgcatatatgactatagaaaatacagcacatttacagggatatgcaacattggaagatgcagaaagcagcataagataagttttgtaaatgttaagagaaaggagcgtatgaccatattttcttaatatggcatacaaaataaatatggcatttttaccaatatccaaagaggatatgaaggaaagaggaatagagcagttagattttgtgtttgtaataggggatgcttatgtagaccatccatcttttggacatgctattataagtagagttttggaagctaatggatatacagttggtattatttcacagcctgattggaaggacgatgaaagcattaatgttttgggagaaccaagattggcatttctggtaatgggtggaaatatggattcaatggttaatcattactatgtttcaaagaaaagaagagatagtgatgcctacactccgggcggagtaattggaaaaagaccggatcatgcagtagttgcttattgtaatcttattcgcagaactaacaaaacaaagccgattataataggtggtattgaggcaagtcttagaagaatggcacattatgattattggagcaatagttttaaacgttcaattttattggatagtcaggcaaatcttttaacttatggaatgggtgaaaagtgtatagttcagattgcagatgccttggcaagtggtatggatgttacggatattacttatattccgggaactgtttttaagactaaaaatatagaacttgcttatgatccaataattcttccgtcttatgatgccatgaaggaagacaaattagagtatgcaaatagttttagggttcagtctgaaaatactgatccttttaatggaaaaactttggtggaaccttatccaaacggagtttatgttgtacagaatccacctcaggagccattaacaagacaggaaatggatgatgtatatgaccttccatatgagagaacttaccatccaagttacgaggctttaggtgggatacctgccattcaggaagttcagttttcattggcaagttgtcgtggttgttttggggcatgtagtttctgtgccataacattccatcagggaagaattattcagtcaagaagccacgaatcaatcataaatgaggcaaagaaaattattgatatgcctaattttaaaggatatattcatgatgttggtggccctacagctaacttttatcatccgtcatgtaagaagcagttaaaatcaggtgtgtgtaagcataagcaatgtcttttcccacatccttgtaagaatctgaatgttgaccacaaggattatttaagtcttcttagaaagttaagagaattgcctaaggtcaaaaaagtatttgtccgttcaggtattagatttgactatattatggaagataaagatgatactttctttaaagagctggttaaatatcatattagtggacagcttaaggtagctcctgagcatatttctgataaggttttgtcttatatgggaaaacctcagaattgtgtttatgaaagttttatcactaaatataagaaacttaacgaaaaagaaggaaagaaccagtttgttgtgccatatcttatgagttcccatccgggctctgatatgacagaggcagtgaagttggctgagtaccttagagatattggctacaatcctcagcaggttcaggatttttaccctacaccgtcaacaatgtcaactgtaatgtactatacgggagttgatccgcgaacaatgaagccggtgtatgttccaaaaaatccgcacgaaaaggcaatgcaaagagcccttatgcagtacagaaatcctgcaaactacgatttagttaaagaagcacttcatatagcaggaagagaagaccttataggttttggcaaggaatgccttattaaacccagacagtttaaatatgagaaaaactatggtggaaaaggtaacggaaagtctaaggattcacgtaaggatgcgccaggtaagaattttgcaggcaaagattcctcaaataacaagaatggtcgtgctaagaatttcacagataaagataaccgtggaggaaaaaattcagtaaataataaaaatgcccgcggcgctaagggacagacaggtaacgcacgtaatggcaaagtgcaatccggcaattcacgtaatggtaaagtacaatccggtaatgtgcataacggaaagtccggcaggaaatctagcaagagacgttaaagtttctatttgaatcctaaatttagagtggtatactatgttaggtagaagatagttaattaataattaaaatataggaggcaaacaatggacattaaagtattacagaaagatatgatagctgcaatgaaagctagagacaaagctagaaaggaatcaatttcagcattgattcaggcagtaaagaaagcaggaattgatgcaggctgcagagatgatattcctgaagaaatggtaaacaaagtaattcttaaagaattaaaaactgtaaaggaacagattgattcatgtcctgctgacagaacagacttaatagaagaataccaggcaagatatgatgtgttcaacgaatatgcaccaaagcttatgagtgcagaagaagttgaagcagaattaaaagaaaaatttgcagacgtaattgcaacaaagaacaaaggtcagataatgaaaacagtaatgcctgcatttaaaggcagagcagatggcaaagtaatcaaccagatagttgcaaaaatgtgccagtaaataatagaaacaaatgagaagaaatgcaagacatgtgtttcttctttatttttttgcctgtaggcaaggatatatgtctacaaacagattgattttgttattttgctgcgttcgttattgatcgtggtcagggtgttttgcacccgtaccccgatattttaaatcatccaaatttcggggtacattctccaaattcttcttgattttatatacagtcagagatgggaatgatcaacgtgtttgccattcccatctctgactgtatacaactttcgacatttttacatttttcccgaatattttaaatagatttaacaaaaatgcgctattgcatttaacgaaatttaaatagtatatatgtgtaccctgaaggaaacaaaaaataagttccttcaaaacatattaaaaatttacttgaaaacgaggagaaaattgaaaatgagaaagaaagttttagcagtagtatctgcattggttattacaacattagcattcacgggatgtggcggcaacaagagtgcaagcagtgacaatggttctgattcaggagctaagtcacaggcaatcacagtagtttcaagagaagaaggttcaggaactagaggagctttcgtagaacttcttggagttgtagatgaaaacgaaaatgacattacagtaagttcagcacagattacaaacagcacatcagtaatgctccagaaggtagcacagacaaagagtgcaatcggttatgtttcacttggttctttatcaacagacgttaaggcagttcaggttgacggtgttgacgcaacagcagaaaacgttaaatcaggtaattacaaagtatcaagaccatttaacatttgttacaaagaagataagttatcagacattgacaaagacttcatctcattcattatgagcaaagaaggacagcagattgtaaacgacaacggttacatcggagttgaagcaacagaatcatacaaggcaagtggtaagaaagggaaaatcactttagcaggttcaacatcagttgcgccattaatggataagttaaaagatgaatatgtaaaactaaacgcagacgcttcaattgaaattcaggaatcaggttcttcagcaggtattcagtcagcaatcgaaggtgcaacagaaatcggtatgtcatcaagagaattaaaagatgaagaagcaaaagaattacaggttcagaaaattgcattagatggtatcgcagtaattgttaacacagaaaatcaggtaacaaaccttacatcagatcaaattaagaaaatctacacaggtgacttaacagactgggctgatgttcagtaataaaatctgcatataagggtacaggcagagggattaaatttcctctgcttttagtaaatgaaggagaaaatattttgaataaagtattagattttttaatgaaaatagtatttcttgtatgcgcatgtatatctattgcagcagttataacaatttgtgtatttatgtttgcaaatggtgtgccggcaattaaagaaataggaataacaaagttcctttttggaacacagtggcgtgtgtcacagaatctttttggaatatggccaatgattgtaggcagtatttatgtaactgcaggagcaatgataatcggtgttccaatcggccttttaacagcagtatttcttgcaaaatactgtccaaaaaaattatataaatttatcaaaccaataattaaccttatggcagggattccttctattatatacggattcttcggactggttgttattattccaattattcaggaaatgtttggaacagcaggtgacggtatacttgcagcatcaattcttcttggaatgatgatacttccaacaattattaacacagcagaatcatcaattgtggcagtaccggaagcatattatgaaggagcgcttgcccttggtgcaacaaaggaaagaagtatttttaagacagtaataccggcggcaaagtcaggtgttatgtcaggaattattcttggaatgggtagagccataggtgaaacaatggcagttgtaatggttgccggaaaccaggcaattataccggacagcattacaagtggtgtcagaacacttacagccaatatcgtacttgaaatggcttatgccacaggattacatagaagagcattaattgctacagcagtagtattgtttgtatttgtattaattataaatgtatgtttttcaataattaataggaggtctgaataatggaaaaagaagtaaaagcagtaggcataaaagctcctatagtaaaaacaaacagcaagttaaaagaatatttaagaaaaccgggctcacttattatgctgattcttataatgcttgcagcggcaattacagttggaataatggtttatcttgttgcttacatagttataagaggtgttccctatattaatgcagacttgtttgcatggaaatacaattcagataatgtttcaatgacaccggctattattaacacaattataatagttgcaatgacactgattatttcagtacctattggagtggcagcagcaatttatcttgttgagtatgcaaagagaggttcaaaacttgtaaaaatcataagagttacaactgaaacattggcaggtataccttcaattgttttcggtttgttcggtttccttgcatttgttcttgccttacattggggatattcattaatagccggagttttaacactggcaataatggttttgccaacaattataagaacaacagaggaagcgcttattgctgtgccagactcatttagagaaggcagttttggtttaggtgcaggaaaaattagaacaatatttgttattgttttgccggcagcagttccgggaattttgtcaggggttattcttgcaataggaagaattgttggtgaaagtgcagcacttatttttacggcaggttcagtggcggcagtgccttggggctcgggcaagtttttcttatcttcaacaagaactttggcagttcatatgtactgcttattgtcagaaggactttacacaaatcaggcttatgcaacagcggtaatacttttgataattattttaattattaatggtttatcgggcatacttgcaaacaagattggaaaggaaaataaataaatgggaaaaatagatataaaggacatggaccttttttacggagactttcatgccataaaggatgtaaatttatcaattccaaagaaccagattacagcatttataggaccttcaggatgtggtaagtcaacagtacttaaatcacttaacagaatgaatgatcttgtagtggattgtaaaatacagggaaaaataacacttgatggtgttgatatatataaagatatggacgtaaatgacttaagaaaaagagtgggaatggtattccagaaagctaatctttttccaatgagcatatacgataacattgcatatggaccaagaactcacggtatccgttcaaaggcaaaacttgacgaaattgttgagcgaacattaaaacaggcagcaatttgggatgaagtaaaagattcattaaagaaaaatgcccttgcaatgtcaggtggccagcagcagagactctgtattgcaagagctttggcagttgaaccagaagtgttattaatggatgaacctacatcagcacttgatcctatttctacatcaaagattgaagatttggcaacagaattaaagaaggattacacaattgttatggtaactcataacatgcagcaggcagccagaatatcagacaatacagctttcttcttgttgggagaggttgttgaatatagtgacacagagcaaatgttctcaatgcctagagacaagagaactgaggattatattacaggaaggtttggttgatgatatgagaaataagtttgatgaacagcttgacaatctaaataatgaattaattaaaatgggtaaactttgtgagcgggctatttcaggagccatcaaaattacaatggaagatgaccatgaagaattaaaaagagaagtattggaaacagacagcgaaattgacaaaaaagaaagagatattgaatctatttgtatgaaacttttgcttagacagcagccggtagcaagggatttaagagttatctcctcagcacttaagatgatatcagatatggagcgtataggcgaccaggcatcagatattgttgaattggctcagtatattaaaaaaagtgacgtaaaatacaaaatacatttaagtgacatggcaaacgaagttataaaaatggtaacaaagagcattaagtcttttgtaaagaaagatattgaaatggcaagaaatgttattgtttatgatgatgttgttgataactattttgaagagataaagaaagagttaataagaataatttcttcaggagaaagtgatggtgaagaatttattgatattcttatgattgccaaatatcttgaaagaataggcgaccatgcaactaatattgcagaatgggttgagtactcaattctaggctatcacgcagagtaaatcaaaataaaacctaaaacttttcaaaaatatattgtaaaaaattcaaatatctccgaatttttacctgcatttaacataaatcttactttccggggctaaagttaatttaacctggaaagtaaggttagtaatatgttagttaggatttaattatttggaggtatatatgatttatttggtagaagacgatagcagtattagagaattagtaatatatgcattaaacagtacaggtcttgaggcaaaaggctttgagaaaccttcagaattttggaaggcagttgaggaagaagagccaagtcttgtaatacttgatgtaatgcttcctgaggaaagtggaattgatgttttaaagaaaataagaagcaatcctgcaattgagaagcttccggtaattatggaaacagcaaaaacaagtgagtatgacagaataaacggacttgaaagtggtgcggatgattatatttcaaagccatttagcatgatggaaatggttgcaagagttaaagcgttaatcagaagatctgagtacaagcatgaagaaaaggattatacaattaataatctttatgtttgcccaataaagcatcttgtaaaagttgacgacagggaagttgtcttaacattaaaagaatatgaaatgttatgccttcttttaaagaatagaggtattgttttgtcaagagaacagcttcttaacaagatttggggatactcttttgacggagaaagtagaacagtggatgttcatgtaagaactcttaggcagaaacttggaacggcaggagatgttataaaaaccatccgtggagttggttataaaatctcggcttaattgtgataatagtaataagtgacttgtggtaattattaaatctaaatttaagaaaattaatatatttaataaattttacttagatttaacaaagagaatagttacaatttacactcccactatactatgaagatgtagacagggaagaaattacacggattgttacgtgcttcgcactctcacaatcttaccccaatattttactagaaaagttttaggaggaaaaaatgaacatttttgacgtattatctcttattggaggtttagcattattcctttttggaatgaatattatgggtgatgctcttgaaaaaagagctgggaatcagttgaaaaacattcttgaaaaattaacatctaacagatttaagggatttttgcttggggcaggagtaacagcaattattcagagttcttcagcaacaacagttatggttgtgggttttgttaactcaggaattatgagtcttaagcaggcaataggaattattatgggggcaaacgttggaacaaccattacatcttggattcttagtttaacagggattgaaagttcaaacatttgggttagtcttttaaagccaacatcatttacaccaattcttgcaatgattggtttgataatgatcatgtcaaagaaaaactcaaaacgtgcagatacgggaatgattcttttaggatttgcagttttaatgtttggaatggaacagatgtcaggttctgttagcggattaagagatgttcctgaatttagaaacatattagtaatgtttagcaatccggtattaggtgtattggcaggtgcattcttaacagcagtaatccagagttcatcagcttcagtaggtatacttcaggcattggcatcaacaggagcagtaacatacggaagtgcaattcctatcattatgggacagaatatcggaacttgtgtaacagcaattatttcatcatttggagcaaacaaaaacgcaaagagaacagcagttgttcatttatcatttaacataatcggaacagcagtatggcttgcagtattctgcttattaaattcaattatacagtttccatttataagtgattcagcaaatcagcttggaatagcaattgttcatacaacatttaatattttatgtacattgttattattcccatttgcaaaccagttggaaaaacttgcatgtatcattataaaagatgcagaaaagaaagaatcattacagttacttgatgaacgtcttatgacaacacctgcaattgcaattgacagatgtaaaaaagttgtaatggaaatgtttgaaaaaacaatcgaaggagtaagctgtgcctgtgacattttaagtgagtacgattcaaaagtaatagacaaggttaaagagtacgaagaagaagtggacaagtacgaggataagataggaacctatcttgtaagaatcagtacaagagacttaagtgaaagtgacagcaagagcgtaagtgagttattacacatcatcggagatattgaaagaatttcagaccactcagtaggaatagcaaagtcagcagaagaaattcatgataaaaaattacatttctcagaaaatgcaagaaaagaattaaaagttttaattaatgcagcaaaagatattttgaatcagtcacagacagcttttgaaaataatgatatggatgcttcattaactgttgaggcattggaagaagtaatagaccatttgaaacaccagttgaagaagagacatattgacagattaaaaaatggtaagtgcacaattgagcagggatttataatgacagacattcttacttctttggaaagaatatcagaccattgttctaacattgcaggatgtgttgaggaaattgaacatgacagtcttggacttcatgcatacagcagtgaaatagataaaaatccgggaagtaaattctatcaggtttatacacagaacaaagataaatatgcaattgactagaattaagttaggtttattgcagattaaagaaagaaggttgattttatgcatacaatttatgaaaaattgtggcttatatcttcagaactaaaccatttaacaaaggtaaacaaaaaaagtttatatatggctataagtgttatgttttggatacttgtggcaacaatattttgtgttgtattggaaattttttgtaaaatatcttatataacattggctgtaattattggttacgtagctgttataccgggatatttcggagcagtcatgtacatatacagaaatacaacacctaaggatgttgaatgaatacaatgaatgaaaattaaataaatatatgggataattaactattgttaatataaataattattacggaatataaactaaaaaaattaaatattttaatgccaaaaactaactatataaaactatttgtatgttttaatttttatggtaaaattatgggtggctaaacctttaataaattttacaaaacaggagataaagcatggatagaaaagtattatttttagatttagatggaactcttacaaatgatgacaaaaaagttacacctaaaacattaaaggcattgaagcaaataatggaagaaggacatattgtggcgcttgcatcaggacgcccaacgccgggagtagcacaggttgcaaaaacacttgagcttgataagtacggtggatatgttctttcttttaatggaggaaaagtaatcaactggaaaacaaaggaagttatttatgagaacgcattatcaaaagaatatattcctgaattagttgattatgcaacagagaacaaaatcggtcttattacttatgatgacgatagcattgttgttggaactccaatagatgaatatattgaattggaatcatttattaacaagttgcctcttaaagagaaaaatcttgttgagtatgttgattacaatcctaacaaatgtctgttaacggcaccgggtgagattgcagcagaacatgaaaagattctctcaaagaagtttgagggaagaataagcatatatcgttcagagccattctttatagaagcattgccaatgggaattgataaagcacattcaatagaagttcttattaatcatcttggaattccaaaagagaataccattgcctgtggtgacggatttaatgatcttacaatgattaagtacgcacacgttggtgttgctatggccaatgctacagacgtggttaaggagaacgcagattacattacaaaatctaataatgaagatggaatagctcacgttatcgagaagtttattcttgaaaaataaaacaaaaatattaaaatattaaagtgttaaaaagtccgactattgtgaaagcacagttgggatgagattttgagacactgtaataaatataagaaaagggagaaaaaatgaaacgaggaaacaaaagaattatcgcggtacttactttaatgtttgttgttcttattggaacaacagtttttggtgccgacgaagaggctaagtatgttccacagttgtttggaacattttgggcactggttccaccactggtagccatagcattagcacttattacaaaggaagtttatagttcattatttattggaattgtaattggtggaattttttattcaggaggctcatttgagggaacaattgaacatgtattagaggacggaataatcggttcactatctgacgcatataatgtgggaatattagtattccttgttgttcttggaacaatagttgcacttatgaatacagcaggtggttcagcagcttttggtgattgggcatctaaacatatcaaaacaagagttggtgctcagcttgcaactattgcgcttggttgtcttattttcgtagatgactattttaactgccttacagttggtagtgtcatgcgacctgtaacagataagcataatgtttcaagagcaaaacttgcatatctgattgatgcaacagcagcacctgtttgtattattgcccctatttcttcatgggctgcagcggtaacaggtttcgtaaaaggtcaggatggatttgtagtatttattaagtcaattccatacaactattatgctttgcttactattgttatgatgatttcaatagtattgttaaaagttgattttggctcaatggctaagcatgaagccaatgcagcaaaaggagacttgtttacaacaggtcagaagacttacaaagaggaagaacaggttgaagaaaagagaggcaaggtttgtgaccttgtagttcctgtagttactcttattatttgttgtattattggtatgatttatacaggtggattctttaaaggaacaagctttgttaaggcattttctgaaagtgatgcttcagttggacttgctatcggaagtatttttgcattaatgattactattgtattctatgttgtaagaagaattttaagcttcaagaagtgtatggattgtttgcctgaaggatttaaggctatggtacctgcaattcttattcttacttttgcatggacattgaagaatatgacaagcagccttggtgcagcagaatatgttggtggaattatgaagcatagtgcaacaggttttgcaatattccttcctgcagttatatttgttgtaggttgtggacttgcttttgcaacaggtacttcatggggaacatttggtatccttattcctattgttgttcaggcgttccagaaaactgatcctgcaatgatgattattgccatttcagcatgtatggcaggtgcagtatgtggcgaccactgctcaccaatttcagatacaacaattatgtcatcagcgggagcgcagtgcgaacatacaaaccatgtatcaacacagataccttacgctgtaacagttgcagttatttcatttatcacatacattatcgcaggtgcgttgcagaaagcagcaggacttggctggctggcacttccaattggaattatacttatggtagcaacagttgtgggcataaaagtgcttacagcaggaaaagaagtggcggagtagatgcgagatgaaattatgcaaatgattgaaagacaattttatctgaaattgagacttggagagctgttaagatttgggaaagttgagctttggagttatgtaaactagtagcggttaaaattgagatttatacaaacttggataatagaaatcaaagttatgtaaaccaatgataattagaatggaagttatgtaagttgataacgattagaataaaagttatgtaaactggaaaaacaagaaacaccacaacttattagataattcaatattgttgtggtgtgtaaaggcaaattttaaacaaaatatgtgattatatggtttgcataaaacaatttacaccacaaattagtatgaatattgcaattgttgtggtataaaattgttgattcatataaaaagagacaagaaactggttgacataaattaaaaatataccacaaaattatcgaataattgaaaatgttgtggtgtatgcggaataattatcgtgaaaaccttgaatttgtaccatataggcaagaaagtgtatagatggtacagatataagcaaattgatgagcaagaaacttgaaatctgtaccatacggagaagaaaatgtgtatatggtacaaatataggcaagttgaagagcaagaaacttggaatctgtaccatacggagaagaaaatgtgtatatggtacaaatataagcaagttgaaatgcaagaaacttgaaatctgtaccatacagagaaaaaattgcaaatatggtacaaatataagcaaattgagctgtagcagacttaaaatctgtaccatatagagaagaatattcatatatggtacaaatactaataaaataagaaaatcccctagcatagtggttgaaatcattatactgggggattttttatcatattaatgtaatcaaagtcgcaagttattattaattaaacatacttgaataatagaatactaatacttcaattatttatttgacgttggcagatatggtagaagtgcgcctgccatattagaaataggcattgtctgcaaccatacacgtccgggacccgtaactatggtgttaaacaagccttctccaccaaagaatatgttcttcattccgggaacggtctgaatatccatctggcatgtagctgtcatagcagcaaggtgtccggtgtctattacaatctgctgaccaggctgtaattcgtattcaatgacatggccatcaaattctgcaaaagcaataccattacctgaaagcttctgtaaaataaagccttcaccaccgaaaagacctgagccaagtttttttctaaaatgcattgataattcaacacctgcttcagaagcaagaaaggcagatttttgaagaataatttcattccccggagtgatatcaaaagctttaatagaacctggaaagcttgaagcaatggaaatcattccgttagtacgttctgcagtgtaaatattctgaaaaagagtatcaccggataaggctcttccgaacatttttccaataccaccaccggtagtttccattttcatattaggtgacatccaagccatgccgccaccttctgttataattttttctccggcgtcaagttcacaaataacaaccggaagagtatcgccttgaattgaatatctcataaggacctcctaaaataattaagtttgtataattattgtatcataaagaatatgcaaaaaacagaattatattaataaaaagaaggcaacaataacattagggtcagcttgtgaaaaatcagaaaaaatgaagtgttataataatgttaattaaaaaatatataactttatgtttataaataataagatagaaggagtaaaaatatgaaaaagaatacgaaaattattacagtagctgtgataatattggtgtgtagtttattaagtggttgtcaagaaagcagtcaaaaagcgaaagacacaaagaaacaaaatattatcgcagacaaacagaaagaaaattcaaaagttgaagaaacaactcaaaatgagaatattagagaaggtgaagctaaagatgataatgatttaacaggtacatacgtcgatgaagaatcaggtgaaactcttaaagtagtagttaaagatggaaaggcttcattttgtctttattcaaaagatggagaggaatattctgattttaaagaaaaggatagggacataaaagacaattatatagatggtgaaatgtcatatgtatcaaaaaatatggatggatcattggcagtttcatctggctcaggaggttcatggggcaagtttgtaaagaaagaaaaaggggcaaaaattgattttacaaattttaattcatctgacagattggaaaaagaaacatatcaggaaagcgatggaatcaaaatagataaggataaaataaataataaagttttaaaatttgaaaatgatgatggagagctatgctttacttaccttgatgatgacggttcatattttgatgagatagtttcaggagcatggtatgacgaaaatggcgcacctttagctaaaatgccaccgttaaatctttggagaaaaggacatctttggacaggagatttaaatgactttcattttgttaatccgaaagggtttacaatggatcagttaaaaagaacgaatccgtcagatgatatggagggggatttgtatgcgattattttgaaaaacattactaaagaacagggtgatgataatatgatttattatggcgaagattattacacaggggaagaagtaatgtttagaggaaaatatagcaaaatattgaatggtgacaatgtcttaataataggacaatttataggactaacagaagatgatagtccggaattagatgtatggcgcgtagagctatgtaatgacagattttaaaaatataattcttttaaggtgttccctaaaagtttaatactttggaacaccttaaatctttttataattatttttaatcttttacctggcttccgtcaggttccatatgataattgtccttatagattaatttagaaattggcacaatctgaaagcctttttcctgcagtccttctattactttaggcagagcttgggcggtgtatttggcaccgttgtgcataaggatgatggagccgtttcttagtgatttgtggtttaaaactgtgtttacaattggttcaacgccataatttttccagtcaagagagtcaacatcccattggattgtgtagtagccacaatttttcgcctgttcaataagggcattgttgtagtcaccgtaaggtggacggaaaaggcacattttagtgttagtaagcttttcaactttttcggttacggagtttaattcatcacaaatggaagagttgttaagctgtggcatgtgcttgtggtgttcgctgtgatttcccaaatcgtgtccggctgcttttatggcttttacatcatcagggtagctttcaacccaaccgccggtcataaagaaagttacattaatcttatatttctttaaaatatcaaggattttctgagtatcttcatttccccatgcagcgtcaaaagacagcgcaaccataggtttgtcagtgttaacgcgataaatggggagcttcttgccattagtagaaacggtaatggcttcaagtccgttgctaaataaatctttttcgtaaatatatgtagcaccggctatcataataagaatgacaagccagaaaatacttcttttcataagtggaattctttctgaagatgacataagcatactttccaagataattactatagtttatgtaaagaaaataataatatgaaatttaattataagaatatttctatgacagacatactataatgacattttcgttatacattattatgcttcattaggcagaataaaaatatagcatatatatatatatatactatatcaataaatgttaaaaaatatcaataatttttcgccgccaatcccctaaaaccaaaccgacaattccttctcaaaaatctcctgagaacatttccaaaactttatcaagtacctagaaactgcaaaaatcgcccaaaaaacatacaatttttgccactttgcgtacaaataggaaacttagtgctataaaaatgactaacagttctgtgcaggaaatgtttgaaaatacattaaaaaagtactgggcgttcaatggagcggaaaattaaattagaacgtcgggaaggcactgcaactgaagtaggggtaaaaatgaaatagcggaaagtactaaatcagtgtttaaggtagtaaaggtatttataagatattaatttaaataattaggaataaggaattaggaaatgccaaaaaatgattcaaatataatggcaaaaatataagatgcaaaactatgacgcacttaaaaggtatatggagaaatcggactcatctgtatatatggggaagcatacagattacaaaagaagaacacatctgacagtacttttcggaaaaacttaaatatatagaaaagtcaatacatccaattcttttaaagataaggggttgtaaataaataagaaggaggaacaaagattatgaagaaattaatttctaaattaggagttttagcaaactgcatggctttaatgttagttattcagagtgctaacacagcttgcgcatggattgttcatcagcctgaatttccagaacaggcaagcaagtttaaaaaggtaaaataatatgattgaaaagttaaccaatcatattgtggattgccaaatcgcttccggaaaaatcaaagaggaagaaggtagcgtgtatcgatacggatacacgctattttttgagaaattaatcaatatagccatagctttaataatttgtttaataacaggtaagtggcttgaggtaggactttttcttcttgcagttattccgtttagaagttttgcaggaggctggcatgcaaaagagttttggcaatgtgcgattttatctaatttaatgatagtcataatgctaatttgtattgaaaaattatgtataaccaaagaaatagtatatgtaatttttgaagttataacacttttagcacttatttttataataccaacacagaatcctaacaaaaaattatcgcaaaatgaactaaaaaaatataaaaaagtttcatttattatatggttagtacaatgttgtttgttagttgtattttttgtttacaaaagttatcaattttccgccataatgttgtatactcatattattatagtaatcgcagcggtagctcagactatgagcgaaataaaaaacagatagataaagagtggaataagataatgtttaatgttgcaatatgtgatgatgacaaaaattttatacagtacgttgaagatataattaaggaattaggatatgcggaagatgtaaagttttttgaatatctgtcaggtgaggaatttctttttgacatagatgaacgtggggatttggacttagttgttttggatattcaaatgggtgaaacagacggaaatcaggtttctgttgaacttagaaaaagatataaaagtacaactttagttttctgttcaggatattttaaaccatctccggagaatattaaagtttcgccttttagatttttattaaaggaatattcaagagagagaatggtaagtgagtttaaagaaatttttgaatatttaacgaacaataaagatgagccttcgattgtatgtcggggagaaagaagtcaggtccaggtgtatgctaatgaaattatgtatattgaaatttctaagagaggaacaaaagtacatacgttaaacaaagttggtctggtagaaaaagtatattcctgtaaaaagagtttaggttttttgtatgaattgtttaaggaaagtaatttcgcttatgcacataacagctatattgttaatttgaaatatgtaaaaaagctttgctctgaggaactaaaattagttgatggtcaggttttatcagtttcaagaacgaagattaagaatttaagaaaacaggttacagagtattttgagagaaaatataggtaggggagaatagaatgaaaacgttgattttgattttccatttattggtgtgtatatttgaagtatggatgctatctgatttttatgatgcctttttaggctataaaaataaaggaaaaaagagaaatatatttatagtattatgttttgcattaattatttttgcaattaatagctttaataatacagtattaaatctgtcagttgtaccatctatgtattttgtgttagctgtagtaggttttagtggaaacatatacaaaaaaatatttagaactttcataggcacggtagttcttatgggaacagaattaattgttgtgggagcgttaagtgtaacatcccagcagttaattgaaagcagtatgatgtatgaaccttcagccataaggttaactgtaattgtaaaaataattactcttatggtgtttgccgttattaaacagtttgtgacaaaagaaggaacaaatatggacggggcaacatttatgctatatatggttttgccgttgtcgagtattggaattatgttttccatagctttttgcaatattgattttggaaatgtaactttagcaaaatactgtcttgcaatattttgtattctgcttatggtaggaaatggaacagcattttatgcctataacagatatgcaaaactttgtatggaaagagaaattaataagcgtacagttcttatgcaggaaatggagcttgaaaattataagaagattaatcaggcaaatgataagtatatggaattattacataattcaaatcattatatgaggactgtgtatggattgttagaacaggataataaagatgaagcaataaacattatggattctgttttgaccgaatatgaagagggtgagcttattgaatatagtacgaattctatacttaatactattttaagcgaatattatgataagtctaaaaccaatcatatagaatttaacattttcgttgaaccgggatttaatattgagtgcgttgagtccatggatcttgtagcaatggttagcaatttgatttcaaatgcatatgaagcagcactgaaaagtgacgagaagaaaataaaagttcaaatgtatatgcaaaatgacggaagttttattataataaagatagaaaattcatttagtggggagatagtaaggcaaggtgacaggttgcttacaacaaagaaagacggaaatattcacggcgtaggaattgaaagcgttgaaaaagttgcagaaaaatatgatggttgggtttctacatcatggggcaataaaagttttaggacaatgttagtacttaataattcttatgttgtgtaaataacaacggagattaaaatgaaaaacagaagaagaaaaaagaagaaaagcttattaaagagaatatttatttttcttttaattgtggcagttgccgcagtggcacttataggggcaaggtactttattaacagacagaaagttgtaaaactggatgagattgaaatgccggactggattaagtcggaaattattgaggtggacggcacttcaagaagcggtgaaaagctaagttccgtaaaggatattgtggttcactatgttggcaatccgggaagtacggcagaacaaaatagaaatttttatgcaggggaccagtctaatgtcagttcccattttgttgtgggtttaaagggagagattattcaatgtattcctttgtctgaaatgtctgcagcaagtaattggcgaaacaatgacactatttcaatagaggtttgtcatcctgatgatacgggaaaatttaacaagaagacatacaagtcattggttaagcttgtggcttggttagaggatcagtgtggactggaagatggggacgttataaggcactatgacattacaggaaaagagtgcccaaggtattttgttactcatgaggatgcgtggaagaagtttaagcagaatgtggcagattatagaaagggtgaacagtaatgattacaaagatgggtgtaccttttaatggcttggcaggagcaggtttttcaggaagttataagggaatgagattttttatgaaaacttatgacaaagaaaatattagcgtattcgtttatcctgagccatataattttgaaaatactaaggatgaaaataaggagaaagtggagttcccttatactcacgaaggcgtggaccagtgcattgactggcttaatcagaaatacattgacgataaagataaatgggatgaggcatttaattcaagaatgaatgcggaataataaagtacaataatggaaaaattattgtcgaataaacaagaaacttattgataaaaattctcgatatggtctataatgaataatatccgtgagggattgtgagagtgcaaatcaggtcacaatcagcataatcctaattggagtgtatttgcatataaccagtgtaggaaaaagcaagtagccatagaaacgcattaaggttacagggctaggaggcatattacattatgagactttcagatttgaaacagggacagacgggaacaatacgtcaggtaggtggaggcggtcaattacgtcaacatttccttgatatgggattaatacagggaactgagattacatatatgaaggctgcacctatgggtgaccctatagaatatagaatttggggatacgaattaacgcttcgaaaagatgatggggcaaaaattgagatagaattgtctgataaaagtgaagacagaaaagaagacacaaaaaatcataaatcttctaattttactaaccatcctcatattggtgaatcaggaatttaccacgtaaaacagcgtggggaaacaatagaaaaaggacagttaataactttcggactggctggaaatcagaactgtggaaaaactactttgtttaatcagttaaccggctctaatcagcatgttggaaatttcccgggagtaacggtagacagaaaagacggtcagataagaggtcaggagaatacaatggttattgatctccctggaatttattctatgtctccatatacaagtgaggaaatagtatcaagagagtatttcttaaatgacagaccacggggaattattaacattgtagatgcaactaacatagaacgaaatatgtatcttacaatgcagctaatagagcttgatataccaatggttcttgctcttaatatgatggatgaggtgacagctaacggaggaacaattgatgttaacaagctggaggcaacacttggaattccggttattcctatttcagcggcaaagaatgaaggtgttgatgaattaatagaacatgctatgcatgtggcagttcatagagaaagaccgggacgaatggatttttgtgatgctgatggagaagaccatggtgcagttcatagatgcattcattctattatgcatcttattgatgatcatgcacatagcaatttggtgcctattagatttgcagcaagcaaaataatagaaggtgatacagatataattgaacgtttaaagcttgatcaaaatgaaaaagaaatgattgaacatattattgttcagatggaaaatgaaagtggaatggatagactttcagcccttgcaaaaatgcgttttacatttatagacaaggtatgcaagtcaactgttgtaaaaccaagggagagtaaagagcatttaagaagtcaaaaaatagacaaaatccttacaggaaaatatacagcaattcctgcttttgcagtaataatggcattgattttctggttaacatttggtgttataggaaacagacttcaggcacttatggatatggggataagttatttaagtgatttatgcagcagtgcaatggtcagtgccaatgttaatgaagttttgcagtcactagttattaacggaattttcgtaggcgtaggtagtgttttaagttttttacctatcatagttgttttgtttttcttcctatcattgttggaagatagtggatatatggcaagaattgcctttgtaatggataagcttttaagaaaaataggtttatcaggaagaagttttgtacctatgattataggttttggttgttcagttcctgctattatggcaacaagaactttaccttcagagcgagacagaaagatgactattatgctgacaccgtttatgagttgttcggcaaagattccaatttatgcgttttttactgcagcattcttcccgcaaaatggaacaatagtaatgattggtctttattttacgggaataatagttgcaatattgtacgcattagtattagacaaaactaagtttaaaggtgaaccagttccttttgttatggaacttccaaactacagaatgccgggagctaaaagtgtgttaagacttatatgggataaagcaaaagactttattaccagagcatttacggtaatatttattgcttctcttattatatggttccttcagacatttagcattacatttaatatagtgtctgattctaaagatagtattcttgcattaataggcggtgtaatagcaccaatatttgcaccactgggatttggagactggagagcatcaacagctcttataacaggctttacagcaaaggaaagtgttgtaagtacaatgactgtgttattgggtggaagtcctgtggcaaatatgtttgatacacatagtgcaatagtatttttagtatttacactgttgtatactccgtgtgttgcagccattacttcggttaaaagagaactgggtggaaaatgggctattggagttgtggcattacagtgtggaatagcttggataatagcttttctggttaatctgattcttatagttgcaggtgtttaagtttgcttgacaagtgttttttcttataatataatcagttttaatggcgacgacgaagagaagtagcattaattatcgctttcagagagcaggcgtaggtggaagtcctgtagaatgaattaatgtgaataacactttagagctgcaatccgaaagttgaaagctgatgttagttatagcatagcgtaaatagttgatttaattagtaggtgagccgtagctgaacgacaaacagcaggtttttaaaccgatgagtggctgcatggcagtaaatcaggtggtaccgcggactaagaatatatggttcgtcctgaaacgatttcgttttgggacgggctttttttattgaataagaaattattcttaagaattcgtgccttgacagggagttttcaattaactctttgcgtttatagtctcagtagaaatcggatactcgtatttttgaagggagaaaactaatgaacacgaacacaaacaatatttatcgtgacgtaacaatggacaacatttcagaaaaaaatgttggcgaaacagtaagaattgccggttggattgagaacatcagagaccacggtggagtttcttttattgatcttagagatatgtatggagttatgcaggttgtaatgcgtgacacatcacttcttgaaggattaaacaaggaagattgtatttcagtagagggaccaattgaacacagagatgaagaaacatacaatccaaagattccaacaggaacaattgaattagaagcaaaaagcgtagatattttaggaaaagtatataaacagttaccttttgaaattatgacttcaaaggaaacacgtgaagatgtaagacttaaatatcgttacttagatcttagaaatgctaaggttaaggataacatgattttccgttcaaaggttatttcatatttaagagaaaagatggtagaaatgggattcttagaaatccagacaccaattctttgtgcatcatcacctgaaggagcaagagattatatcgttccttcaagaaagtttaagggcaagttttatgcattaccacaggcaccacagcagtataagcagttattaatggtgtcaggttttgataagtatttccagattgcaccatgttttagagatgaagatgcaagagcagaccgttcacccggagaattctaccagttagattttgaaatgagttttgcaactcaggaagatgtttttagagtaggtgaaaaagttttagcggacacatttaataagtttgcacctgaaggatatgaagttactcaggctccattccctattatcagttataaacaggctatgcttgaatttggttcagataagcctgaccttagaaacccattaagaatcattgaccttacagactttttccagagatgtacatttaaaccattccacggaaagactgttagagctattaaggttcacgcagatatgtctaagggattccacgagaaattacttaagtttgcacagagcattggtatgggtggacttggttacttagaagtaatggaagacaaatcatacaagggaccaatcgataagtttattcctgatgacatgaaggaagaaatcagagaaacagctggtcttgaagttggagacacaatcttctttattgctgacaatgaaaagaatgctgctttatatgcaggtcagattcgtacagcattaggcgaaagacttgaccttattgaaaagaactcatttaagttctgttatatcaatgatttcccaatgtatgaatatgacaaggaaacaaagaagatggaatttactcataacccattctcaatgccacagggtggactggaagctcttgaaacaatggatcctgaagaaattcttgcataccagtacgatattgtatgtaacggtgtagaactttcatcaggtgctgttagaaaccatgatatgaagattatggttaaggcatttgaaattgcaggctatacagaagaagacttaaaggaaaaattcggagctttatacaatgcattccagtttggtgcaccaccacatgcaggaatggcacctggtgttgaccgtatgattatgcttcttcgtgatgaagaaaacattcgtgaagttattccattcccaatgaatggtaatgcgcaggatcttatgtgtggagcgcctggagaagtaaccgaacagcagttaagagaagttcacattaaagtaagacagtaatattgtttagcaaggagatgattgaaatgaaaaagtacagtacagtagtttttgatttggatggaacattgttaaacacattagaagacttggcagatgcagttaactatgtgcttagaaagtttggctgggaagaacatacaatagacagagttagaatggatgttggaaatggaattaagaagcttgtggagcgttccgtacctgatggcttgaacaatcctaagtttgaggaagcctatgaaacttttatggaatactatcaggcacattgccagataaagactgacgcatatcccggaatattggatttgttaaaaagcctaaaggacaagggctacaagatggcaattgtttcaaacaaggctcagtgtgcagtgtcagagttaaatgaaatatattttaagaaatatatcgacgtggcaattggcgaaaacgaagccggtggcattggcaagaaaccggcacctgatgaagtaaacttagcacttgaacaacttgacagcacaaaggctgagtcaatctacgtgggagactccgacgtagacaaagctacagcagacaactcacagcttgactgtgtactatgccagtggggttttagagacttagaattgctggaaagcctgaagccaaagagcataattgcaaagccggaagaacttatagaagtattagaaggctagacaagtaaatagaaaataaaagtgtaaaataaagaaaccactgtgaggagcatggtgatttctttttttacttaataattataatctacagcactccgcaggctttctttgccagcatatcagccatatcattgtatttgtcaccggaatgacctttgactttttcaaactgtacgtttactttggttttgattttgttgtaataatctctgtaggctattgtgcctttcttgttggctttccattctccggtacaccattttgagattcccatataatcataataaattgaaagattggtgatgccgtggtttacggcatattccattgctgccattgaaccaaaaatctcgcctgcaacattacgcattgaagccatttccgcatcggagaaagattttgacatatgaagttcttcgccattgtgaaacattacgacgccgtagccgaattccttggtggcaatattgtagcttccgtcaacataggcagtggcgcaggaagaatcagaagcaatgctgccatcaacgtcaatagggattcctgaattggaagaactttcaatgcctaaaaaagcaagagcttcatttttagttttaaagcttttgaaaactgcgccggaatagccgtcaacgctttttttacattcgtcccacgtttcaaaaattccgggagtcttaccattttttacagcataaaatttttttgccataaagaacctcctgtacataaatcaaataattgcaaaattattttgtttatactcctagcagtcaaaaatttgtacgcaaacacgttgattttatcattttgctccgccgtctattgtaaggcgaaaacctaaactcgctacgctcaaacagcaggttttgcgccttacactatgctcgcaaaatttcaaaaatctgcctattgtttgcttatacaaatttttgactgctaggagattaagtagtgtttcgtaattatttgattaaatttattcctgagaatttgtttctttaacagcctccgtaactttttcggttgctttggctgttggttttgttggagcctttgttattttttctgttttcttctcagtttgtttttcagtcttcttttttgtagtatttttcttggttgtttcttttgtatttcttttctttgtagtattttcttttttcgtagtttttttagttgtctttggctttgagtttttctttgttgttgttttgttgtttgtatagcttgattttgctgttgtttcacgaccgattgtttctctgccaattgtttcttcttcactgtctgtgttgctgtaagaagttgttgtttctgtttcttttttcttctttttacgtttcttcttagaagtttttgaatcggtgttccatgggttattttcgtcaggatctgacgggtcccatgaggaacgtggatcggattcgtttagcttctgcatttcaggtaaaggaagcacaggttcttcgttagcctttgagtagattttgacttttgtgccttcagggcagttgtcgtaaatccattttatgtcagcaacctgaaatcttatgcagcctaaagaggcaacattgccaagtttgttgtattcccagtattcaagggcatcactttcaggtgatgtgtaaggcactgaatgcaacataatctgtccctgaattcttacggcgtactgagcatatgtgttatcaaccattaatcgccaacgatatttttctgaaacggtaaaagtaccattaggtgtaaaatcgtcctcacgaccggttgaacaaacgaaagccttgtaaggaactgaatatttacctttcttgtcaatgccgtaaacaatggcaaagttctctttcttgttaacttttatatagaaaggatgctcagccttaaaattaatgagcttcttataattaacagttgtagtttccggaacggtagtctgtgccacagttgtttcggaattagttgttgtttccttagaatcaacgctcttgcttgaacagcctacggtaaaaatagcaatatttagtaataaaatgccggcaccaagacgccagcatttgtgaatcttattttttatcatttagtgtctccatacttcatatatttttatcaattagtgcgactaaaaaaatagtctacgcatattctatatttttaataaactaattgcaatagaaaaaataggaatattgataaaaaacattattaatgaaagacctattttgttgacgtgaattgtgggatttgataaaatttgttattagtaggaaaaaatatagattccacagaaaatttcatttttggaaggagaacaaaatgggatacacaaaacagaaaatattaaatatggcagagacagaggatgtagaatttatccgtctgcagtttactgaccttttcggaacattaaagaatgttgcaattacaaagagccagctggctaaggcattagacaacaagattatgttcgacggatcttctattgaaggttttgccagaattgaagaatcagatatgtatttatatcctgattatgacacttttgaaattttaccttttagaccacatcagggtaaagttgccagaatgatttgtgatgtttacaaacctgacggcacacaacttgaaaatgatccaagatacatattaaagaaggttctgaaagaagcagaagatatgggatacgaatttaacgtaggaccggaatgtgaattcttccttttccatactgacgattacggaaacccaacaacaatcagccatgagaaaggcagctatttcgatttgggaccaacagacttaggcgaaaatgcccgtagagatatggttcttaaccttgaagaaatgggatttgaagtggaagcatcacatcatgaagttgcacctgcacagcatgagattgattttaaatacggtgaagcattagaaactgctgataagattatgacatacaaacttacagtaaagactattgcaaaacgtcatggattatatgcatcatttatgccaaagccaaaatacggaatgtgcggttcaggaatgcatattaatatgtctttatttaacaaagaaggacagaatattttcgttgatgaaaatgacaaaaacggacttagcaaagaagcttacaactttatagcaggattaatgaaacatatgcgttcaatgacagctattattaatcctattgtaaattcatataagagattagttccgggatacgaagctccaacatacattgcatggtcagcaacaaacagaagcccccttattagagtgccggcagcaagaggacttggtacaagagttgaacttagaagccctgactgtgctactaacccatatcttgcaattgcagtatgtttagcagcaggacttgacggaattaagaataatcttcagcctgttgacagcattcagagagatatttactcaatgactgatgaggaaagagatgaagcaggaattgaaaatcttccaaagaatctttacgaagcaattcaggaaatgagaaaatcagattttgttaagggagttcttggcaaggaagtattcaagaaatacattaaggctaaggaagaagaatggatggaatacacatcacaggttactgattgggaaattgacaggtatttaggacgaatctaagaatcattaagattgaataaaattcggaggaaaaacattgtcaggaataatagtagcatttcctaaagcccaagatggaacggccataaagaaccttttggttagaaacggatacgatgttgtatcaagttgcacaaccggggcgcaggccataaacctggcggataatttaggtgaaggaattataataagcgggtacagactcccggatatgttgtataccggaatattggagaatgttgaaggcagattcgagatgcttcttgtagcatcaaaacagagattgcttgaagacgaaaccggcattgcaatgctggagatgccaatcaaggtcagggatttccttaattccatcgaaatgatggagaataacttatttgagagaacccgaaagaaaaagagaaagccgggacagcgtacaaaagaagaacaggcagtgattaatcaggccaaagaagttctaatggacaaaaataatatgtcggaaaatgaggcacacaggtacatacaaaaatcagccatggacagtggaagaactatggttgaaacagccgaaatgattctggcaattatgtataaagaataaaaagaaagaaggacagaaaaagatgtataagattaatgagaattatttaaagttacagggtagttatttgttttcaactattggaaaaaaagttgcagcttacaaagaagctaatcctgacagagatgtaatcagtttaggtattggggacgttacacagccattggcacctgcagttattgaagctttacataaggcagttgatgaaatggcagtagcagaaacatttcacggatatgcacctgatttgggctacgaatttttgagaagtgctattagagagaatgattataaggcaagaggagttgacattgctttagatgaaatttttattagtgatggagcaaaatcagattcaggtaatattggtgatatttttgcagaaaataacagaattgctgtatgtgaccctgtttatcctgtatatgttgacacaaacgttatggcaggaagaacaggagaattcattaaggaaactgaaagctggagcaatgtaatctatatgccatgtacaaaggctactaattttgcaccagagattccaaaggaaacacctgacattatttatttatgtttccctaacaacccaacaggttcaacaattactaaggatcagttacaggaatgggttgattatgctaacaaagttggtgcagttattatttacgatgctgcatatgaagcatatatttcagaagacaacgtacctcacacaatttatgaatgtgacggtgcaaagacttgtgccattgaactaagaagtttctcaaagaacgcaggtttcacaggcacacgtcttggatttacagtaattcctaaagaattagaatctaatggaacaaagcttaacgcactttgggctagaagacatggaacaaagtttaacggtgctccatacattatccagagagccggcgaagctgtatattcagaagaaggaaagaagcagacacaggcacaggttgcttactacatgaataatgctaaggttattatggacggacttaaaaatgcaggcttctcagtaagcggtggtgttaacgcaccttatgtatggcttgaaacaccaaaggatatgacttcatgggaattctttgattatcttcttaacaatgccaacattgtaggaacacctggttcaggatttggcccaagtggtgaaggatacttcagactgacagcatttggaacacatgagaatacattaaaggcaattgagagaatcaagaatctgtagggattatattgaataattaaatagatttgttaaaatagaactatcaccacggtgatagttctattacgttacaaaaaataacaaaataaaaaagaaaagggggaaggaatagaatatggtaattaaaatatggcacggctcagagaaaattattaaaaagccaatgtataacgaaggaaaaatacataatgattatggtaagggattttattgtactgaaagtaaagaattagctaaagagtgggcatgtaaagagattggaaaagatggatttgcaaattgttatgaatttgacacagacggattgaaaatattggatttatcggatgataaatataatgttttaaattggttggcaatattagcttttaacaggaattttaaaacatcattgtctgtagcaagagaagcaaagaaatatttaattaataattttggtattaatacagatgattatgacattataaaaggatatagagcagatgattcttattttgcttttgcaagagcatttgtaaataaccaaataagcgttgatgaattggaaagagcaatgaagcttggaaagttaggagaacagatagttttaaaatcacctaaagcatttgaaagaattaagtatgtggaatatgaaatagcggaaaatcaaaaatattatcatagaagattagaaagaaataaaaaggctgaagatgattttacagagttacttattaatgcagatataaaaggtcttcacataatagatattatgagaaaggaggaagagaatagtgactgaggaatgtaataattttgtaatggaagaagcaatgaataacttaggggatgcttttgactatgtggtttatgactataatatggatttggatgaatttatggatatgtttatcgtttcaggtattgcaagagagtatgagtataaaaatgctacatatgtattaggaatgtcaggacctgaattagtgtggagcgtttttgataaagtagggttagacaatgattatcgtaaatccacagatattataggaagaaagacaaaagagtattggagtggatggattttagcatattatcagtgcattacaggaagaagttacaataatattatgtcttatatatcggttaatggaataaaagaaatgtacaatcctttgcatgaagcacatgaggatagttttgttgaagtactgaataattatatcgaaaaacaaccacttaaatctaaaataaaagagtacagattggataatggtataacacagatagagttatctaagcgttcaggcgtttcattaagagcaattcaaatgtatgaacagttgcgaaaagacattcgtaaggctaatgtaacatcagcggtaaagctggcaagagaacttggatgtagggtagaagatttaatagaataaataaaaaatgagctgccacaacagctcattttttatttattccacatactcctcatacccattactcaaaaagtaattatccatatacggctgaagcagttttgtcaaatcatcatttgttttataacttaccccatccaacacaatataatcacttagcattgtcagtcgttttacatcattaccataataaatatcaatataaagtccaccagctttttcttctttagtttcgtattttgacaatttagtggaagacaatatgttcataatattggaaatatcttttgcggctgttatttcaattcccttgcccttaatccaatatacaatttttgtacagttttcagatggaaagatagagttctttgaagtcaaaggtgtaaaaatgtatgttgtttgagcaacagtggtttgactagtctgtgttaaattagtttcgtttgatttgcatgaagaaaaacaaatagtcaaagatagcataaaaagtagaaatacaattttattcataatcaagtcccctttatataatctgtatatatgatatgataatattcgatttctgtaaagaaatgattttttgaaaagaaaaactttttgcagaaaaatgcaatatagtcccaagttggtgtgtctaataagtgaaaggagggcaaatgtttatgaaaaatgagaaagcaaagtctataagcgaagacaaaaagcttgacgaaatggaattgcaaagtatgcttgaagcttacggaaatgatgtcttaaggctttgtacactttatttaaaggacaggcatttggcggaagacgcactacaggaaacatttattaaggtgtggcagaaatatcatacatatttgggacaggctaacgaaaaaacatggattatgagaattgccattaatgtttgcaaaaattatttgcgaacagcatggattaagagaagcagtgttgttcaaatagaggatattgtgaaagcttctcagtgccagtacaggcatattgaggaatcggttgatttgctgaatgctattttgacattgaaagaaaagtatagggtagtgctgcttttgtattattatcaggaatttactgtaaaggaaattgcagagattttggataaaaaacagtcaacggttttatctttgatgaaaagagggagagagcagttgagacaaaagttgcagacaaattatatggagggtgaaagatatgagttttagaaaagatgtagacgaaatgatgaagaacgttcaggttgattatgaaatgactaacaatattatgaataacacggtgagaaatagtgggaaaaaatatagaggttttaggaaaaaagctatagttgtggtgacgcttgcaacgctttgcatagggacaatggcagttggagttagcggtttttcgggtgcatggaacaatattgttcaattgattcagcacaagggaatcgaaatggatgaggcacaggcagttaatttttcaaaaaaaggttacatagatgttgctgatgctgacaaggttactgctacaaataatggaattacagtgtccttaatacagactatttcagacaaaaaagctatttatctatatttgaaagttaaatctaaagataaaaaattaaataatggaatgtcttttgtaggggcaaaaattaatataaaaggttttggaaatatagacggtgttgcaggagatataaatgtgacttctgattatgaaggcgtgtttgaagtcagaatggatgttttatcagaatataaagaaaaaaacttagatattgacggaaaagatattgaattaactcttaattgtttacgccaggtgtacaaaacatcagctgattataaagtaaatgatgatattgcccaaggtgagtggaagattaattggaaaggcaagagcaataatagtagcaaggtaattaaacctaaccaaactattattcatcacaaaaacaagcttactgtaattaagatggaaattacaccgttaacagttactattgattttgattatcctgcaagaaaggaatatgaggaaatttatattccatttactgttgttatgaaagatggaacaaaatataaaacgacagaaagtggttttaatactattttttacggcaatgtaatgggtaaaaatttagccatgaatattagcaaaccgttagatatagacgaaattgactatgtggacatagccggacaacagtacaaagtgcagtagtttttttcaaatatacgggaggtttgtggaaacgtgaaggacgcaacaatccgtgaaattaaattttttgtgttttgaaaacttaattaaatataaaaacttgaccgtcgcaaaccgttgtggattttgcggcggttgtttaccttatgacaaaaatttgttataatgcaatagattaactgggaaaggaggagaacgttgtttagcaatttattcaaaaaaagcgataagcctagcgcagcagtatttgtagactatgaacattggtactatggatacaataatattttttcaatgaaacctaatgtgcaggaatggtatgatgaacttacagaagaatataatgtgaaaaagttaatgttttttggggattttaatggtagtgcaatagaaaaagaattacctaaattggaaaaaattacaaaaaatgttgtgcacaccgcaagcactaaagatggtgtagataaggattttacagattttattatattagatgcaatttatcgtgaagcggcaaaaaaagattcgccggatgtatttgttatatttacaggtgatgcacattttaatttggcaattaagtatcttcgtgaattaaagaagaaagttattatttatggcgtgaagagatcgttaagtaacaagcttaaatcttcagctaactcatatgttgaaatgccaagaacaaatcaggaacagcactattattacgatgcaattttgaagtcactatacattttaaagaaaagacgcaaaatggcaacatattataaaaccattgataatgtttcagcacatagtggagtttcaagagaaagaatacaggctgcacttgacgacttaatgagtaataagtatttggctgaagaagagaagcaatacagaggaaagaagccaaaagtacttgttgtaaactgggacagacttgaagaagaaggtttgtggagcaatagcaatagttagagaatgtagaaaaaagctctaaagattgcaataagtgtaaatgatatggtagaagaattataggattctaaagatttacaatttaagagaaaacataaccaccacattggcagaaatatggggctgccggcgtggtggttttttggtggaaaaaattgtgtgtgtttgaagatttctcttctcatttttcgtacaaagtcgttcggggcagtgtccacacccccgggggccggcattttggctcaccgacacgtaatcgtagccgaaaatacaaagtcacctccaaaaaacaacagaaagcacaccccatgggatgtgctttctgcaatacacataaaagtgtatcttattaaaataaatttctccagaaaatacggctgtacaaattaaaaataaatctaaaataatttctaaattgtataaaacgaaattaaatacttctatatcaaataatcctatatctcactatatccatatccgttaaccagtgcttctacaggtttgccttccttgcacattggacaatcactgtgagtaaatgcttcatagttaggaatatcatctgctctaaatagtgcatcaattctatgtccgttaattgaatcaactgcgctaaagatagctgagataccctgaagaatgccaccgtaatattcgatgcattcaatgctgttgcggacagtttttcctgttgttgctgaagcaagaagcagaagaacgttctttccatagatttcaggtttcaggttatctctgaaaatcatctgtccgttggaattaaattcaggagtgacgacgtaaatagtcttatgtgcgttagttgataaaactcctgctctgctaagctcacttgcaagaaaagcaccgataacttcgcaaccatctaaacaaacaattgtatcaattggcttatccataacattataataatccttcatggcaatggcgattcgttcagcttcgttctgacgtgtcttcatagtagtcatgtcaagataataattaaggtgtgagtgattagtaacaaaatgccccggaataacttttaatgcaatgttagagtcctttctggcatagtatttcacgattttgtttttaatcataaagggcctcctttccgtaatcaatctggaaattgattacctgccaatattcaatttttagccgtacaaacttataaaacaattatacaataatctctgctgttttcaatgaaaaaatattccaaactgtcaaaaaattccaccccaattaataaagtgaaaaattaattgtctataagaaataagatgaatatgtgttaaattttcacaaaaatgcatataatacagaaattggtagaaaatttagtaaaaaactattgataaaaagcgtttttaaaaactatcatatcctacaataccaataggaaaagggagagatgaaaaatgagaggtattattgaatttttaaaatatagttcagtatgtatgtgcaattctcttacatattcacatagcacagttagaaagcaggtagactaatggactttaattttattaatgagcatatacccttgtatgtggaagcagcaaagttaacattgattatggcattttgggggatttcgcttgctatagttgtaggcttaatcgtaagcctgattagatattttaaggtgccggttttagacaaaatagttggattttatattgaattgtcaagaaacacaccgttgttgattcagttatttttcttatattttggattgccaaaggttggaattgtacttacatcggagcagtgtggtgttataggattggctttccttggaggaagttatatggcagaggcttttagaagcggacttgataatgtggaaagcattcaaattcagtcagcattaagtcttggaatgaaaaaatcacaggcatttagatatgtaattcttccacaggcagtttcaaattcaattccggcattttgtgccaatattattttcttaataaaagaaacatcagtttttagtgctgtagcattggctgatttaatgtttattacaaaagatttaattggaatttattacaaaacagatgaagcattatttatgttggttattgcttaccttattattttgcttccgatttcattgatttgcagtttggttgaaaggagggttcgctatgcagaatatggggattagtgtgttgtttaaaggcaacaattttctaaggctatgccaaggactttgggtaacattgcgaatcgctcttatagcaatgattttttcaattatactgggattcattttgggaatgataatgacatcaaaaaacaaagtagtcaaattgatttgcagaatttatctggaaattgtaagaattatgcctcaactagtgttacttttccttgtttattttggggcagccaagcacttgggaatgaacatgccgggagaattggcggcggtcatagtgttcacattttggggcacggctgaaatgggcgaccttgttagaagcgcacttatttcaataccaaagcaccaatacgaaagcggttatgggcttggtcttacaaaattgcaggtatttatttatattatttttccacagactataagaaggctgcttccatcggcaatcaatctgcttacacgtatgattaaaacaacatctttggtagtgcttatcggcgttgtggaagtagtaaaggttggaaaacaaataattgacgcatcaagatataccgttagcgactcggcactttgggtatacggtgcaatattccttatgtattttgtaatatgctttcctttttcaagattgtcagcatttttgggaaaaaagttagcaggataggagaaaatcatggcagaaaaaattttgaaagttgaacatttaaagaaatcatatgatggaaaaacaaatgttttagacgatatatcttttggaatcgaaaaaggcgaggttgtggttatagtcggcccgtcaggttgtggaaaaagtactttcttaaggtgtttgaataagctagaaagtattaatgagggtgcactcaaattagacggacaaaattatgagaatgaaaaaaagaacattcatttaattagagaaaaaataggcatggtttttcaaagttatgacttatttccaaatatgtcaattatggataacctgattttggcaccggttaaagctcaaaaaagaaaaaagagcgatgttgaaaaagaagccgaaaagttgcttgaaagggttggacttttggagaaaaaggatagttacccacgacagctttcaggtggtcagaagcagagagttgcaatagtaagagcattgcttatgaatccggagattttacttcttgatgaaataacagcagcacttgatccggaaatggtaagggaggttttgcaagtggtgcttgaacttgcccaaacaggaatgaccatgattatagtaacccacgaaatggagtttgcgaaagcagttgcagacagggttattttcttagataagggaaaaatagtagaagaatctgagccaaaaagatttttcgaaaatccaaagacgcaaagggcaaaacagtttttaaacagttttcaatatgaaactgtttagatataaagctggttaaatcagcaaaaattttttaggagggaatcaagatgaaaaagaaaatttacaagacaggaattgcacaccatttagatgcacttcgtgcaggtgtgcaagtaggcaatcaattctctttgagaattggttacaaatttaggagggaatcaagatgaaaaagaaaattttaggagttttattggcagttggtattattgcaggagttattgcaggatgtggaaacagcaatactacacagaatggagcagaaaatgcaagtcaggcatcagctacggcaaaggctagaactcttgacgaaattaagaagtcaggcaaaatcaaaattggtgtgtttagcgacaagaatccatttggttatgtagacgaaaatggaaaagttcaggggtatgatgtttattttgcaaagagaattgcaaaggatcttcttggtagtgaagatgcagttgattttgtttatgtagaggcagcaagccgtgttgaatatttaaaatcagcaaaagttgacattacattggcaaattttacagtaactgatgaaagaaaagaacaggttgatttcgcacttccatatatgaaggtggcacttggaattgtttcaccacaaaaggcagaaataacagatgtaaatcagttaaagggaaagaaattaattgttgttaagggaacaacagcagaaacatatttttcaaaaaactatcctgatgtaacacttgtaaaatttgatgaatatcaggaagcatatgatgctttgttagatggccgtggagatgcattctcaacagacaacacagaagttcttgcatgggcaaaacagaacaaaggattcgtagtaggagttgaatcacttggagatattgacacaattgcacctgcagtacagaagggtaacacagagttgcttaactggttaaatgatgaaattaagacattggctaaggaaaaattcttccataaggactttgatgaaacattaaagagtgtttacggagatagtatcgatcctgaaaaccttgtagttgaaggcggagtggttgaataataaataagggccatactttaaaaatatagtatacaatatgaaaaaggctgttgcactactgatatatagttagtgccacagcttcttttctacggacttccttaagccctaaggctttttcataaaagtccaaagattttttcaagtcaaatacgttataattttcatgtaccattttaaaattcatataaatttcctcaaacattaaaaatttgtccttcattattaatcatccggattttttctttatattcaggatgtgtattaaggaaagaactgattatatcatactttccccagcagtgcattggaaatacaatttgtggattagtatgttccataaatatctccaaaccttcatatgctgtttcttcaagtctgggatccaaaggaacaaaggcaacatcaatctttaagttatccattttttgaatttcgcggatatataattgaatcatattatttctataagacttaggttcttccttccaataccaacagtttaaatctcctgcgtgataataaaccttgttatcatattctaacagaaatgctacaccttcatctgtagacctaaaagttgatatttttaagtcctttccattaggcagcttaagcattgtttcgatattctttttcgttatcaaaatgtttttcgctaggtctatcccctggttttcgtatttttttagatgtcttttaaggggaatatcatatgacaacacataacgtatatccggataaattttaataagttcaaaaatttcaggattaaagtgatcgtgatgtcggtgactggaaaaaacaataatgcttttattattttttaattcaggaattgtgcctttaaaataatcgaaaagaaaatatgcatcttcagtttccagtaaaaaaccactatgtccgatatatgttacagtcaaggcaagtcctcccatatgtatttgatactataataaataatgtagcataatggggttagatccatttaaattacattattaactacaagtttatttttaaatattgtaattacaatccatatgtaagtcaagttataaggaaagaacattaatatgttaataatacaaagttttttactgctttttgtacggaataaagcgtatttcattgatttttacaccgatattttgtaagatatagattaagtgtggaaaagtatgtagatactacagaataaagaggaggtcattatggctaatattatttcagacgaaacaatagaatacgttggaattcttgcaaagcttgaattatctgacgaagaaaaagaaaaggctaaaagtgacatgggaagaatgcttgactacattgatatgttaaatcagcttgatacaagcaatgtagaacctatgagccatgtatttcctgtaaacaatgttttcagagaagatgttgttgttaacggggatgatagagagaatatattgaagaatgcaccggaacagaaggatggagcttttgtagttccaaaaacatttgaagaataataagctaagataagagaggatatattcatgaatttgatgagtttgacagcagtagagctgggtaaaaaaatcaagtcaggcgaagtcagggttgtagatgcagtaaatgcagcatttgaccagattgaagctgttgagaaagatataaatagttatgttacagtttataaaaaagaagaagtcttagaaaaggcagaacatatacagaaattaattgatgaaggacagctaacaggtcctttggcaggtgttcctgtagcaataaaggataatatgtgtacaagagacaagcttacaacatgtagctcaaaaatcttaggaaacttttatccaacatattcagcagaagctgttattaatcttgaaaaagcaggagcagtaattattggaaaaactaacatggatgagtttgccatgggaagtacaacagaaacatctttctatggaccaactaagaatccatggaataaagaacatgtacctggtggctcatcaggtggtagctgtgcagcagttgcagcagaagaatgctcatatgcattgggttcagatacaggtggatcaattagacagccaagttcattttgtggtgtaacaggaattaagccaacttacggaacagtatcccgttacggtcttattgcctatggttcatcacttgatcagattggacctgtagcaaaagacgttacagactgtgcaacaattcttgaaactattgcaagctacgattcaaaagactcaacatcagtaaagagagatgattacaactttacagaagctttagttgaggatgttaagggcttaaaaattggtattccaaaagactattttggcgaaggtcttgaacctgaagttaaaaaagcaattcttaaggcagttgatgtattaaaagacaaaggtgcaattgttgaagaatttgatttaagccttgttgagtatgcaattcctgcatattatgttattgcgtcagcagaagcaagctcaaacctttcaagatttgatggtgtaaaatacggatacagaacagaagaatacaacggacttcacaacatgtataagaagacacgttcagaaggctttggtgaagaagttaagagaagaattatgttaggctcattcgttttaagttcaggatattatgatgcttactatttgaaagcacttagaacaaaggcacttataaagaaagcttttgatgaagcttttgcaaaatacgacgtaattatcggaccggctgcaccaactacagctcctaaattaggagacagcctttcagatccaattaagatgtatcttggagacatttacacaatctcagttaaccttgcaggacttccgggtatttcagttccatgtggacaggattctaacggacttccaataggaatgcagattattggtgactgctttaaagaaaaaaatattataagagcagcatacacatttgagcagtcaaaaaaatatgacagatgtgatgtagcaaaagcaagagattaggaggagcagcaatgaaacagtacgaaacagttattggacttgaagttcatgtagaattagcaacaaaaacaaaaattttctgctcctgttcaacagagtttggcggagcaccaaacacacatacatgtcctgtttgtacaggaatgccgggatcccttcctgttttaaacaagcaggtagttgaatatgccatggctgtaggacttgcaacaaactgtagcattacacaaaattgcaagtttgacagaaagaactatttttatcctgataacccacagaactatcagatttcacaactttacaaacctatttgtacaaacggttatgttgaaatcaagggtgatgatggagaaaagaaacaggtaagaatacacgaaattcatatggaagaagatgcaggtaagttagtacatgacgattggaatgattgctcattagttgacttaaaccgttcaggagttccacttattgaaatcgtgtcagaacccgatatgcgttcaagcgatgaagttatagcttatcttgagaaacttcgtcttataattcagtatcttggcgcatcagactgtaagcttaacgaaggttcaatgagagccgatgtaaacctttcagttcgtgaatatggtgaaaaagaatttggcacaagaacagaaatgaagaatcttaactcttttaaggctattgcaagagcaattgaaaatgaaagagaaagacagattgatttaattgaagcaggagaagcggtaattcaggaaacacgtagatgggatgatactaaggaatattcttatgctatgcgttcaaaagaagatgctcaggattacagatatttccctgatcctgaccttgttccaattatcattagtgacgaatggatggctgaagttaagtcaaaagaacctgaatttagagatgaaaagatggcaagatatatttcagaatttaaccttcctgaatatgatgctgacattattacattatacaaaccattggcagatctttttgaagcagcagtacaaaagggtagcgcacctaaggaagcaagcaactggcttatgggtgaaacaatgcgtatagttaaggacaagggtattgagcctgatcaggtaaaacttacaggtgaaaattttgccaagttccttaagttaatcgaaaatgatgtaattaacaaaacagttgccaaggaagtttttgaagcaatctttgatggtggcgtaaatcctgaagcatatgttgaagaacacggattaaagatggacaacgatacagatggtcttaagaagataattgaagaagttgtagccaacaatcctaaggcagttgccgattatcagggtggaaacaagaaagcaattggagctttggtaggtcagactatgaaggctacacagggcaaggctaatccacagatgattaacaaaatccttaatgaaatattgaataaataactacaaagtagtaatattatacttggttaaaaaaattgttgcagatgtaaaattaaacatctgcaatgatttttcttaagcggtgcgtggctcagtttggtagagcgctgcgttcgggacgcagaggtcgcaggttcgaatcctgtcgcaccgattttttgagcttagaaataggctctttttttgttgagtaaatcaataaaggattgaaattataactcatacgttctataatgaactcaaaactcggcttaaaatagtaagtcggaaacaaataaatactgtaagatacaaataggagaagtttatgagtcacatggatactagaatgtcttgggaaccggacaagcctcatgaagaatgtggtgtctttggaatgtatgatttggatggcaacgatgttgcatcatcaatttactacggactgtttgcgttacagcatcgtggacaggaaagctgtggtattgccgtatcagatacttttggacctagaaaggttgaccttttaaaagggatgggattggttaacgaagtgtttaaccaggagaacatagcaagcttaaaaggtaacattggtgttggtcattgccgttattcaacagcaggagaaagcattccaagtaatgcacagcctttggttattaattatgttaagggaactttaatgttagcacataatggaaaccttattaatgctaacgaattgagagaggaattggcatatacaggtgctattttccagacaacaatcgattcagaagttatagcttatcacatagcaagagagagaattaagactaaaacagccgaacaagcagtagtaaatgctatgaagaagattaaaggtgcgtacgcccttgttgtttcaagtcctagaaaattaattggagcaagagatccatatggttttaaacctctttgtataggtaagcgtgataatgcttatatattggcttcagaaacttgtgcattggatacaattgatgcagagtttgtcagagatgtggagccgggagaagttgttgtaatagacaaggatggtatcaaatcagacagatcattatgcttaaagcctgaagaacaggcaagatgcgtatttgaatatatttattttgcaagacctgacagtaattttgatggtacaagtgtttatcattcaagaattatggcaggaaagtttttggcaatggatagtcctgttgatgcagacattgttgtgggggttcctgaatcaggtaatgcagcagcaatgggatatgcaatgcagtcaggaattccttacggaactgcttttatcaagaatgcatatgttggaagaacatttattaaacctcagcagaagagtagagaatcaagcgttcgagtaaaattaaatgttttgaaggaagctgttaacggcaagcgagttgttatgattgacgactcaattgtaagaggaactacaagtgacagaattgtacagatgcttaaagatgcaggtgcaacagaagttcacgtaagaattagttcaccaccatttattagtgaatgctattttggaacagacgtgccaaataaggaacagcttatagctcacaatcgtactatagaagatataagacaagtaatcggttcagattcattggcttatcttagcatagacagactaatcgaattatcaggtggaaagtctatctgtaagggatgctttacaggtgaatatccaatggaaccaccaacggaagacattcgtggagagtatgacaagtaaaaatagttacacggattgttatgtgcttagcactctcgcaatctgtaatcttaattaataaaaaattttggaggtttttatgaacgacagataccagagcccattatcagaaagatatgcaagtaaggaaatgcagtacattttttcacctgacatgaaatttaaaacttggagaaagttatggattgcattagcagagtcagaaatggaattaggacttaacattactcaggaacaggttgatgaattaaaagctcacgctgatgatattaactatgatgttgcaaaagaaagagaaaaattagtacgtcacgatgttatgtcacatgtttacgcatacggagtacagtgtcctaaggctaaaggaattatccaccttggtgcaacatcatgctatgttggagataatacagatattatcgtaatgacagaagcattaaagcttgtaagaaagaaactcataaacgtaattaatgaacttgcaaaatttgcagataaatataaaaatcagcctacattggcgtttacacatttccagcctgctcagcctacaacagttggtaagagagcaactttatggcttatggaattaaaattagacttagatgatcttgactacattattgacagtatgatgcttttaggaagcaagggtacgacaggaactcaggcaagcttcttagaattatttgaaggcgaccatgaaaagattaaagaattagaaaacaagattgctaagaagatgggatacacaaagtgcttccctgtatccggacagacatattcaagaaagatggacacaagggttcttaatgtattagcaggtattgctgcaagtgctcataagttttcaaatgacattagacttttacagcaccttaaagaaattgaagaaccattcgaaaagaatcagattggttcatcagctatggcatataagagaaacccaatgcgtagcgaaagaattgcatcattagctaactatgtaatggttacagctttaaatcctgcaattacttcagcaacacagtggtttgaaagaacattagatgactcagctaataagcgtttaagcgttcctgaatcattccttgcaattgatggtattcttgatttataccttaatgtagtagacggattagtagtttatgacaaggttattgaaaagagacttatgagcgaacttccatttatggcaacagaaaatattatgatggatgctgttaaggcaggcggagacagacaggaattacacgaaaagattcgtgaattatcaatggaagcaggaaaaaatgttaaggagaaaggtttagataacaaccttcttgaacttattgcaaatgatcctgcatttaacatgagtcttgaagatcttcagaagacaatggatccttcaaagtatgttggacgttcacctgaacaggttgacgaattccttgcagaagttattaatcctattttggaagaaaacaaagagattcttggaatgtcagcaacaatcaatgtataaattgtgatttttttgtgaaacagtaggcagaatgccagttaaatgaaataaatactttaattattaaggcaagtgtgataaaatcagttgtatgtttgagtcggaaagtataggatttccgaacatatgactgattttattttttttctttaagaattaaaacgattttacaaaaatcacgtcataataaatagtagaggagaaatgaaaatgtttaagaaagttttggcagtaggtttttctgctgtattagcattgtcattagtagcatgcggaggcagcaaagacaacaaatcaaagtcaagtaaagagacaacaacagcaagcgaaagcgaggcagcaacagtttattctgtaaaggatgagaagattaaagttggcagcggtgttattaagcttgcagattattcacagttaacagtatacgaagatgatgtaaaggtaacagatgacagttataagtcacaggtcgattacatcttagagcagagcgcaacatataaagatactaagagtgcaaagatttcatcagtagacaaagttaaagttgactacacaggacagattaagtataagggtaagaaagttacttttgaaggcggtacagcttctgatcaggaaattgaccttggaaataatagtagcggatacattgatggatttactaaagcattagaaggacagcacaaagttggggacaagtttactaagaaattaaaattccctgacacatacacaaacaacacaaagattgatgggaaagaagttaaacttgcaggaaagacagtttggtttacttttacaattaagagtatttcaactaagtcagttccaaagttaacagataagtttgtaaaagaaaaattcggtgcatacggtgtaacagatgttaagtcatttgaaaaatatgcaagagaacagatgagaacatcaaacattatgaacaaagtttggtcaaactttgtagcttcttgtgaagttgtatcatacagctcaacagaaaaagaaagcttaaagaaagttgcagatgcaaactacgaatcacagcttcagtcacagtatggtgtagatcttgattcatatcttgaagcagcttcaatgtcaaaagaagactgggataacaacatcatgagccaggttgaatcatcattaaagacaaagatggtataccaggcattagcaaagaaggcagatttagttccttcagattcagattacaacaaagaagctgaaacacttgcacagcagaactcattatcagtaaaagaactagaatcaacatatggtaaaacagaagttgaatatgctgtaattacacagagagttcagaaatatattgctgaaaatgtaacagttaaggaaggttcagaacctacaacagcagcagaaacaacagaagctgcaacaacagcaaaataataaatacttggatttttgaagacaggtattgatggaataaaaagagtgctattttatcggaatgataagatggcattctttttttgctataaggttgcattactattttaaatgtgctaaattattccacggatggtattcgacagaaactataccgaaggaaaatgactatataaaaaactgatgcgacggtagctcatatcttaggaatgagactaactatcccgattttgaaagaaggagggatgctcatgaagtttggatttataggagcgggaaaagttggtttttcccttggaaaatatttggcagataataatcagaatgtagctggttattatagcataatcaatgaagaagccatagaagcagcaaagtttaccggttctaagtattatgagaacatggaacagttggtagaggatagtgaagttttatttttgactgtccccgatggacagattgagaatctatggaatcagttaaaatcaagtcataaaaattggatggcaaagtataataaacctttgcttaacaataaaatagtgtgccattgtagtggcgcattatcctcagatatcttttcgagtatagccgaatatgaaagttttggctattctatccatccactctttgcagtgagtaacagatacgaatcttacaaggaattatcagatagttatttcacaatagaaggaaatattgaaaaaatcaataaaatgaaagaattgtttgaaagtttcggaaacactgtatgtattatttcaaaggatgacaaaattaaataccacggagcggcggctattgccagcaatcttgttgttggtttaataggtcttagtgaagaactgcttaaacagtgtgggtttgatgaaaaatcggctcataatgcattagcaccaattattaagggaaatgttaagcacattgtagaagagggcgttgtagaagcacttacggggcctattgagcgttgtgatgtgtctacagtaagaaaacatatgagcgtttttgataaaaaaaccaatgaaatctataaagcagtgtcaaaagaagtattggaaattgcaaagataaaaaacaaagatagagattatagtaagatggaggaagtattacaatgaaaaatacggtaagtacattgttaaaacagaagcaggaaggaaagaagatttcaatgcttacctgctatgactattcaacagcaaaattaatggaagaagttggagtaaacacaattcttgtaggtgattcacttggaaatacaatgcttggatatgaagatacaattcaggtaacaatggaagacatgattcatcattgtgcagcagtatcaagaggcttaaagaacacatttttagtttgtgacatgccatttatgtcatatcagacatcaccatatgacgcagttgttaatgcaggcagacttatgaaagaaggtcacgccaacatggttaaattagaaggtggaaaagaagtttgcccacagatagaagcaatagtaaaagcatcaattcctgtatgcgcccatttaggacttacaccacagtcaataaatgcacttggtggttacaaagttcagggaaagacagaaagtgatgctcagaaattaatagacgatgcaaaggcagtacaggaagcaggagcttcaatgttagtacttgaatgtgtacctgcagaccttgcagcaaaaataacaaaaacacttcatattccaacaatcggtattggagcaggaaaccagtgcgacggacaggtacttgtatatcaggacatgttaggaatgtttacagactacgtgccaaaattcgtaaaacagtttgcaggtgtaggcgaaacaatgaaaaaagcattcaaagaatatatggaagaaatccagagcggagccttcccggcagaagaacactcatacaaaatagatgacgaagtaatagagagactgtacttttaatgattacaatggacgaaggtctgcttccacctgtgcttgcacaaaggtggaagcatgaacttaggacatgcccggataatgagcataaaagcaaagcgaagctttgcgatatgcgaattatgcggtaggattgcgagagtgcgaagcacgtagcaatccggtaatcattaacttgaaaaaatcaaatataacagcgaagcgcagcttcaacaaacaggaggtcaacatgaaagttgtaacaacaataaaagaagtaagagaaaacgtaaaacagtggaaaaaagaaggacagacagtaggttttgtaccaacaatgggatatttgcatgaaggacacggaagccttatcacaaaagcaagagagaacaatgacaaagtagtagtaagtatttttgtaaatccaatgcagttcggtccaacagaagatttagacagttatccaagagaccttgaaaaagattcaaaatattgtgaaagcttaggagtagatttaatattccacccggaaccatcagaaatgtatcatgacgatttcagttcatatgttgatatgtcagttttaacagaagaactttgtggattaagcagacctgtacattttagaggcgtttgtacagtagtaaacaaacttttcaacattgtacagcctgacagagcttattttggagaaaaagacgcacagcagcttgcaatcattaagcatatggttcaggacttgaatatggatattgaagtagtaggatgcccaattatcagagaagaagacggtcttgcaaaaagttcaagaaatacatatctttcacctgaagaaagaaaggcagctttagttttaagccagacaatcaacttggctaaacagcttattgcagatggagaaaaggacgctgatgtattagttgcaaagatgaaagaaaatattgaaaaagaacctcttgcaaaaatcgattatgttaaggcagttaacggattaacaatgcagcaacagaaagaaattaaagcacctatgttaattgcaatggcggtatacataggaaaaacaagattaatagataatacaatcttacactaatttatggtaataaatcagacagtaaaattagtaggttttactgtctgaaattatgataatttgtgacaattaagatatttggaagtgatgaaaggataaaacaatgcagattaatatgttaaaaagtaaaattcatagagcaacagtagttcagtcagagcttgattatgtgggaagcataacagttgacgaggatttaatggatgcatcaggaatttatgaatatgaaaaggtacagatagcagacgtaaacaacggtaacagatttgaaacatacgttatagcaggagagagaggttcaggaatgatttgtcttaatggtgcagcagcccatatggttagccttggggacaagattattattatgagttatgcccagatggagccttcagaaattaagtataataagcctaaagttgtttttgttgatgatgaaaataagattacaagggtaactaattacgaaaaacatggaaaattatttgacttagaaaagtaaaaattatatcatatttctgtagtaaaatttggaaaggtaaaatttttatgttaaaaggaaagacagttgtgcttggagttacaggaagcattgcagcatataagatagccaaccttgcaagtatgcttgtaaagaagggatgcagtgttcacgtaataatgacaagaaatgcaacaaattttataaatcctattacatttgaaacacttacaggtcataagtgcctggttgatacatttgatcgtaattttgaatttagcgtagaacatgtatcattggctaaacaggcagatatttttatggttgcgccggcaagtgccaatgttattggaaagattgcagggggaatagcagatgatatgcttacaacaactataatggcggctaaatgccctaagattatatctccggcaatgaatactaatatgtttgaaaatcctattgtacaggacaatctgactaagttaaagagttacggatatgagattgttgaaccggcaagcggatatttggcatgtggcgacactggcaagggtaagatgcctgaaccggaagtgctttattcatatattttaaagactatcggttgtgaaaaggacttgttaggcaagaaagttcttataacagcaggtccaacacttgaaaagattgatcctgtaagatttataagtaatcattcaacaggaaagatgggatatgccattgctgaaaatgcaatgcttagaggggcagaagttactttggtaacaggaagaacttcaattaagaaacctgattttgttaagattattgatgttttaagtgctcaggatatgtttgaagcagtagatgaaaatttcgaccagcaggatattgttataatgagtgcggcagtggctgattacagaccgaagactgttgctacagagaagattaagaagaaggatggggaagagtctattcagttagaaagaaccactgatattcttggaacaatgtctaaaagaaagaagaaccagtttgtatgtggtttctcaatggaaacagagaatatgttggagaactcaaaagccaagcttgaaaagaagaatttggatatgatttgtgccaacaatttgaaagttaaaggtgccggttttggtacagacactaatgtggtaacacttataactaaggacaatgtagttgagttaccattagaatctaaggcagaagtggcagcgcagattttagatactattgtaaagaaataggagaatgattaagtaaggagtaggaatgagaaataacttaaagaagaaagtttgcagtttacttgttgcaacattaatgacaacggcaacatttgcaaacggatttacatatggtggcatcacggtatcggcagaagaaagcaacgtaacagttcagaatagtggaaatgttgaaatatcaggagagaaaacatactcagatattaatgattcaacaggctcaggtgtgaacacaagagatgtggaaacatccacagtggaaactactacaggtgaaacagttgagacatcaactgatgaaacgacaatgcctgagactacagtggaaccaacaacagaagaaccaacaacagaagaaccaacaacaccgcaacctacaacagtaccggttacaacaaagcctgcatcaacaaaggttgttgcctggggtaagaatgcagcaggtcagtttgttaatggtaataagaaggtaattaagggcgccacaatgaaaggtgtagacgttagttaccacaatggaacaattaactggaagaaagtagctgcaagtgatgttgattatgcaattatcagatgtggttacggagataacataaagagccaggatgataagaaatgggctgaaaatgttgcaggatgtgaaaaaaacaatattccatatggagtttatatttattcatatgctacttcagttaaacaggctgaaagcgaagcaaatcatgttttaagattgataaagggacatacattaaacttcccaatttattatgatatggaagatgcggttcaggctaagctttcaaaatcaaatagaacaaagattgcaaacaagtttctgggaataattaagaatgcaggctatgaatgtggtatttatgcaaaccttaactggtggaataattatcttgattcaagccttggcggtgataatacatggagaacatgggttgcacagtacaataataatggctgtgattacaagagaaactacagtatgtggcagagctcatctacagctaaggtaagtggtataagtggaaaggtagatattaatttctggtttggaaaagtgagagacagaagttatgatattacagtaaagaagggaccttcaacggttaatacagtggcaacacctaaaccggtaaaagctcctgcaagagtaaaaataagttcagttaaggtaggtaagaagaaagccacagttaagtggaagaagatttcatctgtaaaaggatacagaatacagtattctacatcaaagaaatttacttcaaaaacaacaaagtctaagtatacaaaaaagacaagtattaaaataaagaagttaaaatcaaagaaaacttattatttcagagtaaaagcttacaaaaagaatgcagcaaacaagaaagtgtattcaaagagatggagtaaggtaaaacataaaaagattaaataattacatagattaatctgtgcaagaacaggtttggcaagaagatttgaaacggtaattatgcaataagaaaagcatgtatcaacgtaaaggagaacaaaaagagttgatacatgctttttctgttaaaacttataaatgatatctttgttatatgtgcatcctgccttgcatacagggcttacaaagttatcatgattaatggcatcgggataatactgtggttcaaaacaaacagcttctctaacattgtaaatgtggtcttttttaccttttacattctcaacaaagttggctgtgtacatctgaacacccggacaattagtagaaatcttcatttctattccagaaacatcacctacagcatccacaatattgtgaagcttagaatcagtaggatctgcaatccagttatggtcatatccgttagcatattttaaaggaatgtagtctttattaatatcctggccaatagttttaaaattattaaaatccattggagtgtcttttacagcttcaatctcgcctgtaggaattgatgtttcgtcagcaggagtaaagctgtctgcatatatttttacactgtgatttaaaacagtacctgaaccttcgccatttaaattaaaataagaatggttagtcacgttaataatggtatccttgtcaggagtagcattgtagttaatcttaaagccatcttccaacaattcgtaagtaacatacatctttaaggctccggggaatccctgatccatatgggggctttcaagtgagaaagtaattgaagtgtcattctgattttccactgtccatacacgtttagaatatggattaagaccactgtgaaggttatttggcccgttattaatatcaagattgtattctgtgttatttagcacgaaatgtcctctagctattctgttggcacatcttccaacattacaaccaaagtaatatccgtcatctgtttcatagcctgatacatcgtcatatcctaaaacgatgtctgtaggcttgttatttctgtcaggaacaacaatgcttacaagagttgaaccaaaatcagttacactaatttctaaattattattttttaaggtgtaaagcttagtagcaataccatcttttgtaattccaaaatctttaactgtcattataatcctcctaatttttaataggcaaaactacgagaaaatatgaaaaaggggagggaatgaaaaagtagttttgcctatgttaacaaatatataaataaaactataaagttttaataaatctcaaaaatgcttctaagccgtcaggtgtacatttgtaaacgcctgcgtcttctaaaacttttacgaaaacttttccgatttctgcctgaataatgtccataacattatctttattaacgtcatcatagttggcaagaaaaccgtatgcccaatcggcatgtttctcaatagcttcgttttcgcgaatatcttttccttcaagaatatattcagcaagtaaattcatctcgccttttaatcttgatggaagtactgcaagacccataacctcaattaaaccaatattctctttcttaatatggtgaagttcttcgtgtgggtgatatacacctaaaggatgttcttctgtagtaatgttatttcttaatgctaaatcaagttcaaacataccatccttaaatcttgcaataggagttatggtattgtgtggtgttccgtcagtttcagcataaataaatgcatcctcatcagtgtagcctctccaagccttcaaaatatggtcggcaagttcaattattctgtcactgtcttctgactgtaatctgataactgataaaggccattttacaataccacatttaacatcgtcaaaaccatcaactgaaaattctttgataatatcagcctttgccatggcaaaagtataattacccccctggaaatggtcgtggcttaaaattgaacctccaacaattggaaggtctgcatttgaaccaagaaaataatgaggaaagagcttaacaaaatcaaataattttctaaaagctgctttatctatcttcattggtacatgctgtccgttaaatactatgcaatgttcgttataataaacatatggagaatactgaaatccccagtttgaatcattgatagtaataggaatgattctatggttctgtcttgcaggatgatttacacgacctgcatagccttcattttccatacaaagctgacacttcggataagaagatgaagcagcttttcctgcggctgcaatagctttaggatctttttccggctttgataaattaacagtaatgtcaatttcaccgtactgtgaaggaacagtccattttaaatccttttctactcgtgattttctaatgtaattagtttttgttgaaaaatcatagtagaaatcggttgcttctttcggagaattgctatattttttccaaaagatttctgaaacctgtgaaggacgtggcattatgaaattcataagctttgtatcaaaaaggtctctgtaagtaatagagtcttcaataagcttcatttcacaggcaatatccaaaaggttctctaatatattgtcaagattaatctcctcacctgaaatatcaggatcagagtaatcatctttgccaaaagcatccaaaatcatattagttgaataatttctttctgattcaggaattaaacctgaattaataccatactgtactaatttttttatatttttatctaattctgagacgttaatcataatactttaacacctccatactttctaatctttaatacatgacatgcaccttcaccgaaaatactttctgtagctttcttatactcaggtacaaaatcagttttgacaaaagcctgtatagtgccggcaaaaccaccgccgtgtactctgcatacaccattgtttcctaaaacattttcgctaattgcaatacctattgaaacaggctggttctggaaatcatggtcagaataaatattctggagacgcttgtaagaagaatctcctgattctttaattaaagataaaaatgtgtcaaagtcatcagcttttaaagtgtcaacttctttctgaacacgttcattgtccttaaagaaatgcatagctctcaaaatatttctgtctccaacttttctgaaaatctcaggaagtttactgaaaaattcttcagccggaatatcatttaaaaattctttcccaaataaagctgcaacttctttcatttctttaggaatggcagagtagtcatctgttaagtctgcgtgtgaacctttagtatcaacgatacaaaggctgtaacccttatctgcaatgtcgaaatcaactttttcaacaataggattagcaggatctttaaaatcaatatgtacaaatccaccaactgagcaagccatctgatccataagaccacaaggttttccgaagaatacattctcagcatactgaccaataattgctatatcaattggagaaactttcatatcgttatataaacctgaaagaatagttccgataattgcttcaaatgctgctgaagaagaaagacctgcaccatttaaaacatcgcttgtaacgtatgccttaaaaggacctgttttgtaaccgtggtcgttcattcctgcaataacacctttaattaaagcagaagtagtaccaaattctgcttcgttaacagcaatgttgtcaagactaatgcttaatggtgaataaccttcagaaaaaagttcaatagtatttttgttattatttccaacaattgcaattgcatctaagttaacagaggcggccaaaaccataccgtgctgatggtctgtatgattaccacctacttcagttcttcccggtgcactataaatgtcaacgttctcttcaccgaaaagctctatatatttatctaatgcattaacatatcttgctttctggtatttaatcatttctacatcatcataatataaatcagtcaatgtgttatcgtgttcattattcaaaaactgattctttaatgttgttacgtttgtcattgaaaacctcccgatacataaaaatattacttcgtttttactgtaaaatttgtttaactaaaatgtataacttttttagtaaaatatcaatagctttttgataaaaaaataaagtttgaatatattgcacaaatagtcgaatcaaaaactgtaacaagtgaataagggaaaaataaataaaaacgattcggtaaaagaaaaagtaaaactttagtaaaaagtattgcaaaatttatgaaagtttattactatagaatagcattaaatttgagcagaaaataccgaaagtttgattacaaggattgtaatcttatatagaatggaagaatggagagaagaaatggcaacaataaaagatattgctgaaatggcaggagtaagtattacaacagtttcaagaatacttaataatgattcatctttaagtacaacgatggaaactaagcagaaagtaattgatgctgcaaaaaaattaaactacaaaaaagtaggaagaagtacaaaggccacattcagattgggtattgttcagtggttttcagcagagcaggaacttcaggatacatattatctttcagttcgtaatggtattgaagatttttgtataaaaaattgtattcagatagtaagagctttcaagacagatgttaattatatggattatcttgaaaatattaatggacttatctgcattggaaagtttagcaaaaaagaagtgaaagaattaaagagaatatctaaaaatattgtattcttagatatgcctgtagcagattatagtgttacatcatttacactagactttgaatatgcagtaaataaagcaatgagttatcttacaaaactaggtcatacaaagattggatttttaggcggacgagaaattttagatactgatgaagtttttgatgatgaaagaattaaggaatatgtaaaatattgttcagaacatggtcttgattatgataaatatttaaaagaaggacaatattccattgaatcaggatatagtatgatgagtgaatttattcagtccgaagatatgccaacagccgtatttgcggcaagtgattatattgcatttggagcaatgaaggctattaaagaaaacggattaaagattcctgaagatatttcagttattggatttgatgatgcacagatttgtaattatacaactccaacattgacaaccatacatgcacctgcatatgatatgggacagtatggtgccaacttcctttttggagctactaactgtagcataacaactccattgaatgtaaaaatgccttgtgagttagttgaaagagaatcatgcggacctgttaaaaataaagaatcccgctaaaatcataatgaaatttgtttgacaacacatctccgtataaagcattattgaaattttgaattaaataaactgcttcagtggcagagctttcaaacaatttgtacaagtaatctaagtgatgttcacatttaggattactgtcaggttcaacaacgtgaccatataaacttttataatgaaaagtggcatgcattaataaatcaatgcatgtcctttttactttatgtggcgcaacaaagaacttcttgattatatacatccatttaagtgaagcgtgaattgtgtatgttgaaatctgattataaaaaggtgacatactttcagcaacactttccttagttggaattaaatggtgcataggaaaactttcaggagcatatccgtcttcaacaagaagcttatgctcaaaagcaccctcaatttcaatgtgcccacaatcggtttcatccattattacattaacataaggatgacagtttttgtccaatacatagtgacaaataagtcctataaggtaactatactgcgaactgttttttccatatttatttacaatcttaacggcgtgtgtcataaaagaataaaaatctttatgatgaatagaaacgcctatctgattaattttgtttttcgaaaaagccctgtaataaaatagaaaatcaggtccctgtaaccctgccttaaacggagcgggatatttcttaataacattctttatatcttttggtaattcgggaattaccatttttccaaatttataatgtgcatatgcagatggcataaaaacacctcctatttacaaatatttttatgattgatttgtatgtttaattttaatatttcatttattagaacttatacaatatatattaacatatttaccattttaaagtgagaatattttgttaaatataagtaaaagaaccataatgtcgttatagaagaaaaataacaaaaaataagacaaaaaagttaaacaaaatataaattaaaaaaatataaaagtaatataagttaatataaaattttttaaaaaaggttgccacttttttctttctcatacgttgtaattaataagagagaaaaatagaaagaggaagtgatagaaaaaatatagcaattaggcaattatcaataaaatttttagaatgaaaggagaaaaaagtatgaacaagaagatgaaaaagttattttgaataagtcaaatgttgaaattgaaggaattaaaattagagggtcgaagttattttttgcaacaataatcaatgatggctcaagaaattcatatatttatagtatagataaatctgttatggattaaatggaataaaatataaaaaactttcgtttaatatataacaaaacaaaatagatgcaaatatgaaagcatcgtatagaaaacaaggaggtacggatatgaagaaattgtacaaaaaaataggagttatactagcattaacaatggtaattggtttgattccggctcagggtgttaatgcggcaaaagcaaagagtaatgtaacttattctattaagaagggaacattggttattaaaggaaaaggaaaaatgccggctaaaatgaccttcaaaaataacaaaaaaattaagaaggttgtaataagaaagggtgtgacatcagtatcagataaagcattctacaaatgtaaaaatctgaagaaggttactatttcaggtacagtaacaaaaatcggaaagtatagtttttacggaacaaaaataaagaatataactatacctgaaaaggttggaaaaatcggtcagaatgctttaggaaaatgtaaaaaattaaagacaataacaatgccgggaaatcttaaagtgatgttagattctaatgaagattattcagcagcagtattaatgtcaggctcaaatgttaaaacagtaaagtttaatacagcttttgaaccggcaatggcaagctattgtgaagcggaaaatcttcaggtgatggcaaaagataaaaaatataaatcaataaatggaatggtttatacaaaggacggaaaaaaacttgtaagagttccaatgaatcgaaaaacagttaatgttaatgacggatgtgaagaaatttgcttatcagcattactttatgagaaaaaaattccggatgattttccacagacctgcggtgatttttcagagattacaataccaaaatcagtaacaaaaataaatgatactgaatatactacaagtcaggtgtactatagctggaacggaaagaagtacactaagacaaaggttaaaggagtatatgaatatatccctaataacgaaaattataacctgaagattacaataaaggatggaaatgaaaacaacattagtattttgaataaatactttaaaaaagcaaacataattaaataaaatattttaagaatagagaagctgtttcatgtaaagtgggcagcttcttttggctaaaaatattagcgtgatctttgaaataaaaagttaaaaaaatggcataatctccgatataaagttaaaaaatgttggcttaatatttgatgaaaaaattataaaaaatttaggctaagagttgttgatttttgaatataagtatgttattctaattgcagaacaaacgttcgaaaagcataaaaaaggagacaggctatggagattacacagaatatgactatttcagagaagttgaagatattaactgatgcggctaagtatgacgtagcctgtacaagcagtggagttgacagaagcaataaagggcagggcattggagatactcatgcttgcggaatctgtcatactttttcggcagatggaagatgtgtatcattgcttaaaatattatttaccaacgagtgcatttttgactgtaagtattgcattaacaggaagtccaatgacgtacctagagcttcatttacgccggatgaggtttgcaggcttaccattgaattttacagaagaaattatatagagggattgtttttaagttcaggcattttaaagaatcctgattatacaatgggacttatttacgaaactatttggaagctgcgtaatgaatataagtttttcggatatattcacgttaaggctattccgggggcttctgaagatattattgagaaggttgggtttgtggctgacagaatgagcgttaatttggagcttccaactaaggaaggtttacagcaacttgcacctaataagaattatactaatattttgaaaccgatgaagcagattcagatgggttcaggcagattgatttcagatggtaaggaaggatatcagatcgtaacaagaacaggacggaagaataattctaagtttgttccggcagggcagagcacacagatgattataggagccacgcctgaaacagattatcagcttatgtcagttacggagactatgtataaacagtttaatttaaagagagtgttttattcggcttttgtggatgtgaatcataatattgattcacctgcaataataggacctaaccccatgcttagggaacatagactttatcaggcagactggctgttgaggtattatggctttgctgttaaggagttgcttgataaggagcatcctaattttaatgtggctttggatcctaaatgtgattgggcagttaatcatttggataagtttcctgtggaagttatgagagcagactattataccttattaagggtgccgggaattggagtaaagtcggcaagaagaataactgcggcaagacattatggaatgcttgactttaacagtttaaagaagatgggggtagttcttaaaagagcggcatattttataacctgcggtggaaagactatgattccactgtcaatggatcaggatgcattggcaagaacattggcagatactgacagaaagcaggtttacgctattgagaatgacacaacttataagcagatgacacttatggatttgggattgaaacagtaagtttagaataatcggagagcaatatgaatgttacgttagtttgtgaaaataatatagagggaataatgacagcaatttatgacggatgggtgtatatgaataagggatattctgttaacattcatccgggcagtgattatgcaccaacctttttttctaaatttattaatattgaaactgacaattctaaggctgaaagagttattcgctcaataaagattaagatttcagaagaggcttatattgcagtttttagagcttgtatgaatttcgcagaggataagggcgatgcggtctttgaattcctaaaatatggatacagatatggtgaaagagttatgaagatgcttcacattccagcggttatgagagtaatggaacttagtagaaagacttcaaacgaggcaaactcatttatagaatttatcagatttgaagagctaaaaggaaatgttttatatagcagaattgagcctaagtgtgatgtactgtcacaggtttatgctcattttcagaatagatttcctaacgagaactggattatatatgaccagagaagaataaaggcagcagttcatcagaaaggtatgacaactgttttagtggaaggacagaacatggatcaattagtgaagagtgttcgaaaagaagatgaatacgaagaactgtggaaggtattttttaataccattgccataaatgaaagatataatcctaagtgccagtgtacgcatttacctaagtggtatagaaagaatatgctagagcatggatagctggaaatatgcggaaatatgaaaaatataatatgtactttattttcaatcggtgttatactaacggagtgaaattaatgtagtatgttgggtcgagcattatttcataaaaatacaaataatagaaaaactattcaggaggaattcatgagtaaagttaagagagtttatgtagagaaaaaacagccttttgctgttactgcaaaggaacttacagaagatattaagggatatcttgaaattgatgcattaaaggatgtaagagtgcttgtaagatatgacgttgaaaacatctcagatgaaacttacaacagagcattaacatcagtattttcagaaccaccggtagataatgtatatgaggaaacattcccatatgatgcggataattctaaggttttcagtgtggaatttttgccgggacagtttgatcagagagctgattcagcagttcagtgtgttaagtttttaaatgaagatgaagagcctgttattaagacagcaactacttatgttttagaaggcaatatatctgatgaagagtttgaacagattaagaattactgcattaaccctgtagattcaagagaaacaggattggagaaacctgaaacattagttacagagtttgaagagcctgcagatgttattattttcgatggctttaaggatatggctgaagaacctttaaaggaattatatgattctcttggattggctatgacttttaaggatttcttacacattcagaattactataagaatgaagaaaacagagacccatcaatgactgaaatcagagtattagatacttattggtcagatcattgtcgtcatactacatttaatacggaattaacagacgttactttcgatgacggatatttcaaagaacctattgaaaaatcatatcaggaatatcttgacacaagaaaggacgtttttggagaaagaaaagacaagtttgtatgtcttatggaccttgctcttattgcaatgcgtaagcttaagaaggaaggcaaacttgatgatcaggagaagtcagacgaaattaatgcatgtagtattgtagttcctgtagaagtagatggaaaaacagaagaatggttagtaaactttaagaatgaaacacataaccatcctacagaaatcgagcctttcggtggtgctgcaacatgtcttggtggagctatcagagatccactatcaggacgtacttatgtatatcaggctatgcgtgttacaggtgcagcagatcctactaaatcaatgtcagaaactcttccgggtaagttaccacagaagaaacttgttcagggagcagctaatggatatagctcatatggtaaccagattggtttggctacaggtttagttaaagagatttatcatcctgattatgtagcaaagagaatggaaatcggagcagttatgggtgcagcaccaagacgtgcagtacagagacttaactcggatccgggagatattattatattattaggtggccgtacaggtcgtgacggttgtggtggagctacaggttcatcaaagattcatacagaagaatctattgaaacttgtggtgcagaagttcagaaaggtaatgcacctacagaacgtaaattacagcgtttatttagaagagaagaagttagccatattattaagaagtgtaatgactttggtgccggcggtgtttcagttgctattggtgaattagcagacggattacacattaacttagataaggttccaaagaagtatgcaggtcttgacggaacagaaattgctatttcagaatcacaggaaagaatggcagttgttgttgataagagtgacgttgatcagtttttaaaatatgctaatgaagagaaccttgaagctacagtagtagcagaagttacagaagaaccacgtttagtattagaatggagaggtaaagaaatcgttaacctttcaagagccttccttgatacaaacggtgcacatcaggaaacaacagttgaagttgacatgcctgatgaaaacaagaacttcttcaacaaacagcctgttaacaatgtaaaacagaaatggttagaaacattgtcagatttaaatgtttgctcacagaagggattagttgaaaagtttgacggttctattggagcaggttcagtatttatgccatttggtggaaaatatcagatgacagaaacacagactatggtagctaagcttcctgtattaaagggagattgcgatacagtaacaatgatgtcatatggatttgatccatatctttcaagttggagcccataccatggagcaatgtatgcagtagttgactcaattgctaagattgttgcaacaggtggtgattacaagaaagtacgtatgacatatcaggaatactttagaagaatgactgaagatccacgtcgttggagccagccatttgcagcacttcttggttcatttgatgcacagatgggatttggtcttccatcaattggcggtaaggatagtatgtcaggaacatttaatgatattgatgtaccaccaacacttgtatcatttgcagtagatgtagctaaggaaaaagatattattactcctgaatttaaggcagcaggcaataagattgttaagtttgaaattagcaaggatcagtatgacaagcctgtatatgatgaaatcatgaagttatatgatgaaattcatgaaatgattcagaatggagttattatttcagcatatgctgttgaaggaaagggtgttatcccagctgtaagtaagatggcatttggtaataagattggtgtaagcattagtggaagaatccctggagcagatttatttgcacctggatttggtgatattattgctgaagtacctgcagacagacttgacgatattacatcaagctatgttcttatcggtgaaacaaacgataaggaagtatttgaatatggttatgattcaattcctatggatgaagcaattaaggtttgggagaaaccattagaaaaggtattcccaacaagaagccataaggatacatcattacttgatacaccaatttatgataagggcagcgtatatgtttgcaagaacaaagttgcaaaacctacagtatttatccctgtattcccaggtacaaactgtgaatatgatagcgctaaggcttttgaaaaagctggtgcaaatgttattactaaggtattcaagaacttaacacctgaagacattagagactcagttaagatttttgaagaaagcattgcacagtcacagattattatgttcccaggtggatttagtgcaggtgatgaacctgatggttcagctaaattctttgcaacagcatttagaaatgctaagattgaagaagcagttcacaagttattaaatgaaagagatggtcttgcacttggtatttgtaatggtttccaggcattaatcaagttaggattagtaccaaacggcaagattacaggacaggatgtaaatgcaccaactttaacatataatacaattaaccgtcatatctcaaagatggtttatacaaaggttgtatcaaacaagtcaccttggttacagaatgcagaacttggtggagtttatgtaaacccagcatcacacggagaaggaagatttgtagcacctgaagaatgcattaaggaattatttgcaaacggtcaggttgcaacacagtatgtaaaccagcagggacagcctacaatggatgaagaatggaacgtaaacggatcatactatgctattgaaggtattacaagtcctgacggcagatgctttggtaagatggctcatatcgaaagaaagggtcgttcagtagcaacaaatatctacggagaacaggatcttaaggtatttgaatcaggtgtaaactactttaaataataagtaaaacatacaagaacataacaagaagctttcacagggatagttgtctaacactatctctgaagggcttcttgatttagttttggaaaggaggaccatattgagctatttaaagaatctaaaatgggaaatggttttgtattcaattctttctatagcaataggagttttaatgtttttgtatccaactaaaacattaaatgctgtttgtataatacttgcagtaatgttatttgctttaggaacaagatacttaatagaatacagaaaaaagaatctgattaatgatttttatagatatgaatttgtggcaggaattgctttaatattacttgggatagtagtgcttgcatgcatgaatctaatactttcaattattacttatgtaattgcattaataataatagtcagtggacttatgaaaatagagaatgcgttagaccttagaagaatgggatgtcattggataccattacttgtatttgcaattatatgtataatacttggcatatcagttttaacaatgccaatgaatcacaatgatgatggcacaagaacagccggagatttcttaatccagtgttcaggagcaatatttgcggtaacaggattgattgatttaatcacaacattatctgtttcaggaaagataaagaaatggatagattcacagatgaactaaatatataagaaaagccctatggatttagagtgaacaactttgaaatctgtagggctttttttgtatgagggaagattgaattaccggagaaaattatcggggaaaattgctaataaatgcgttgtgtaccccaatatttcaaatatttctaatatcggggtacagacatctagatttgctccgtgcaacactagactaaaatcaatttgttacatattgacttgctataacaaaaaaataggagcataaccaacaaacggtatgctcctaaatcttatttcaaattatatttcagtcttatttcaagaatcaattcttaacttatttcaatgtttcgtatttctggataactccaattcctattgcatgcggtcctgtatgaactgctgtaataacaccgatttctacattagtgtcaccgttgagtttgacaccaagtccggcttcaacttcatccttgaatgctacgccttctatggcatcatagccatatccgattgaaacaacgaagttgtctttaccgttttctgttaaatatttgtctgcaatctggataatgttctttttaagcttgccacggtttcttcctacaccaccaagatttacttcaccatctttcaagataatgataggtttgattccaagctttcctgtggctgaaattgccatttttccaattcgaccgccgattcttaagtaatcaagtgaacctacagtgaagaaaatacgtgctgtgcccataagtttcttagtgttttcaatcattgtatcaaatggaatgccgtcgttttgcattcttacaacttggtcaattataagagcctgactgactgtgtcctgctgtgaatctaatacaacaatctgtgcatcaggataatcttcttcaacaacatccttagccattgaagcagaattatatgaaccacttagatgaattgagattgtaaaacatacaacaggaatgttctgttctgcatactttctaaaaactgcctcaaaactttcaacacttggaagagaagtctttggaaaaatatcagggttctcaaccattgtagtataaaagtcttttctattaatttctgttttgtcctttaaatatgtttctccatcaagagaagcagtaagagggacaatttctatattgtgttttttaacataaagctctgttaaatcacaggcactgtcactaataatctggtacataaaatcaagtcctttccgataaatactctatatcctatgtttagagtgtatcataaaagtaataatatttaaacaaaaatacaacagaaaagagatatagtagtatatataaacaataaaaataaaatgtaagcaaaaatatgcaaaaatttaaagttacaattatttgaaatcataactttaaattagtacattaatataaaaaatagtgattttattaaaaaaatatattttgcatttagaataaataaattataatgtttcgtattttctaattacaccaagacctatagggtaaggtcctgtatgtacagctgaaacaataccgattgcaacattagtttcagaatcaagctttacatcaagagtcgattcaacttcattcataaattgaaaaccttcttctttgtcataaccatagcctactgaaacaatgaaattatctttgccattttcatctaaatatttctttgcaacctgtaaaacactggccttaagcttgttacggtttctaccgattccaccaagtccaatatcgccgtctttcataacgataacaggtttaacaccaagttttccggttgcagcagtggcaaccttgccaatacgaccacccatcttaagataatcaagtgaacctactgtaaagaagattctggctgaggccattaaagcatctaacttagacatagcctgttcaaaagaaagaccatcttcaagcattttgacaaactggtcaattaacaatgcctgagttacagtattctgttttgagtcaataacacaaatatttgcatcagggtaatcctctaacactaaagatttggcattaatagcagagttataagaaccgctaaaaagagttgttatggtaaaacatacaacaggaaaaccctgttccacaaagcttctaaaaacatctgcatagctttccacacttggaagtgaggtttttggaaaaagcttaggatcatcaaccattctctggtagcattcatcccttgttatgtcaactccatctctataataagtttcgccatcgaaagatactgataatggtacaatggtaacgtcgtgtttttctaaatattcttttgacaagtcacatgcgctgtcgcttacaattttatacatagttttttataacctttctacgtagtatttaatactacataagtataacacatctgtaataataatcaatagattttgcggttttacaaaaaaacatttacaaatagttcacaatatttagggttgtatggtaaaatatcatgtaaatgaaaacaaaagggagtaaaaaggtggacacattaaaaaaatttacaaaatatgaaaaagaaatacttgaaggtattattataagcattgtaggcggatgggcattaacatctatattaagaggtgcctataagcagattagtaatattcagttttcggctgatggaaattttactaaggcatttataatgactatattttttagcattatattaggaattatatattacaaaaacaaaaagattgcaggaggattaatgtttgtttttacatatatattcctattgctatgtgcttttattggatattcaaatgattggacaacaaacgccggtaatccaataggcggaccatgttatcaggcaatacttgcttttatagcagctatcgcttttttgtatgttaaagaagacatttatcagtttatatcagaattaaaaataaaaagaatatatactaatattatagttgcaataataggtgtgttattgtttggatttgttggaatagttacagtattaagatataagtcatatcttaattcaacatttgattttggaatatttactcagatgtatgaaaatatgagacagacaggttctgttgcaacaacccttgagagaaacagacttctttctcattttggtgttcatttttcaccaatatattatattgcacttcctatatattttattttcccaagtccggtaacagtacagctaatacaggcattaatgatagctttgccggttataccaatagttcttattgccagggaatacagattgtctaattggatgacagtaggatttactttactttatgcattgtatccggcaacatcaggcggggcagtgtatgatatgcatgagaactgttttcttacattctttttgctgatgacaatatgggcagcagaaaagaagaaaacatatattatgatattaatgatgctttttgcattttttgtgaaagaggacgcggcaatatatgtattggttcttggaacattctatttgctttcaagaaaagacaaaaaaagaggactaatattaatggtttgcgcagcggtttatttccaaattgcaatttctgtggttaacagctatggacttggaattatggataacagatttagcaatttgtattttgatgcagatggaggattaagccaggtattcaaaagcattattgcaaatccgggatatgtaattgcacagatgattacaaattccagcgcagacagtgtagaaaagattgcttattttatactaatgtttggaccaatggcaactgttatttttacaacgggaaagaaatatacaagatatatattactttcaccacttattataattaatatatttacaacatatgtgtatatgcatgatataaacttccagtataattttggagttattgcattaataatgtatcttgcaattatgaatatggctgatgttaaagcagaaaaggcgaaaacatacgtaagcatagcagtgctttgtgcaggaataatgtttgtaggcaatcagtttcctaaaatgcctaattattacaaaacatatacagaaaacaaatcaacctatgagaaaatagacaaagcattagagcttgttcctactaatgcttcagtttgcgcatcaggatttttaacaccacatttgtttaaaaatcttgtaatgtatgatcagaaccatttagaacagcctgtttatacagattatcttgtggtagatgagagatttgacaatgagaaacagaaatttgatcaggttttaagctcaggcagatatgagattgcatatcaggaacaaggacttattagcatatacaagaaaaagtaaaataaggcacgccctttttattgaaaggggtgtgcttttttgatatacttttaaatggtttattgtatagttttacaaatgtgacagtaatactgaatcatagaaagaggtaaaaagtgacaatattaataaaaaacggacggctaattaatccgtcagagaatttagacaaagtaatggacatctttgttgaagatggaattattaaggaaaaggcagaatcaattgaaaagcaggctgacactgtaattgatgcagcaggctgttatgtaatgccgggattaattgatttgcacgtacatttcagagatccgggacttacatacaaagaagatattgaaacaggaagcaaggctgctgcaaaaggcggatttacaactgtttgctgtatgcctaacactaaaccggtagtagataatgtagaaacagttaagtacattattgaaaaaggtgaaaaaacgggacttaccaatgtacttcctgttggtgcagttacaaagaatatggcaggagttgaaattactgatgtggaagagcttaaaaaggcaggaatttgtgccataagcgaagacggcaagtcagtaatgaactcaggtgtttatagaaaagcaatgaagaatgccgcaaaggctaatgtgccggtacttgctcattgtgaggacattaatttagttgaaggcggcgttattaacttaggagacaagtcaagtgagcttggagttaagggaataagcaatgcagttgaagacgttattgcaatgcgtgatattatgttggctaaggaaacaggggcaacattacatttgtgccattgctcaactaaggatagtgttgaaatggttaaaagagcaaaggaagaaggcataaaagtaacagcagaagtttgtccacatcatttttctatgtgttcagatgatataacaagtaacgacggtaattttaaaatgaatccacctttacgtgcaagagaggatatggaagctcttattaaagggctacaggatgacattatggatgttatttcaacagaccatgctccacatagtgcagaggaaaaggctaaagacttagaacatgcaccatttggaatagtaggtcttgaaacatcagtagcattaacagttaccaacttagttaagaaaggatatttaactccaatgcagatggctgccaagatgagttacaatcctgcgaaagttttaggcattccaaagggaactttagatgagggcaagattgcggacattacaattattgatcctaataaagaatacactatagacgtaaacacttttgaatcaaagggtaagaatacaccttttgacggttacaaagtttcaggagaagttgaatatacaattcttaacggaaaagttgtttactcaaacaaataaatattaaaacacaaaatagattttgagaataacagattaaaaatcaaaatataacaaaaatccaataaggaaggaagaaagcaatgataaacaaattagtagacaaaatcaaaaaaacaaacgcacctgttgtagtaggacttgatccaatgatgagttacattcctgaacacattacaaagaaagcttttgatgagttcggcgaaacattagagggagcagcagaggcaatttggcagtacaacaaaggaattatcgataatacatatgatttgattcctgcagtaaagccacagatagcaatgtatgaacagtttggagtaccgggacttgttgctttcgataagacagtaaaatatgcaaaggaaaaagaccttgttgtaatcggcgatgttaagcgtggagatatcggctcaacatcagcagcatatgctacaggtcatcttggaaaagtacaggttggaagcaagaaatattcattatttgatgaagactttgcaacagtaaatccttatcttggaacagatggaattaagccatttattgatgtatgtaaagaagaaaataaaggtcttttcattttagttaaaacatctaatccttcaagtggggaatttcaggacagattaattgatggaagaccactttatgaatgggttggcgaaaaggtagcaaaatggggagaagaacatatgggtaacgactacagctatattggtgcagtagttggtgcaacatatcctgaaatgggaaaagttcttagaaaagtaatgccaaagagctacattcttgtacctggttacggtgcacagggtggtacagcagatggacttaagccatactttaacgaagacggacttggtgcaattgttaactcttcaagaggaattatttgtgcatacaagcaggacaaatatgctaagtttggcagcttaaattatgcagatgcatcaagacaggctgtaattgacatgattgaagatattaactcaattttctaaagaaatatagagtttgttaataaagacaaaaaacacaataattaatgatgataaaatataaaaatgattagacggattgtttaattattatgtaatcataacaacgagtaggagcgaatatgagaagtaaagaacttgcaaaagtaatttcacaggaatgtattggaaccggtgtgtatagcatgtggattgaaacaaaagcagcagacacagcagttgcaggacagtttatttcagtttactgtaatgacaaaactaaattattgcctagacctattagtatttgtcaggtagacaaagagaatggcagattacgtattgtttacagagtcgtaggtggcggaacaacggaaatgtcaacatataaagcaggagacagtgtttctattataggaccgcttggaaacggctttatgcagagagaaggaaagaaggctatattaataggtggtggaattggtattcctcctatggttcagcttgccacagaattaaaggctaaggcagaagttcagattgtggcaggatatcgtgatgaattattccttactgacgaattagaaagcaatggaaagctatatattgcaactgaagatggaagtacaggtacaaagggtacagttatcgatgccataaaggaacaggcagttgagggcgatgtgatttatgcatgcggtcctacaccaatgcttaaggctattaaagaatatgctcttgaaaacggaattgaatgtcagctttctttagaagaaagaatggcatgcggaattggtgcctgccttgcctgtgtatgtcagtctaaggagaaagaccatcattcaaatgttaataacaagagaatatgcaaagacggacctgtatttttggcagaggaggtggaactttaatgaatacaaaagttaatattgcaggagttgaatttaagaatccggtaatggtagcctcaggaacatttggttcaggtgcagaatatggtgaatttgtagatttaaacagattgggagcagttgtaacaaaaggtgttgccaatgtgccttgggaaggcaatcctacaccacgtattgcagaaacatacggtggaatgcttaatgcagtaggacttcagaatccgggatatgaattatttgcaaagcgtgatattccatatcttcagaattatgatacaaacattattgttaatgtttgtggaagaactacagaagattatattgatgtagttgaaaagttaggagatgaaaaagtagatatgttagaaattaacatttcatgtcctaatgtaaaacacggcggaatagctttcggacaggatcctaaagcagtagaagccattacaaaagcagtaaaggcagtagcaaaacagcctgtaataatgaagttaagccctaatgttacagatataacagagatggcaaaggctgcagaagcaggtggtgcagatgctttatcacttataaatacgttaacaggtatgcagattgatgtggaaagacagaagttcgtattagccaacaagacaggcggactttcaggtcctgcaattaagcctgtggcagtaagaatggtatatcaggtggctaatgccgtaaaggttccaataataggaatgggcggaattgcaaatgcaagtgatgcaatggaatttattcttgccggagccacagcagtatcagtgggaactgcaaactttaataaccctaacacaacaatagaggtggttgaaggaattgaggactacatgagaagacataatgtagaagatattaacagtctaattggattagtaaaataaaggagatattaaaaaatggaagcatataagaaggaatttattgattttatggtagaaagtgatgttttaaagtttggagaatttacacttaaaagcggacgtaaatcacctttctttatgaatgccggtgcatacgtaacaggttcacagcttaagagattaggcgaatattatgcaaaggcaatccatgatacatatggagatgattttgatgttttatttggacctgcatacaagggtattccaatcagtgttgtaacagctattgcttacagtgaattatatggaaaagaaatccgttactgttcagaccgtaaggaagaaaaagaccatggcgcagataagggaagcttccttgggagtaagttaaaagatggcgacagagttgttatgattgaagatgtaactacatcaggaaagtccatggaagaaactgtaccaaaggtaagaagtgcagcagatgttgaaatcgtaggcttaatggtctcactaaacagaatggaagttggaaaaggcggagaaaagagcgctcttgatgaaattcaggaagaatatggatttaaggctaacgcaattgtttcaatggcagatgttgttgaatatctttacaataaggaatgtaatggaaaagttgttattgatgatacaatcaagacagcaattgatgaatattataaacagtatggtgctaaatagttaatgacagctaattaagctatcatattggaggcaaagttgaattgagaaaatcagataaaaagatgcgtatgtttggaaaaatattgttcatcctatatctggtggtaactttatatgccatgtttttttcagaaagtttagacagaaccatggttagtgatgaatacagatataacctggttctgtttaaagaaataaacagattttggcgaatgagacatacatatgggtggcagattacaataatgaatctggcaggaaatgtagcattctttatgccattcggatttttgttaccaagtatgtcaagggagaaaatcgtaaacaattttgtaagtgtaacattgcttacaatggttttcagcatgcttattgaaacagcccagcttgttttaaaagtgggagcctttgacgtggatgatatttttcttaatacagttgggggactgttggggtatattgttttaaaaatcatgaaattattcatgaaaaatagaaataagtgagaataacaaagtgaagaagagaagcaaagaagaaaaaagagaagaaaaagaagagaaaaaaggacgaaagatacctttaaggaattatacaaaaggtggcagaaagtcatcagttattgccggcgtaaatatattgttatttatactggcagtggttatttcaatacttaaaaaaggcaatgcaggaatttatgtgggccttttaatgttgttggttatggtgtcagctatagcaggatttgttattggaattaatagttttaaagaagaaaataaatttttaaaatatacatatataggcacaataactaatgcagttatttggatttttatattaggtatgtatttggcatatgtataaaaagtgtgtatagattttaaagaaagagagtggagcatttggatattatttttgaaagatatgagattgcaacctcacgaataagagaaataataaatgaagatacagtgtcagagccttttaagagctttttctgtaaggcatctgagtttatttgtaaaatagatgatttaaacagcatcataaaatcaggagagataaatgatttctcattagaccggttgaaagaacttaataaaagtttatttgaagaaatttatggtgaaaactatgaagaaagtttcgccaatcctgagtatgcagtgaaaactttaggagaagaatacggaaagatactttgctatatttacacaaaaaatcgtggaatgattagaaatgtatatatggggagattagaagaagtagttcttcaaatggaattgtttacacagatttataattattttgaagatgtggaacaattagaatatgacaatgtttatgaaacggtttattcatatgaaaaagataacacagagatttttacagaccttatgattgaggacagaattaatcctgacaataagtttgctgttgatattgttatgaacagcgatttaaatgacttaagatatctttacaaatatggtgagcacgtaggttttaatgaacttaagatggcagagtttcttaacagtttaagtcaggaagaaatagacagacttgcaaaggtttatacagaaggctacagaattggttttataaacacaggaaaagatatttctaataaaggcactgttgatattagatattcattgggctttgaaagaattatcagatctgcaatatttaattttaaaaaaatgggacttgaacctgtaatttatcaggtaggttatacaacaacaagtcctaacaggcagtatgcttacgatcacagatacgatgatgcattgtatttggacaaggcatatattaagagaaaattagaagtttcaagacatgcttatgaaagcagaaaacagttggcaggaaagatggcaggccctgcagtaattgagattttcggagagacaccttttgaaccggaaaataagaaacaggcatatgcactttcagaagaacagcagaaacttaagtcagaatatattactgaatatcagacaatggttcaagagtatattaagggagacgaaagaagttttacaattattgcttttccaatacctgagtttggggacaactttgaacagatgtttaaggaaactgtaaagattaacactcttgattctgaaatatacggaaaggttcagcagaacataattgatgcactggaccaggcagaatatgtaaaggttcttggaaaaggcgacaacaaaactaacatgaaagttcagatgcatgaccttaagaatcctttaaaggaaactaattttgaaaactgtcttgcagatgtaaacattcctttgggagaagtttttacttcacctaagttaaagggaacagagggaatccttcacgtaagtcaggtatatttaaatgacttaaagtataatgatttgcagattacatttgaagatggaaaaataaaagattacacttgtaagaattttgacactgaggaagagaataagaaatttattaagcagaatgtaatgtttaatcatgaaacacttcctattggagagtttgccataggtactaacacaacagcttatatggttgcaaagaagtaccatgtggtttacaaacttcctattcttattgttgaaaaaatgggaccacattttgcagtgggtgatacctgctatagctttgaggaggatattaaaacatataatcctgacggcaaggaaatagtggcaagagagaatgaagtgtcagctcttagaaagacagacataaagaaagcatattttggttgtcataccgacattacaatgccttatgatgaacttggtgaaataacggcagtaagaaaagatggcagcgaaattactataataaaagacggacgtttcgtattggaaggaacagaacttctaaatgaaccgttggaagaaatctaatgttgactacagttatttttatgggtacaatgtagaatatgttaaatttataacgctttaagatgaatttatgtgaaaaggagaacaaaatggcaaaagtagcaattgtaatgggcagcgattcagatatgcctgtaatgagcaaagcagcagattttcttgatcagatgggaatcgattatgagatgaccataatttcagcacacagagagcctgatattttctttgaatgggctaaaggagctgaagaaagaggagttaaagttattattgcaggagcaggaaaggcagcacaccttccgggtatgtgcgcagcattattcccaatgcctgttattggaataccaatgaagacttcagatttaggtggagtagattcactttactcaattgttcagatgccttcaggaatcccggttgcaactgtagctattaatggcggtcagaatgcaggtatccttgcagcaaagattcttgctacatcagatgctgaattacttgcaaaacttaaagattttagcaaggaaatgaaagattcagtagttgaaaaagatgcaagacttaaagaagtaggttacaagaactactaagaattaaaaagtgtaaaagatgtttaagcatcatataaaataatataaaagcaatagaaaagtacatatagaattaaggagattatactatggattacaagaaggcaggcgttgatattgaagcaggttacagatcagtagagcttatgaagaaacatgttaaggaaacaatgagaccggaagttttaggtggtcttggcggtttcgcaggtgcttttagcttagattcaattaagaagatggaagaacctgtattattatcaggaacagacggatgtggtacaaaagtacagttagcatatattatggataagcatgacacaatcggtattgactgtgttgccatgtgtgtaaatgacattgcatgttcaggtggagaacctcttttcttccttgactatattgcatgtggaaagaactatcctgaaaagattgcaacaatcgttagtggtgtagctgaaggatgtaagcagtcaggagctgcattagttggtggtgaaacagcagaacatccgggacttatgcctgttgacgaatatgatcttgccggatttgcagtaggcgttgtagacaagaaagaccttattacaggtgaaaacattaagcctggcgataagttaatcggtattgcatcttcaggtgttcatagcaacggattttctttagtaagaaaagtattcgaaatgacagaagaatctcttaatacatattatgatgagttaggaaagactttaggtgaagcgttacttgcacctacaagaatttatgttaaggcgttaaagaaagtaaaagaagcaggagtaacaatcaagggatgcagccacattacaggtggtggtttctacgaaaacattccaagaatgcttcctgacggagtaaaggcagtagttaagaaagacagctacgaagtacctgcaatcttcaaacttcttgcaaagacaggagatattgaagaagaaatgatgtacaatacttacaacatgggtatcggtatggtattggcaattgatcctgcagacgtagacaagacaatggaagctttaaaggcagcaggagaaacatgctacgaattaggacaggtagaagccggagaaaagtgtgcagaattagtatagtaaatatttaaatgaaaaggctagtttttcaactagcctatatgcttttctaaagaaaataaatactgcttagtatcaataacttttttggtacttaataggaggaattatgttaaaggtaggagtaatggtttcaggtggtggaactaatttacaggctattatagacggtgtacatagtggagtaattacaaatgctaagttagaagttgtaattagcaataagaaagacgcatatgctttaaccagagcaaaagacaacggaattaaggcagaaagcgtatgtattaaggattatgctacaagagatgaatttaataaggcattaatcagaacaatagattcatacaatcttgacctgattgtacttgcaggttttcttgtggttttaccggaagaattaattaataaatatagaaacagaattataaatatacatccatcattaatcccatctttctgcggaaacggattttatggattacacgttcacgaaaaagcattggagcgtggagttaaaattacaggagctacagttcatttcgtagatgaaggaacagatacaggtcctattatataccagaaggctgttgaggtattagaaggtgatacacctgaaatccttcagaagagagttatggagcaggcagagtggaagattttaccacaggcaattaacgatattgccaatggcaaaatagcaattggagaataattttattgaatagaatccattaaggatagtaagacaaggagatataaaatgaaagtacttattgttggaagtggcggaagagaacatgcaattgcaacagcagtggcaaaaagccctaaggttgacaaaatctattgtgcaccgggaaatgcaggaatcggtcaggttgctgaatgtgtaaacattggagcaatggaatttgataaattagttgattttgcaaaggaaaaagaaatcgacttaacagttataggtatggatgatccattggtaggcggtattgttgataagtttgaagaagcaggacttagggtattcggaccaagaaagaatgcagccattcttgaaggttcaaaagctttctcaaaagacttaatgaagaaatataatattcctacagcaggatacgagaactttgattcacctgaagaagcaatgaagtatcttgaaacatctaaatatcctattgtattaaaagcagacggacttgctcttggaaaaggtgttttgatttgcaatactaaggaagaagcaatggatggcgttaaggaattaatgcttgataagaagtttggtaatgcaggaaatactattgtaatagaagaatttatgacaggtcgtgaagtttcagtactttcatttgttgatggaaaaactataaagattatgacatcagcacaggatcacaaaagagcaaaagatggtgatcagggtcttaatacaggaggaatgggaacattttcacctagtcctttttatacagaagaagttgatgaattttgcaagaagtatgtttaccaggcaacagttgatgccatggcagcagaaggaagagagtttaagggagttattttctttggcttaatgttaacagaagacggaccaaaggttcttgaatacaatgcaagattcggtgatcctgaagctcaggtagttcttccaagaatgaagaatgatattattgatgtttttgaagcatgtgttgacggaaccttagatcagatagatttacagtttgaagacaatgcagcagtatgtgttgtattggcaagtgacggatatcctgtttcatatgaaaaaggctttgaaatcaaaggccttgaaaactttgaaaacaaagaaggatattatgttttccacgcaggcacaaaggctgaaggtgataagattgttactaacggtggacgtgtacttggggtaactgcaaaaggaaaagatttaaaggaagccagagcaaatgcctatgaagctacaaaattaattcagttcgaaaataaatatatgagaaatgatattggcaaggctattgatgaggcatagttatatacttaaaatatcaaaataaggaaggtatttaaatgaaaaatttaagaaagatggttatgctgattttaactttggcaatgcttacaacgggcgttcaggtaagtgttttggctgaccagacaacagatttacagtctatgaaagtttatgctgtaaatgcagcaggaaagaagacaaaggcagaacttaattttagttcaacaacttatacatatgacataacagttatgtcagatacagaatctattgagattgttgcaagtcctgcaacttcaggttcaacatgggctatagagaaagatggaattaatactaaaatggattttggtaaaaactacacagcagtagttgttacatcaagtacaggcgcaaaaaacaaatatgaaattaatactacaaagcttacagaggctgaacaggcaacatacaaagccggaagttcaacagatgaaacaactgctaaagacagcagttcaacaagcagtaagaaatcaaagaaggcttctaagtcagacattacagttggcaaaggtgaatacaagatagtagaagattttaaggatgatcttattcctgaaggtttttcaagaacaaaagctgagtatgacggtaagcagtatgaagtaatcaaaggtgacaagaaagacattacagctttctatttaaagaagggaagcactaaaggattttacatctatgattatgaaacaaagaagttttcttcattaagaaatattaagattgccagcagaatgtatacagtagttaacccttctgaaaaggcatcttgcttaaagaagtacacaaagaaacagattactgtaattgatcaggaagttaatgcctgggttttaaatgaagaagaggggttatatcttctatatgcaatgaactggaatggcgatacaaacctttattgctacgatgacaatgaaaaatgtttccagagatatattgcagaagatgatgtaaatactcagattgaagcagcaaataaggcatacaacaatgtaaagaacaaatataatacattagcatcaaaatacaatatgcttcttaagattgcatgcggacttgtaattgttataattattcttatttttgttattataaatattaagcttaacagaaaagaaaaaagacttgccaagcagaaaaaatatgatgacaaaaacaatggcaatggaaaagacaagaaagatgcagaagattcaacagaatcaaatgacgtggaagaatcagatggaattgaacctatggaagaacaggttaaagaaatagaagaacctgaagatgtttcaatttctgaaactgttgaagaaccagaagttttagatgaggttgttgaagatttccctgaagcagatgatgtggaaattccacaggttgaagaagctactgatttgaatcaggatgttgtattagatttagatgacatagaagatgcggcagaaacaactgaagatgaaatagagaaagaatctgaaaaagctcagttagaagcggaagaagatatgaaagaaacattaaaagacatgcttccggatgacgatgaggatgatgaagattttgaatttattgatttagattaattaggaataccccagacttcggtctggggtatgttagcagaaaaatatggaggaaaggtaatggaaagaggtaattttaccagacaggctattgaagctatggaatatgctaaagaagtggctataagttttggtatgaattatatcggcacggaacatttattggcaggcatttccaaagtatcagaaggtgtggcagcaaatattttgtataactataatcttgtttatgcagatataatgaaagccattagtgaggacatgggaatagaaggcagagtgcgtacaaggtccagaagcagaaatctggaaacaacagcaagggccaaggcaatattggaaagagcttatgtagaggcatcaaaacagggattgcctcagattggaacagagcatattcttcttgccatagttgcagatcctgattgtgaggcacattgtattcttacaagttttcgggtaaatattaaaaagatttgtgcagatattttaaaacttacaaatagagatccaagagagataagacagtacatccggacagaaaagcgtcaaagagatgacaacgtttctacaacaccaacattagaccagttcggaagagatttgactaaggcagcaaaggcaggtcagcttgaccctgtagttggaagagatgttgaaataagaagaattattcagattttaagcagaagaacaaagaataatccttgtcttataggagagccgggtgttggtaagacagcaatagttgaggcaatagcccagaagattgtacagggacttgttcctgaaacaatggaaggaaaaagattaataagtcttgatctttcaggtactgttgcaggctcaaaatatagaggcgagtttgaggaaagattaaaaagaataatggatgaagttgaaaattcaggaaacattattctttttattgatgaaattcatacaattatcggtgccggtggcgcagaaggttcaatggatgcctcaaatattttgaaaccatcattaacaaaaggacgtcttcaggttataggggcaacaacaattgcagaatacagaaagtattttgaaaaagatgcagcccttgagagaagatttcagccggttactgttgaggagcctacagaagcccagactattgagattttgcatggattaaaaagtgcttatgaagaatttcataaggttaatatttcagatgaagcagtggaagctgcagtaaaactttcaacaagatatattaatgacagaaatcttccggacaaggcaattgacttaatagatgaggcatgttcaaaagtaagaattaaggaaaaaccaaagccaaagtcagtaacaaataaagaacttgatgtagctgaattaaatcttgaacttgaaatgtgcgtaagacacggagatttcaaaggagcagcagtgcgcaaaaaggatttagacaaagcacaggcagctcttgataaggctattgcaaagtggcagggaacagagaaagaatacagacctgttattgatgaaaatacaatagaagaaatagtatcaatgtggacaggaatcccggtaacaaaaatgggaaagaacgaacagcagagattattaaagttagaatcaatattgcataagcgtgttgtaggccagacagaagctgtaactgccgtggcaaaggctgtacgaagaggaagagtgggactaaaaagtgccaatagaccaattggttcatttctgtttttgggacctacaggtgtaggaaaaacagaactttcaaaaacattggcagaagcagttttcggttcagaagatgcaatgattcgtgttgatatgtcagaatatatggaaaaacacagtgtatcaaaacttattggttcacctccgggatatgttggatatgaagaaggcggacagcttagtgataaggttagaagaaatccatattcagtagttctttttgatgaaatcgaaaaagctcatcctgatgtgtttaacatattgttacaggttcttgatgacggccagattacagattcaaagggtagaaaagttagctttaaaaatacaattattattatgacatcaaatgcaggagcaaacagaataatagaccctaaacatttaggctttagcagagacataacagagaagcaggattatgaaaagatgaaagcaagtgttatggaagaagttaagttaatgtttaaacctgagtttattaatcgaattgatgaaattatagtattccatgctttaactgaaaaagaagtaaagagtatagttaacattatgcttagaaatcttgcaaaacaggttaaggaacagatgaatattgagcttaaatatactgaaacactgaagagtgcccttgcaaaggaaagctacgataagaagtatggtgcaagacctttaagaaggatgattcagaacaaaatagaagacaatctggcagaggaaatacttgcagaaaaagttaagcagggagataaagttacagtgtcatataagaacaaatccgtaactttttctgtggcagaatagtttaaaatgtattatactagaactaccaaaaaaaatagataaagtcacattagatgatttaataacaggaggacaaaatggcagtaattaaggaattaatcagaaaagaaaataatggttcaatcagcttcggtaattatgaattaccacagaaaacaaagttagcagactttgaagttaatggagatttatataaagtaaaaacatttaaggaaattacaaaacttgaaaagaacggaacttttgtttatgaatcaattccgggaacagcagtaagcgtttttaaggaaacagcagatgaagtaagctttttcgtagacggaaaaggtcagacacagattacattagaattagaatctaacaaggaatacagagtttttgttggagacagagaccttggagtatctaagacagacgttggcggaaagattacattagatgtagatttagaaaacggaaatcttactactgtgaaagttgtaacagcataataagtaagattttaaattaagatataaaataaagctacaaaacaaaataggagagccatggcaaaatcaaaaaagacggttttcttttgcaaagagtgcggttacgagtcaagtaaatggttaggacagtgtccgggatgtaaagaggtaggaacttttgtagaagaaccgatgggggcaaagaccaacaataacattagaaggggattaattaataataaaccggtaacaataaatcaggttacggcagatgatgaggagagaatcacaacaggttttggagaactggacagagtattaggagggggagtagttcccggcgggctaatacttgtaggcggtgatccgggaataggaaagtccacattacttcttcaggtatgtagaaatatgtcaaataatggcaagaagattttatatatttcaggagaagaatcccttaagcagattaagcttagagcaaacagaatgggacagttttccgataatttaagtcttttgtcagagacaagtcttgatataatagagtcagttattttagaaacaaaacctgatgcagtagtaatagactcaatacagactatgctaagagaggatataggctcagctccaggcagtgtaagtcaggttagggagtcaactaactttcttatgcagttagctaaaggtaataccattccaatatttattgtaggtcacgtaaccaaagaaggggttgttgcaggacctagggttttggaacatatggttgacacggttttatattttgaaggtgacagacatgcagcatatagaataatccgaggagttaagaaccgttttggttcaactaatgaaattggagtatttgaaatgagttcagaaggacttagggaagtattaaatccgtcagaatttatgttagatggaagacctgaggatgcttcaggttcagttgtggcatgtttaatggaaggaacaagaccgattcttgtagaaatacaggcattaatatcccacaccaactttggaatgccgagacgaacggcggtgggaacagactataacagagttaatcttttaatggcagttatcgaaaaaagaattggggttcagatgtgcgattatgatgcatatgttaatatagcaggtggaatgaaaatcaatgaaccggcattagaccttgcattagtaatggcattaatcagtagctttaagaacagagtaatagacccaaagacaatagttttcggtgaagtagggcttgcaggagaagtaagagcggtatcacaggcagacaaaagagtacaggaagctaagaaacttggttttacaacgtgcataatgcctgctgtatccaagaaaaatcttacagaaatcactggaatcaatataattggggtaaataatataaaagaagctgaagaacttatttaaaaaagttgacaactgatattcgttagattagaataacaaggtaagaaaaagtccaaaaggacaataaaataataaaagcgttgatagagacagtagttgccttgcataaataatgcatagtgaacgttatagagagttcggataaggtggaagccgaatacaagtagcaggtatatgaacatcactctggagttgcagcccaaagaacgtataaagtttagtaggcgctgacggtatccaccgttaaagggaacacatattaagggagaaatcctgcgtatgctgtaaaaggtggttaacgaaaatacaggctttcgtcctttacagggcgggagcctttttatttagtgctccatagtggacgcacaataaaataaatacacagatatcattggatgtttgcgaaaacaatgcagataggatatgcgacagatttttctgcaagcaaacaataggcaaattttcgtaattttgcgagcatagtgtacagcgataaaacgactgtctgagcaaagcgagtttagtttttcgctgtaccataggcggcggagcaaaataagaaaattaacgtgtttgcggtagaaaaatctgtcgcataccgggaatacattattttcgcaaacatctgatgacaaaaaagaaaggagattgaaatgtacaagaaggtatcaaccaatttgaactttgttgacagagaaaaagaaacagaaaaattctgggatgacaatcacatctttgaaaaaagtatggaaaatagaaaagaaggaccaacatatactttttatgatggacctccaacagctaacggaaaaccacatatcggacacgtattaacacgtgtaattaaagatatgatccctagatacagaacaatgaagggatatatggttccaagaaaggcaggatgggacacacatggacttcctgtagaacttgaagtagaaaaattattaggtttaaatggaaaagaacagattgaagaatatggtatggaacctttcataaagaaatgtaaggaatctgtatggaaatacaagggaatgtgggaagacttctcaggaacagttggtttctgggcagatatggaaaacccatatgtaacttatgatgataattttattgaatctgaatggtgggctttaaagactatctgggataagaaattattatacaaaggttttaagattgtaccttattgcccaagatgtggaacacctctttcatcacaggaagttgcacagggatacaaggcagttaaggaacgttcagctatcgtaagatttaaagttgttggtgaagatgcatatttccttgcatggacaacaacaccttggactcttccatctaacgtagctctttgtgttaaccctaatgacacatactgcaaggttaaagcagctgacggatatacttattatatggcagaagctttacttgacacagtattaggaaagcttgcaacagaagacgaaaaagcttatgaagtattagaaacaatgaagggtgctgaccttgaatataaagaatatgaaccattatatgaatgtgcaaaggctattgctgataagcagagaaagaaaggtttctttgtaacatgtgacacatacgttactatgagtgatggtacaggtattgttcatattgctcctgctttcggtgaagatgatgctaatgtaggacgtaactatgaccttccttttgtacagcttgtaaatgacaagggtgaacttacagaagacacaccttatgcaggtttatttgtaaaggatgctgatcctaaggtattagtagaccttgacaagagaggacagttatttgatgcacctaagtttgaacatgattatccacattgctggagatgtgatacaccattaatttattatgcaagagaatcatggtttattaagatgacagaagttaaggataaacttgttgcaaataataacacagtaaactggattccaaaatcaatcggtgaaggacgttttggaaactggcttgaaaatgtacaggattggggtatttcaagaaaccgttattggggtacaccacttaatatctgggaatgctgcgattgcggatgtcaggaatcaattggcagccgtgcagaattagcagaaagaagtggaaatcctgataatgctaaggttgaattacacagaccttacattgatgaagtaacatttaagtgtaaagagtgtggtggcacaatgaagagagtacctgaagttattgactgctggttcgactcaggagcaatgccatttgcacagcatcattatccatttgaaaataaagatttatttgaaaaacagttccctgcagattttatctcagaagctgttgaccagacaagaggatggttctattcattaatggctgaatcaacattattgtttgataaggctccatacaagaacgtaatcgtacttggtcacgttcaggacgaaaacggacagaagatgagtaagtcaaagggtaacgcagtagatccttttgaagcattaggacagtatggtgccgatgccatcagatggtatttctacactaactcagctccatggcttccaaaccgtttccatggtaaagcagtccaggaaggacagcgtaagtttatgggaacactttggaacacatatgcgttctatgtcttatatgctgaaattgatcagtttgacccaacaaaatacacacttgattatgataaattaagtgttatggataaatggttattatcaaaacttaactctatggttaaggcagtagatgaaaaccttggtaactacagaatccctgaagctgcaagagcattagatgattttgtagatgatatgagtaactggtatgtaagacgttcaagagaacgtttctgggcaaaagacatgccacaggataagattaatgcttacatgacattatataaagcacttgttacagtatcaaaggctgctgcaccaatgattccatttatgacagaagatatttatcagaatatcgtaagaagcgtagatgaaacagcacctgaaagtattcatttgtgtgacttcccagaagttaatgaatcttacattgacaaagaattggaagaaaacatggaaagagtacttgatattgtagtacttggtcgtgcatgtagaaatgcatctgcaattaagaatagacagccaattggaaagatgttcgttaaggcagaatttgaattatctgatttctacaaagaaattattgaagaagaattaaatgttaaggaagttgagtttacagatgatgtaagagcatttacttcatattcatttaagccacagcttagaacagttggacctaaatatggtaaattcttaggcaagattaaagaagcattatcatcattagacggaaatgcggctatggataagattaatgccggagaacctttaacattcgattttgacggcaacgaagtagttcttgaaaaagaagatttacttattgatatggctcaggttgagggatatgtatcagaaagcgataataatattactgtagtgcttgatacaaaactttcagatgaacttattgaagaaggatttgttagagaaataatcagtaagattcagacaatgagaaaagaagctgatttccaggtaatggacaaaattgtggtaaatgtagataaaaacgatacaataaaagctataattgagaacaatcttgacgaaattaagtctgaagtgttggcagataatgtcatatttggtaaaataaacgggtatgaaaaagagtggaatattaacggcgaaaaggtaacttttggcgtagaaaaagctctttagaatttgacttgaaatattcggctataaaatttattaaaaagagagaaacaatgcctgtcattgtttctctctaatcgcataaaaaaggagatttaatatggctaagaacgaagctatggaaaagcatgaagaattcaaggcagaattcaagaagcgtgtgaaagaacaggctaaaatgctttacagaaaaagccttgatgaaataagtgacagacataagtttgtatgtgttgcttatgcagtaaaggatattgtaatcgatcagtggatagcaactcagaaagcatatgatgagaaggatgctaagattgtatactatttatcaatggaatttcttatgggccgtgctcttggaaatatgattatcaatctttcaagcagagatgaaatcaaggaagctattgaagaattaggacttgatcttaatgtaatcgaagatcaggaacctgatgcagctttaggtaatggtggtcttggtagattggcagcatgtttcttagatagtttgtcaacacttaactatcctgcttatggatgtggtatcagatacaaatacggtatgttccagcagaagattgaaaacggatatcagaaagaaatacctgaagactggttaagacatgctaatccattagaaatcaagcgtgaagaatatgcttgtgaagttaagtttggcggatatgtaagagtagaaaacagagacggacgtaattactttattcaggaaggctaccagtcagttaatgctattccatacgatatgccaatcgttggttacggaaacaacgtagttaatacattaagaatttgggacgctgaacctgtagtacactttaatcttgatgaatttgacaagggttcatatatggctgcagttgaacaggagaatcttgcaaagactattacagaagttctttatcctaatgacaatcattatgcaggtaaggaattaagattaaaacagcagtatttctttgtttcagcaagtttacagacagcaattaagaaatacttaaagaatcatgatgatattagaaaattacctgaaaaggtagtattccagatgaacgatactcatccgacacttacagttgcagaacttatgagattattaatggatgaatataacttagaatgggatgaagcttgggatattacaacacatgcatgcgcatacactaaccatacaatcatgagcgaagctcttgaaaaatggccaattgaattattctcaagattacttccaagatgttaccagattattgaagaaatcaacagaagattttgcattgaaatcgaaaacaaataccctggaaatcatgataaagttgctaagatggcaattatctatgatggtcaggttaagatggctcatcttgcaatttgtgcaggtttctcagttaacggtgtagcaaaacttcatacagaaattttaaaacatcaggaattaaaagatttctatgaaatgatgccggagaagtttaacaataagactaacggtattacacagagaagattccttctccatgctaatccacttctttcagaatgggttacaggaaaggttggagatgactggattacagaccttccaaagattaagggaatagaagtatacgcagatgacaagaaagctcaggctgaatttatgaatattaaatatcagaacaaagtacgtcttgcaaaatacattaaagaacataatggtattgatgtagacccacgttctatttttgatgttcaggttaagagacttcatgaatataagcgtcagttattaaatattttacatgtaatgtatttatacaaccagattaaggaacatcctgaaatggaattctatccaagaacatttatctttggtgcaaaagcagcagcaggttacaagattgctaagcttacaatcaagttaatcaatagcgttgctgatgtaattaacaatgatgaatcaattaatggaaagattaaagttgtatttattgaaaactaccgtgtatcaaatgctgaaattatttttgcggcagcagatgtttcagaacagatttcaacagcatcaaaagaagcttcaggcacaggtaatatgaagtttatgttaaatggtgctttaacacttggaacaatggatggtgctaacgtagaaatagttgatgaagttggcgaagagaacgcatttatctttggtttatcttcagatgaagttattaactacgaaaacaatggcggatataatccaatggatattttcaactcagatatggacattagaaaagttcttatgcagttgattaacggattctattctccagatgatcctgaaagattcagaccaatttacaactcattacttaacactcaggaaacagatgttgctgacagatactttattcttaaagattttaagtcatatgcagcagctcagaagagagttgaagaagcttacagaaaccaagaaggctgggctaagtcagctatgttaaatgtagctaatgttggtaagtttacatctgacagaacaatcgaagaatacgtacaggatatttggcatcttgaaaaagtaaaagttaaaatggacgtatagattacagaaaattgtgaaagtgtcacaatagatataatcaaatataattaaaatgaaaccccaaaaagttagaatgtaatgtctggttttttggggtttttgtatgcactacaatcatataaatgatttttgaaaaataagttagtataagggatttttaggaataaccaaatgacagatagaaaaaagtttattatgctaatattattttcgatttttttcccgttagttataggtagtgtatgtgttcttgtaaacggaaacaaaatatctaaggctaagccctcagggaaaacaatattagtggataataaaaactacagctttgaaatggatatggagaacttcatatcttacgttcttatggcgcagatggacgaaagtgagccggaggagcttttgaaagctaagtctgttattattagaacttatattttgtacaaaatgaaggacaaagctcaaatagcagcttcagatttgggaatggaatatagaaattatggggagttaaaaaacagtagatttcaggatttttgcagggaaaacattaaaagccccaaaggaatggctgcatattttacaggtataggttcttataaaatatacaatgagaaaaataaaaaaattaaaagaatagtagacaaaacaaaaggcaaaataataaagaaacagggggagactattttgccactgtttcataatataagtaatgggaaaaccaggttaggggaggaaattcttggaaaggaatatagttatctaaaaagtgttatatgccagaatgacataaaggagaaggaatatctttgcacaaggtatttaacggttaatgagtttaaggaaaaactgtcagctaatggaattgttgtatttaaagatgggaaggaaattctaaaaaatataaaagataagaaggaaatcattaatctgataactgttgaaaaagacaaagaaggctatgctttaaaaataagaattggggatactgttgttctggcagatgatttttcaaaagccctcggtcttaattctacagatatgagcatagaagaatatgaaaagggaataagaattacaactaaaggcaacggtcacggttttggaatgagtataagctatgccagataccttgcaggtcatggcaagccatggcaggagattcttagcactttctatgatgggaaaattgtggaatattaaaattaatttttttgtataaatcttcaattaatggtacatactgttattgaggtgatgagaatggataagaaatttatagcagcagttgcagtttgctttgttgcattagtaggcgtagccacgggaacttattttcttgggcaaaaaagcgacgaaaacattgtaaaattaggaaaagcaaacataactgaaacaacggcggcagataaaaatattgaagcagcgggaaatgttgtggaaaaagaaacacaaaaagaaacagcaatggaatctgaaacaccgaaagacagagaagttgaaccgggaggttatttaacagaagaaacaactaaggaaaaagccgtaaataacgtagtggaagaaaacactcagtctaatgtaagcaaaaaagattacttgtatggactttcatcagaggcagcagcccagattaaaacattaaagtttaacaagaacagcaaacttatctggcctgttgagggtagcattattatgccatatgatgtgaaaaatacagtatattacgcaacattagatgaatacaaaaccaatcccggaattgtaatccaaagtagcaaaggcactgcaataaaggcagcggcagatggtgttattacaaaaataacacaagatgacgaacttggcgttgttatcagtcaggcagtgggaaatgattatatcgtaaactacggtcagaccataaatcctgaagtaaaagaaggaagcttcgttgaagcaggtcagactatcgcctatgttaaccagccaactaaatattactccaaggaaggggataatatttacttctcagtagaaagaaatggaaaaacaaaagatcctttaaattatattgattacgaggactaatcacaaaaccggaataagtgcatacaataaggtatacaaaagaaaatattaaaagctgctcacttttgtgacagcaggcaacagggttaaaaaaggaaaatcataaacaattattctaatgattttctaaaatccgtacctgttgtttataatagattgtgctatcatgtacctgaaaaatacgtggtagcactttttttgatattttcaatcatatgttataattccacgcagaaatctcaacgtgtttgctgtaaaaatttctgcgtggaatttaaaacagtgccattgaaaatatacaaactatattataagataaaggttagaatgaaggctaaatatagtatttagttatgtacggaggaagaaactatgggtaagtatattatggcattagatcagggaactaccagttccagaactattttatttgataaaaagggaaatattgtttgtcaggcaaataaggagtttgagcagatttttccaaagccgggctgggttgaacataatcctgaggagatttggatgacacagcttcttacaatggaagatgttatgagacaggcaggaattacaggcaaggatattgaagccattggcattactaatcagcgagaaacaacggttatatgggacaagaatacgggaaaacctatttataatgcaattgtttggcagtgtagaagaacttctgatattgtagacggacttgttaaggacggtcttagggattttattagaaataagactggattggttcctgatgcttatttttcaggaactaagattaagtggattcttgataatgtgccgggagcaagaaataaggcagaaaatggtcaattgctttttggaacaattgactcatggcttatgtggaagttaagcggtggaagcatacacgcaacggattacactaatgcgggaagaactatgatttataacatatttgatttggagtgggatcaggaattactggatatactagatattcccaagtctatgttgcctaaggtaaatccttcaagtggaatttttggatatactatgccggaactgttaggagaacgaatacctataagtggtgttgcaggagaccagcaggcggcattatttggtcagtgttgttttgaaaaaggtgatgtaaagaatacatatggaacaggttgttttcttttaatgaatataggaaataagccggttatatcagacaatggtttgattactactattgcagcaggcacaggcaaggttgaatatgcattggaaggcagtgtttttgtggcaggagcggcaatacagtggcttagagatcagatgaagttagttaacagtgcaccggaaagtgaagagattgcagaaaaggttagtgatactaatggagtatatgttgtgccggcttttacaggaatgggagcaccttattggaagcagaatgccagaggcatggtagttggcataacaagaggaactgcaagagagcattttgtaagagctacccttgaatcacttgcttatcagacatatgatgttttgaaggtaatggagcaggatgcggcaatggaaattaagtctatcagagttgacggtggggcaagtgccaataatcttttaatgcagtttcaggcagatattactgaaaaacaggttgtgcgaccatcagtaattgaaactacagggcttggggcagcatatttggcaggtctagcaacaggttattggaaagacaaaaaagacattataaaaaattcaacaatagagagaaagtttgaaaacaaaatggattctgaaaaggtgcagaaatatatcaagggatggcacagagctgtaaaatgtgcccttgtttatgcagatgaggagtaaataatatcctatgaatctggtattgtgtttattacgcaaattggatatataaataataccacatactgatatactatactttaatgagttacagtgtcagattgagataatgcaacttagattaagtaataatacacttaggataaaagataggtgttaatatcaggaggagaattatggattcaactaaacagaacgtaggaaagattgttattacagctttatttgcagcgttagcatgtgtagcaacaatgattattaaagtacctacagtaggaacaaacggttatgtaaatattggtgatactattgtattgctttcagcttggatgattggtggcgtttatggtgcccttgcagcaggtatcggttcagccctttcagattttatcagcggttacggaagttatgtaccgggaacatttgtaattaagtttttaatggctttagttgcatatttagtatttgtagcaattaagaaagcaaacactaaggacagtaagggaatgaatgtagtagcttatattgtaagtggtgtagttgcagaagttattatggttttaggatatttcttatatgaaagtactttattaggatatggacttggagcagtgccttcaattggaagcaacagcatccagggtgttacatgcttagtattaggatttattgctatttttgcattagaagaagcaaaggttacaaaattagttaaaaaatttgtataaaaatataaaataatatgtaaaaggaaagagttgtgtgataaaattgtaggcggtaaaaagagcaggctacaaatatcatacagctctcttttgcattatgttgtttgaaaggagcgattcaaatgtacgaagaattaaaagaacaggcaaaaaaaacaacagaagaaatttgcgataaagcaggattaaaggaaggcaatattcttgtagttggttgttcttcaagtgaaatatgtggagataagattggaagcaattctaaccttgaagtggctaaggcagttttctcaggaatatatgaagtccttgaaagcagaaagatatatcttgcagctcagtgttgtgaacatcttaacagagcaataatagttgaacgtgcagcagttccgttttcagaaatagttaacgttgtaccacagcctaaggcaggtggttcatttggaacaacagcatataagacatttaaagatcctgttgctgtggaagaaattaaggcagatggtggaattgacattggcggaactcttattggaatgcacattaagaaagttgcagttccggtaagacttgaaaataacaaaatcggcgaggcaaacgtacttgcagcaagaacaagacctaagtttataggaggttgcagagctgtatatgatgaaagcattgaatagaaaaataaaattataaaaggtaataaaaacagttttaaaaacaataaaacccctgattacaaggcatgtgatcgggggctgttttttttgctaaaatatagattgaaacgttatttttgatgaaaatgataaaagtgtttttatttcaaaaaaaatattgtgcaaaataactaaatgtgttaggataaaaacgtatttattaaccgcaaaaattatttttaaaagcggaaggaaatgaaaacgtttttaggaggaaatttatgaacaaaatgaagcgaattttgacaattgttttaacattggcattaatagtaacaatgatgcctatgaatttaacaaatgttaatgcaaagtctacaacaagactaagctcgaagaagatagttttgcaggtaggaaaaacaaagaagctaaaggtgaagaataaacctgccggagtaaaggtagtttggaagtcttcaaagaaaaaagtagcaacagtttctaaaaaaggaaaggttaaggcaaagaaaccgggaaagactacaataactgcaaaggttggaaagaagaaatataaatgcaaagttattgttaaaagaaaaaatagtattaaagttacaaaaccttccgataacaataatagtgttataaatcaggtaactacaaagagtgaaccttcacagatagtaactactaaagctgaagtgaagacaactaaaacagaaacgactaagaaaaatgacagtactacagttaagcctacagtagcacctacaacagtagcaccaacagctaagcctacagtagcacctacaacagtagcaccaacattaaaaccaacagtgaaacctacaacagtagcacctacaacagtagcaccaacattaaaaccaacagcgaaacctacaacagtagcacctacaacagctaacggtaatgttgatgaaagcataaaagcccctgaaggacttgtacatgcaccgggagaaggattgccatatcatttcgcatgggcagcagttgatggagctgacggatataacgtttacatagatggagtgtatgtaacaaaagttacagaaaatgttgcagatttagatgcttca

SEQ ID NO: 12667 - DNA, 2925 bp, Unknown
  gut microbiota DNA sequence
ttcctatatcatctattccaacttctttgtctgaaacaaattctacatactgattgtctattccgttagttgtagcattaactgttatggtaacatcctttgctgctccccactgattacgaagacctattgccaagtctattgtttcacccggctgaattattccgtcaccattatttgactttgatatatcttctgaatcaaaagcatatatttcatctactgtaatattaggtttaggcttattagttaatgaagctgttagtgataatttcttatagttatatgtttttttaacatcctcattgcaataagttattgtgtcctctgtggctcccactaactgtcccattatatatcttgatgagtatgtgctcttatcctttaatgaacttctaagtatggcagcctctgccgataccataggtgccgccatagatgttccattccatgttgcgtaacgtccattaggcagtgtactgtatatatttacacccggtgcaacaacttcgtactctgcattggcattaggtaaatagtcccagttagagaaacttgcaaatttattattttcatcatatgccattacacctattacatatgaatatgctgcaggatacatgtttgcactaggtaaattatatgggcaatctgctgttggcataccctcattacctgctgctgctacaagtacacagcttccgaatgcatcctgtagggcgttttctattaaggctgaatgagctgatgaaccaaatgacatattaattacatctgcaccattcttatatgcatattctattccctttgctatatctgaagaatataatgttccgtctgaaccccctgccttaattggcattatcttagatttgtaggctatacccactccgcctacattgttgttttccatggcaataatacctgccacatgtgttccgtgaccatggtcatccataggtgtttcattaggatctattaggttaattccgtgtacatcatctacatatccattgttgtcatcatcagcacctgttgttccacttacctctgcgctgttagtccatatattgtcctgaaggtcttcatggttgtaatccacacctgtatcaataacagctactactgttccttcacctgcagtatttccatagtcttcattaccccatactgattcaagcttctgatcctttaagtaccactgcttatccatgcctttgttgtattctgcagatggaactgattcttcacttgtataatatttgtacacaggttcagctatttctactgcattctgattgtttgtattatctactatgctccaaatatctttttcttctgttgttattttgtaggatacctgattatattcttttccatcattatccttaatggtattctccataataacttcactgtctgtagccttagcatccttataccactgttcttcttctataggcttagtgttcttgtcttcttttctaattacaacaaagccgccttttttaacctttacggcttttctgtaatcttcgtccttagtctcacggataatcttctgatagtcaatcctcttatcagagtcccctatcttattatttacatcacttttcttgtcagatacattaggctctttagacttttcagtcttagtatccttgttcgatacaatgtctgcctttgccacatctgacttgttatcatttgttttagaaactgttgtttcttttactactttgttactgttgccatccataaaagtcgatgttgcaaagcctgttacaatcagtgctactgcaagtacaacaacaagtacttttttctgccaatttttcataacaaaaacctccttctacttgtattttaatgtttctacttttgattctagttatccactgttattagaatcttttatagttatattatagtacattggatgaggcgtttttttcacaaactgacccctattaagtttactcttcacattatcagctagccagtttattattgacagtcactttaataactgttatagttttaaacagtcacttctatgacttttctatttttttaactacgcaataaggagaataaaaatgactgttggtgaaaatattaagcgcattagaaagcaaaagagattaactcaaaaacaactgggcgaattatgcaatccatctatttctgccgcaacaataagaaaatatgaacttagcattttgaatcctaaactagaaactttgcaaaagatatcaaccgctttagatgtttcaattactgatttaaatgatgatttagacatgctacttagtcgctcattaaaatattataatgcaattacatctaatgagaaatcattcagtaattattttaatcaattaaatgaagaaggaaaacttaaagcaattgaaatggttaagttgttattaaaaatacctgaatatagaaaatagaatatacaaaatatataggaaacaatatacttacccaaggggcaaaaaggggcgttatggctaatcgccggaaaggaggttagctcatggttacatattccgacttgtttacttacaccattgttatttgtaccgttatatcgctagtttataatttgacaaaaaaataaacgccctttgctttggatggtaaaggcgtttatttgaacatcttacaaacaaggcggttaggtttaatctaacttttttgcccttttgttaagtatattgtaacagattcttgaaaaatttcaaatattaatttgcagttattactatccccaaacttcttttgctatatcttttacaagtgtaagcttggcccactgttcttcttctgtaagtttgtttccaatctcacatgatgcgaacccacactgagggtttaagtaaagtctgtctaatggaatgtatttttctgcttcgtgta

SEQ ID NO: 12668 - DNA, 549 bp, Unknown
  gut microbiota DNA sequence
gaaggaaagaggagttatctccccggatgaaggatttcagtgtgtggttttgagtgtataatcaaaaaagtacttgtaatttagtactgagtatgttataatactcttgatggcccggtggctcagctggttagagcgccgccctgtcacggcggaggtcgtgggttcgaaccccatccgggtcgctatcagtataatatataatttatacagaggaggtcgaaagcatatcaagctagctttctcaacctctttatttttttcttgggatcttagctcagctgggagagcatctgccttacaagcagggggtcacaggttcgagccctgtaggtcccatttatactttttacagtataaatgataaaaatgaatatgccgatgtggctcaattcaggcttattgatcttgtcaataagaggtgagcatgcaagcgaagcttgtgctctgccaattgagcgatgaagcatgtaaaaacagaatacgccgatgtggctcaattggcagagcagctgatttgtaatcagcaggttaacggttcgagtccgt

SEQ ID NO: 12669 - DNA, 48939 bp, Unknown
  gut microbiota DNA sequence
aatgggcagattcccgagtggccaaaggggacagactgtaaatctgctggcactgccttcgaaggttcgaatccttctctgcccattactttttaattaaatatcgcggggtggagcagtctggaagctcgccgggctcataacccggaggtcataggttcaaatcctattcccgcaactcaatgcccagttagctcagttggtagagcagaggactgaaaatcctcgtgtctctggttcgattccggaactgggcattatttttatttactaatggattttccattagttttttttttgccataaataattgcttactaatataaaaaatagtaatataaatatatgtatatcacccagtgagtggaggaataaatagaattaactacaaaacaaatttatagcactagcacacatagaaataattaaaggtaaaataattaaaacaagattacaagaggataaattaaatgaaagagcatcaggcaagagaaataatattcgaagaaaaggttaaaaaattattacaggacagcaattatattaatattgtagagcagaatatactggggagaagtagttcccatggtattaattcttatggaaaattaaatcttccaacagcttttatatttcctttaagaataatatttcagtataagtattatgcaaaaaataaggttgagttaatgcatgtacgcgattttggaggaatcgttgcagatatttctgaaactaactacgcaatacagggagatatgggaaatatatgcgacagatacaattacaccggttgttattttagcgccactgctttttcaagagaggctcaggagtatgcctgggcgcacaatatttttatggtatctttggagagaataggagtgatgcagcctattttgaaaaagatagattcttttgtgtcaggtttaagcgagaatataattaataacataacaaagcaggaattgttggagggttacgagcgtgaggtagatgaggagaatataattcctgaaggtgcaataggaattattaatgatgtttatcctgtaatgattttaggaaagaatgggtggactaaaccggtaatagaggaagctaccaaatctgagataaatagagcttatattgacagtgtatatagaagtgaaaatcagtttgaagctaattttgaacttaattttatggaatgcagcgcagagttttctgttccaattactgttgttgagaagcttatgaatagagaagataatgaaacaaaaagtaatgtaatatttaatatagatattccttttataagtgataagggaattaaaaaatttgtttcacttgaggtatttcttgaaggatttaatagaggagactatacaaataagcagatttcattttttaactttggcgaatagttagtgggagtatgtaatggaaagtaatagttataaaaattataacaataatagtagaaataattataaagataataatgaagactacaattgtcagaagaagagtttttacaatgaattaattgaatatagtaaaaatggaagatatccattacatatgccggggcataaaagaaatgaaaggctttttgatggaattgatccatataaagtggatattacggaaatagatggatttgataatttacacaatcctaaagggataatattggatgcaatgaaaaatgcatccgatttttttgagacggacagaacttggtttttggtaaatggaagttcatgtggaattttagctgctattagcgcagttactaatataggagataaaattattataggaagaaattgtcacaaggcagtttataattgtgccaagttacgtaatttagacgtggaatatgtatatccgtcttatatagctaagtacggaataaatggtggttataataaaggcgaaatagaaaatattttgaaaaaaaatagagatgtaaaggcggttgttcttacatcccctacttatgatggaatcgtatctgacatagaggaaattgcaagagtagttcataaatataatacagtcttaattgtggatgaagcccacggagcccattttggaataagtgagaaacttccggttccggcttataagttgggagctgatttagttatcgaaagcacacataagactttgccggcaatgacacagacagctttgcttcatttaaagagcgatagaattgatgcaggaaaagtgcaggaaatgttgtctatatatgaaacaagtagtccttcatatgtgctaatgtgtagcattgacaagtgtattagggagattcagaaaaatggtcaacaaagatatgatgaattgttgaatgttattaacaaaatcagaaaaaatgttaataagtgtaagtatatttcaataccatgtgaagaattaaaaaatcaaaataatgtttttgatgtggatgtaacgaagcttattattaatgtaaataatagtggaataacaggtaagcagttaggggatattctcagatacaagtataatattgaagttgaaatggattcactaaagtatgtgcttgggataactactatatgcgatgattataaagaacttgaaagattggcagaggctttaaaggagatagataagtccttggaagaaaagcagaatgaaaatatttctgtagagttactgaaaaataaaagaatgtattcaatatacgaaacagatttgaaagaaaaaaatacagttaatctgtttgattcaaaagattgcatttcaggtgaatttgtttttctttatccgccgggaatcccattggttgttcctggtgaagtgattacagaagaattattggaacagattaaagtgtatttggaagcaaatatgaatattagcggtttaaaagataattcaaataaaactattgaagttgtaaaataaattggaggaataatgtcaaagatattttttgtgttaggaaaaagctgcagcggaaaagatactattttccaaagcttaaaagaaaataaacaattaaatttaaaaactgttgtaggttatacaacaagacctatgagggttaatgaaaaagatggggtggaatatttttttgttgaccaaaataagcttgaagaattgaaaaaggctaaaaaggttattgagtgcagagattataatactgtgtatggaatatggagttattttacagttgatgacggccagatagatttaaataacggagattatttgtatattggtactttggaatcatatgagcagatgattgatttttatggtgaagatgttgtggtgccgttatatatacaggttgaaacaggtgaaagattggcaagggctgttaacagggaaagaaatcaaagtgagccaaagtacaaggagttatgcagaagatttctggctgatgaggaagatttctcagaagaaaaaatagagaaagccggtataaagaaaaggtttgagaacaataacttaaatcagtgtataaaagaaatagagcaggaaatattaaaaaaaataaagtaagaataaaataaacaagtattatattatttttaaggttatgttttatctggaaatggttaaagcatagccttttttatttatttatgttattataaattagtatgaccatagattaatttttaggagtgaagatggaatcagaaagaattctgggacaaaatcatatattaagacattttgaaaatgctattagaatgggaaaaatttctcacgcctacattataaatggagaagaaggatcgggaaagatgaatcttgcaattcattttgccaaggctttgcagtgtgagagaaacaattctaataaagccattaatgaagatggtgaaagaattaccgttccgggaacagcatgcgggcagtgcaagtcatgtaagcagacggattcaaaaaaccagccggatattaagtatattacctacgaaaaatcaggtattggtgttgatgaaataagagagcagataaatgatgatattgacattaagccatatagcagtccatataagatatatattgttccggaaagtgaaaagatgacagtgcaggcacagaatgcattgctaaaaacaattgaagaaccacctgaatatgccattataatcttgttaactacaaatgcggatacttttcttcaaactattttatcgcgttgtgtcatgttaaatatcagacctgtaaaggaagatataataaagaatcaattaacatcacagtatggtgtaggggattatgaagcaagagttgcagcaacattttctaatggaaatccgggcaaggcaattaaacttgcaacatctgaagaatttaaagaattaaaacagtatgttgttggaatgtttatgtctttggaaaaaggcggaatggatattattggggaggcaattaagaaaacaggaacttttaaaaagcagattgatgaatactttagcttaatgcgaatttggtttagggatatacttgtctataaagcaactaaggaagaagaccagattatttttcaggatgagtatatgacaatagaaaaaatgagtcagacatattcatttgatgatattaatgacattcttaaggcaatagatttggcagaaagcagaattaagtcaaatgttaattttgattccactatagaaatattattactttccattaaggaaaaaacttcaggaaaataaacatagattggataacagttagaacaaggagacagaaatgattaaagttataggcgttagatttagacaggcaggaaaaatatacaattttagtcccgcagattttcaggtaaaggtaggagaccatgttatagttgaaactgcaaggggaattgagtatggttcagttgttcagggaataagagaagtagcggatgataaggtgattatgccattaaagtccgttatacgtattgcaactgaagaagatgataaaaaagcaattgaaaataatgagaaagaaaagaaagcatttaaaatctgcaaagaaaaaattgcaaaacatggtttggaaatgaaacttattgaaacagaatatacttttgataataataaagttttattttattttacggcagatggacgaattgactttagagaacttgtaaaggatttggcttcagtatttaagacaagaattgaacttagacaggttggcgttagagatgaaacaaaaatgcttggaggaataggcatttgtggcagaccactttgctgtaatacttatttgtcagaatttattcctgtgtcaattaagatggcaaaggaacagagtctttcacttaatccaacaaagatttcaggtatttgtggaagattaatgtgttgtcttaagaatgagcaggaagcatacgaggaattaaattctaatttacctgacattggagaaaaagttaagacttttgatggctttaagggtgaagttgtaagcgtaaatgttcttagacagaaggttaaaatagtagttgaagttgatgacgaaagagaaattaaagaatatgccattgacgagttaaagtttaagccaaagaagaagaagtttaatcttgcttcagaggaattaaaggcattaaagggacttgaagataaggaagagtccaaattagattaattgtaaaggcagagattataattggaagtaaagttgcaatcaggtgaacaaattgtagatttggagagaaatggatataaaataattcagaacagagagagattctgttttggaatggatgccgttctgttaacaggttttgctaaggtaggaaaaggtgaaagagctttagatcttggaacaggtactggaattattccaatattacttgaagcaaaaacagaaggacaggactttgaagcattggaaattcagcctgaaagtgctgaaatggcaagaagaagcgttatgcttaacaaccttcaggaaagaattaaaatagttgacggagatataaaagaagcttctaagatttttggagcagcaagttttaatgttgtaacaactaatccaccatatatgactgaaaatcatggtgtaaaaaatcccgatgagcctaaggcaattgcaaggcatgaaattaaatgcaatcttgaagatgtaataagagagtcagctaagttactaaagcctaagggaagattttatatggttcacagacctagaaggttggctgaaattattagtcttatgaaggaatatagaattgagcctaaaagacttagaatgatacatccttttgcggacagagatgcaaacatgcttctaatagaaggggtaagaggcggaaagtcaatgatggttgtggaaccaccgctaatagtatatgaagaacctggagtgtatacaaaggaaatacacaaaatatatggattttagtattttttagaatagaggtagagatggcaggaaaattatatttatgcgccacaccaataggaaatcttgaagatattacatatagagttgtaagaactttaaatgaagtagatttgattggggcagaagatacaagaaacagcataaaattgcttaatcattttgatataaaaacaccaatgacaagctatcatgagtttaacaaatatgataaggcaaaacagttggttgaaatgatgaaggaaggcaaaaacattgccattataactgatgcgggaacgccgggtatatctgatccgggggaagaagttgtgagacagtgctttgaagcaggcatacaggtaacatcattgccaggtcctgcggcatgtattacagcgcttacaatgtcaggtcagaaaacaagaagattttgttttgaagcttttttaccaaaagataaaaaagaaaaagtagcagttcttgaagaattaaaaaatgaaacaagaacaattataatatatgaggcacctcacaggctagcaagaaccttaaaagaattaagggaaacacttggaaacagacaacttacattatgtagagagttaaccaagaaatatgaggaagctgacaaaacaacaatagaccaggcaatagagaaatacaatgaaaaagaacctagaggagagtatgttcttgtgatagagggaaaatctcaggaagaaatacaggaagaaaacaaacaaaaatgggaatcaatgacaatagaagaacatatggaatattatataagtcaggggaacgacaaaaagtcagctatgaaacttgttgcaaaagacagaggagtttccaaaagagacatatataaccaattaataaagtagaagtaagaagcgcatcacttggtgtgcttcttttttatattgtatactaggaaatagtgggactgaaaacaataggcagatttttgaaattttgcgagcatagtgtaagccaaaaatcaactgtctgagccgtaggcgagttttgattttgggacttacgataaacggcggagcaaaataagaaaatcaacgtgttttcagaccactatttcctgttatacaacaaagaagcacatcagatgatgcgcttccttgttcattattggcttttgtaaaaaagcctctgaatccaattgtttaagtttttattatttatataaattctctattgaataactgtccttttgtaatacagattgaacctataggctctttagcaagtgtagtcgctaagagctgcagcgattgcatcgccctggtactgtgaatgaatgttaagctgtaaaggcttagaaaggtcaagtgcaaaaatacccattattgattttgcatcaatagcgaaacggcctgaaactaagtcaaaatcattctcaaacttgtttaaatcctttacgaaggactttactttttcaattgaattcaagttaactgttactgttttcataataaatacctcctaaaacagaaatgtgattacttgaatgggatttgtttaatccttcattcggcttacatattatatcctgtttggaaattagtcaagagaaaaatgcgttaaatatttaacaaagtttaagaggcttttttacaaaaaactagttaattatatgagaataatagacgaaaaagttaaaatgtatgaataataacgttacaaataacggataaaaaatatcaaaactgtaaatatttcatataaaaatgactaaaagtaataggacaaaataataaagaataatatataaaaataataaataagagtagaaaaatgttaaattatatatggttttttatgattgtcataggtgtaatttatggttttataactggaaatatagaaaaagtaggaagcggggcaattgaatctgcaacggaagctgtaaaattatgtattactatggtgggtataatgagtatgtggatgggctttatggaagttgcaagaacatccggcttaattagaaaagcggaaaagggattagatccggttgtaagttggctttttcccaatattccaaagaatcatcccgcactggcaagtataacaacaaatattattgcaaatattttaggcctgggctgggcagcaactccggcaggtttgaaagcaatggaagaattgtcagcaaagcctgtggaacaaaagggtggtaatttgccggcctatgtggcaacagatgaaatgtgtacttttttggttgtaaatatttcgtctctacagttaattccggttaatattattgcgtatcgaagccagtatggaagtgccaatcctgcagcaattgttggaccggcaattattgccacaacaataagtacattggtgggtgtgatatggtgcaagattaagtgcaaaggaagaataaggaataattaatataatatttgaaattatcatatgtaaagggtatactaaaaatcaagttgaataaattttgatagaaaatatggagaaattaatggacggaagaagtaatgtaggaattaaaaaggcagaaaaagtactttgtatggttttggcaatgttaatggcaattgtaataaccataaatgtttcagcaggagaaagcataagcaaagctaagatagatgaatatctgtatacaattgcgtacagtcagcaggaacaggttaaggagccgatatatggctcaatagatggagagtggaatattataggtcttgccagatatggagcagttacaaaagattatatttctaaatacaaagaaaatcttttaaaagaagtaaaggcaaaagatggtgttttgtccacaagaaaatatacggaatattcaagagttgttatagcgttgacttcaatagacgaaaatccaacaaattttggtgggtataatttgttaaagccattggctgagtttgacaatgtaaacaagcagggaattaacggctcaatatatgctttaattgccattcacagcagtaattacaaaattccaaagcctgacaaaaattatacaggggaagttactacagtaaagaaattaatagagtatatcattaaaaatcaaaacagtgacggtggttggagcatggcggacaagtctgagtgcgacattacagccatggcagtgcaggcgttgtctttttattatacaggcagtgataaaagtgtaaaaaaatcagttgataaggcattaaagtttttaagcaggcaacaaaacaatgatggaggatattcagctgaaggcattagcaactgcgaaagcacagcccaggttttgatggcaatatcagctcttaacattaatatagaagattcgcgttttgtaaagaatggaaatacagtacttaacgggcttttagattattatagtaatggaaagttttcacatactaaaaacggtggttacaatcatatggcaactgagcagggtttttgtgctttgacagcatattatagaagtttgactataatgaatggattttatgatatggcagacggaatttcatatcaaaaagtatccaaaaaagttcttgaaaaaaagaagactgccgcttccaaaactaaaacaactaaaaccgtaaagaaaacaacaaaaaagagtaccaaaaaaaatacctcaaaaagcactgtaagcgataaggataaagaagaaactacttcagtaaaaaataataaaaaaagcagcagttcaaataaagagtctaacaagaacacaaaaactaaatcaacaaaaaacagtaaatcaaaaacaaacaaaaaagtaaaaaaatcaaataaaaaagtaaaaaaatcaaataaaaaagaagaatcagaaacaacagttaaaaattcaaagaataatacaagtgatgatgcaaaagtcggagaaaaagaagctaagattaatgatgtaaatggaaagaagaatcaatctaacagaaccgagatagtaataggcgttattgcagcagttgttatggttattgcaattattgtttatataataggaaaaaggaaagcagaaaatgaaaaataaaattaccgtaaaattattagttttaattataagcatatgtattttgctatgtggttgtggaaacagcaaggatgatacaacaggcaaaaaaagtgcgggaaagtgtaccatatctgtagattgttcgactatatgggacaatgaagatatgcttgataagtccataaaggattatgtgccaaaggatggtgtaattttaaaagagagaactgtgtcctattatgacggagaaacagtttatgatgttttgaagagagaattaaaaaaagacaatattttaatggaggcatcatttacgggcgatagcgtgtatgtagaaggcataaataatatttatgaattttcatgtggtgagcagtcaggatggatgtatgaggtaaacggagtttatccgggaaaaagctgtagcaagtatgatgttgaagatggcgatataattaagtggaattatacatgcaaattaggaaaggatttggaaggtgaatgatgaattttcaagatttcatcctttagtcaatatagtattttatatttgtgtactgggtataacaatgtttcaaatgcagattggattaataattatttcctttattgtagcgttgatatactacatttttttaaaaaaagaatggaatctaaaatttttttgtggggtaatagtggtatttttgacttctgcagttataaaccctctattttctcatagaggaagcactcttttgttctatttatttacgggaaatccggttacattagagtcaatagtatatggggttgcaacagcaggaataatatgtgcaatgattatgtggtttgggagctttaacataatcataacaacagataaaatattggcagttcttgggaaaacaatgcctgtaatagcaactttgttgactatgattttaaggtttattcctaagatgacagagcatggaaaagatactttggaagccaatcaggcattaaatggagttaaaaggcaggatgaaggcaaaacaataaaagcaaaaataaaaaatcttaaagacaagtttaaggaagaagcaaagattttttcaattataacaacatggtctttggaaaactcagtggatacggcagattcaatgagggcaagaggatacggaacaggaaaaaggacaagctacaacaattataggtttacggtaagagatggaattattttattgtggagcatagtgctgacgatagcaacaattgtggcattgcataatgaaataataataacttattattatccgacaataaggattaagaatgatgtaatggcatatgtaatttttggactattatgtttaacacctgttttgataaatatttgggagacattaagatggaacagattaaaatcaaagatttaacttttttttataataagcaggaaaaaccggcaatagaaaatctctcttttaatatagaaaagggagattttgttgtgctgtgcggaaaatcaggctgcggaaaaagtactcttttaagatgtttaaaacctataattaagccttatgggaaaactttaggtgacattatttttgaaaatgagaaattggaaaaattaagtgaaagacaacaggctgagaaaataggcttcgttatgcaaaatcccgaacatcagatagtaacggacaaagtttggcacgaattggcttttggtttggagagccttgggtattccacagacgaaatacagttaagagtaacggaaatggctgaatattttggaataacggatttgtattataattcggtaaatcagctttcaggaggtcagaaacagttacttaatctggcagcaactatggtaatgggaccggaaatattgattttggacgaacctacggcacagcttgatcctattgcagcagagaactttttaggaacattaaaaaagataaatgatgaacttggaataactgtaattttgtcagaacacaggcttgacaatgttttggcttatggaaataaagttattgtaatggatagtggaaagatacaatattgcggagagccatataaaatattggaacataatatagatgaagatgtgctaaagcttatgcctatggcaacaaggatttattatgagtcaggaatggaaggagcagatgaaaagactccaatatccatttcagacggaagaagatggcttgaaagattggttaaaaacggaagcaaaaatgttgaaaatatagaaaaagatttagataaagaaataaatgaaaataccaaaagaaatataagtgaagatataaataagaaagtaatagttaaaaatgattatgcaattaagtgcaaaaatgtttggttcagatatgaaaaagccagtcctgatattataaaggaattaaattttgaaataaaaaaaggtgaaatttttgctattcttggcggaaatggaacaggaaaaactacaactatgggcataataagcggaattagaaaagcctatagaggaaagattaaaattaacggaacagtgtcagctttgccacagaatgtgcagactttgtttaaagaagaaactgtggaagatgaactaattggggttagcagcaacttaatcgaaaaaatggaattaatcaatgtgcttaaacagcatccatacgatataagtggagggcaacagcaaaaagttgctttggcaaaggttttggcaaaaaatcctgatattctgttactggatgagcctacaaaggcaattgacggaatatataaggaaagccttggcaggttaatgatggatttgaaaaatcggggcaagacaattgttatggtaagtcatgatttggatttttgtggacaatatgccgacagatgtggattgtttgcccagggaaaccttattggtgttaataacgttagaaaattttttacaaaaaacaaattttataccacatctgttaacaaaatggcaggaagaagtatagaaaatgcagtcaataaggaggatgtagtatgctttttaaaggcagagaatattatttagcggcaattcttattattgtaatttccatatttctttttatgtggtcttttgagaaaagaaaacctaaaacaagagaagttgttgtgttggcggtaatgactggtattgcaacattgggcagagtaatgttttttatgttgcctcagtttaaaccatgcgtggcaataataattattacgggaattatgttgggaaaacaatcaggttttttatgtggtgctttaacggcttttgtgtcagattttttcttcggtcagggaccatggacgccatggcaaatgttcgccttcggaattatcggattcatttctgcaatagtttttcaaaaaagaaagtacttagcctacaacaaagtagtactttgcgtatatggatttataatgacttttgttgtgtatgggctaatacttgatacggcaacagtttttatgtacacggataggcctaaaattagcagttttatgtcaacctatgtcatgggaataccttttaatatagtacatggaatcgcaacagttgtttttcttctacttcttgcaaaaccgctctttaataagcttagcagaatgaaagagaaatatggtatgtataataaaaaagacaacttaaattagtaaagttaaataggcgttaaaaaataaaaaaataagttgaatttggtcgggtatggtgctattatgaatcaggtttgaaaaaatatttttataataaaaaaacgagtctgacagttaaaagtcagactgtcggtgtgttgtaccgacataatttaaggagcaaaaaacaatggaagagtacggatatttgtggcaattagcacttattctaatgagtactaaatttctaggcttacttactaaaagatacaaaatgccacaggtagtaggtgccttacttgcaggacttttacttggacctgcagtattaggaaatttgttatcaggtgtagttattggaggacatcatttagaaaatttggctttacaccagacagattttattgaacatttgtctgaaattggtgttatcgttcttatgttttgtgccggtcttgaaacagacattaacgaacttaaaaaatgtggaaaagcatcatttattattgcagtgttaggtgttattgtaccacttataggtggtggagcatttacatattgtttcttagaagaaggttggattgaggcaagccctgatagttcattatttattcaggcagtgtttgtaggtgtagttttaactgcaacatcagttagtatcacagttgagacattgcaggaaatgggaaaactgaaaacagcatcaggaaatgccattcttggagcagccattattgatgatattttaggtattatcgttcttacaattgtaacaagtcttggtggtggaaaggctacagcaggtgattcagcaccattatggttagtattattaaagatagcattgttctttgtatttgttgctatttttggatatattgtttataagttcttcaaatggtggagacagagagacggaaaaggaatgcacagacacgcaattatggcatttgttatttgtttattaatgtcatttgcagcagagtatttctttggtgtagcagatattacaggtgcattcttcgcaggtgtaattatttcaatgacacaggaagaccagtttattgcatctaagtttgatgtaattggttatatgttcttaagccctattttctttgcaagcattggtcttaaggtagacggtgatgcagttatgtctatgggatggacagttgcaatatttgcagtattgttgacagttattgctgttgtaacaaagattatcggttgtggacttggtgcaaaggtttgtggttataagaattatcaatgtataagaattggtgtgggtatgatttcaagaggtgaagttgccttaatcgttgcaaacaagggtattgaagccggacttatgagttcagcagttgttgcaccggttattattgttgttattgttacaacaattgtaacacctatcgtattgaaacctgtatttatgagtggaaataagacagtatctgatgttcctacaacaagtaagttagtagaaaattacgagcagagagaagaaatcggaaaaacaaatagataattaatatgagataataggaatctccatgtcgaaatgatgtggggattctttttgatttaggataagtaataggtatcttttttatatcataaaatagagtaataaatattaaagaggttgctatgtcgataatagtaacagtatcttcaatgattattcctgcaataatgctgtttattgtgggttatggcatgataaaaaagaaaaatgtttatgatgatttcgtaaatggtgcaaaggacggttttacaacggtaataaaagttatgccaacgctaataggacttatggtggcagtgggagttttgagagaatcaggttttatgacggatttaggcaatgcgcttggaaagtttactgatcccataggctttccagggcagttaatgccggtaaccatagtaaaaatattctcatcctcagcggcaaccggaatggttcttgatatatttaaggagtatggacctgattcgtacataggaaacgtagtatctttaatgatgagtagtactgaaactgtattttatactatgtcagtatattttatggcggcaaaagtgacgaaaacaagatggactttatcaggagcattaatttcaacgttaacaggtacagttgcaagtgtaatattagcaggattgttgtagtaaaagaaaaccccgaaatcagacataactttgatttcgggatttttgtaaaataaaaaatttattaaacattattaaaaaatagattacgcggattgtgaactgtttccaactcttacaatgttacccttatcagtaaaaggtgtatatccatttttcaacggttttaaagtctgtaggtccgattgttagaaagcttttatgaaaatcttttaaattaaagtcagttccaagttgtttttgaactttttcttttaacgctgttatttcaaggtagcctacgtaatattgcaaatagtttgcaggttcattgattacagtctgataaatatttttgcaaatatcatctccggtaatattataatttttcaaaaaatcttttgtttccttaaaagaccagccttcataattaatgccaatatcgcaaagagagtaaagtgccagggaataggaggcactacaacttagggctttggccagtctttggtcggaatattcgtaggaataggacagaaattcaacatacgtagcccaaccttccgtataaccaccatagcttaaaatgtgtctgacgggaaggggattggtttggagaaaaaaagccgattggtacatatgtcccggaatcccctcatgggcaagggtggtgtaaatatcctgtttgctgaaagcatcactttcattaatataaataacattattgtttgtatcatcaattgcaggagtcagaaaaaaagcagggcttaaataatcctgaagattttcgtctacgtatttaacagtgtaattaatgtttccaatattaggaaaatcatcagtgtatttggaattaagttcttttaaaatagcttggggacttttggaattatgttcttcgctgtaaaacatattttcaagttcaggattaacggtaagtatggaatacatagttcgcatatccttcattaatcgtgactgaatatctgattttaattcaagaacagatttgctacttccggtataattttttacaagaaattcataatagcttttgccgttttttaaatgacagatgcccttgttatttttgcaataaccacttttctgcaagtctttaagagaggatataattttgttatatcccggaaaaacacttgaattaatcaggtctaaatttttatttatataattatttttttcactgtcggaaagaaatttacagtttgaaattttgctcacaaatgaagtatggaaaagattgtccttaggtttgttttctgctagaaatgaaatacattgtttaataacaagattacaggtttcagatcctaaaaagctgttgttctttgcttttaatatttgaaattcacatatttggttaaaaaaatcatttatttgtgagacaagagtaagataattatcaatatcttttttgtcagcaaaggtgtactcggcaaagagaattggaagctgtgcctgaatgcctgtggtgggacttagaaccggattgcaaaggcaaagatctccgtaatcaagttgattcctaaaataatccaataaaacatcataggtaagctgttctttttgggacagttttttatagttaaaatcctttaagaggttaatttgattaatgtagtattgctggctttttaccatggaatcataagaaaagtcccctaaggtaacaggagaatttcgaatgtttttatccggtgtttttatataaaaatgcatacttaacgaatcagaaagaagttgttcatcaaaaagattttgggcataggtttgaaaatcattgttagcgttgccagagtgtttttgatctaaatttgaataattattattttttaaataataggaaaataaaagaatacaggtaagtgttaaaagagcaactatgtatcttaaatattttttctttaagaaaaaagaagtgtttgactgattttttaagttcataagctgtaatccggaaaatattactttatactagaatattatttttgatgtgaatgtatgatatttaaaaaaaatatggtacaattaagaagaatgtacgaaaaaataagtacaatagaataataacaaattaaaaaatacaaaagaaaaaaagactgaaagggtaaggtattgaaatggatgtattaatgttaaaaccggtatttaaagatgctatttggggcggaaaattactttctgactttggatacaaagaagcaggtgacagcgcaggcgaatgctggggaattagtgctcacaaaaatggtgattgtacagtaatgaatggggagtttgcaggaaagactctttcatggtgctgggaaaatcatagagaattatttggaaatatggaaggggatgttttccctttattaataaagattttaggagctgaggatgatcttagcatacaggttcatccaaacaatgaatatgcagcagaacatgaaaacggtgctcttggaaagacagagtgctggtacattcttgactgtaaagagaatgctactattgttattggtcataatgctaaggataaagaagaattggcagatatgattcataatgcaagatggaatgaattaatcagagaagttccaattaagaaaggtgactttttccagattaatccgggatgtcttcacgcaattaaaggtggaacacttttaattgaaacacagcagagtagtgatgtaacatacagagtttacgattatgacagacttcagaatggcaagccaagagagcttcatgttcagcagagtattgattgtatagtagctcctcatgaagattttaaacaggaaagagtagttaaaaactttgacggaatgacaagtacacgtttagttaaatgtccatattatacactggagaaatgggatgtagacggaaagtacacatttaaaatggacaagaactttatgaatgtaagtgttattgaaggtaacggaaaagttaatggaagagaaataagcaagggagatcattttattatcccatcacttatggaagaatgtacattagagggaaatatgtcagtgatggtatcttttgcttaaaaagatagagaggtacgccggatgttatcagaaagaggacttcagattgtagacaagttaatagagaataatcgaacaccaataacatcaaaaactcttgcaatatatcttggtgtttctgagcgaagtgtaaaaacgtatattaaggaagtatcagatttttgtaatgaacatagtatgattttggagagaaagccgggaattggttttgtagctgattttactgaccagcagattaagcaggtagccgacttaaagagagataagaagattgttatgtctaaagagcagagaatgagctatattatgtacattctcttaagtggttgggatacttacacattgtcacttttttcagaagaattaaatgtaagtaagaaagttattagtgacgatattaattctatttttaaggaattcagtaagtacaatattcgaattaacagagttgcaggtcacggcgtgtttattaccggtgatgaattttcaatcaggcgtgcgatgaagagttattgcaagtacagtattggaaataaagttatacgggaagcgtctgataacagaataagcgtggaagaccaggaactttggattaataatttcggtcaggataattttgaaaaatctgttgaggtaattcattatattgaagaaacatatggaattgcgtatacggattattcatttaaaatgttggctgactatctttgcatacagttattcagggtaagaatgggaaatgttattacggaagacataattccggaagatgagaacattaaatattctgacattgtggacaaggttgttgagaagtttagcagtttaagcaagtgtaatcttaacgaatatgagaagcagtatatagagattctcctggcgtcagcgtcagttcagagcaatactgatttgtacaaggccataagcagtgacaaagaagaaaaagctaaaaaaatatcaggtgaaatgcttgagtatctgtcagagattttaaatattgatctgacatctaatgaattgttaaaaataagtatggagaattttgttccgtcatcacttataagaactaggtacggaattgaggcaacaaacccattccttggcgacataagagagatgtattcaggaatatttgcaacatgttttactttaacaaggttttatgaaaaatattgtggagcaataccaacagatcatgaaatatcgtttcttgcattgtttgtaggtggggcacttcacagaaatgtaaaaacaatcagggctgttattcttggaacaagcggaattgctgcatcaacaattgttgccagaaagattgaaagcagaatagaagaaataaagattgtggcgattttgtcatcagagttaatggacactattgaccagtatgattgtgacatagttttatctacgatttcttcttttgaatatgaagacaaggtggttcatatatcaccgattataagtgcagaggatgagaaaaacataaagagtaagtgctttgaaatagtttcacatccggagcttcagaaacagggattttattcgttaatagatattgacaatattctctttgttaatgaaaaattagataaagaaaaaatcttaaaggaagcatgcaaaaggctttacaacggaggttatgttaacaaagatttctttgatgacgtaatgaaaagagagaagattgaacctacggcaataggtaacggcgtggcaataccacacggaactcctgataatgttataaagcctaaggtatttgttgtacgactggcacatcctattaattgggggggaaagatggttgatacaatatttatattggcaattaatttcgacaatattgaaagcactaaggcattcttccatgattttgcaagacttttgggatctggtgataagattgctagaataagaaaatcatcggatattagagaaatggagaaaattctaaaggaagaattgtcttgggagtaaaaatataaaaacgatacaacctttataactaaaaggcttgatggaaattgcactaagtttagtgcaattttctttttttggagaaattgaaaaaaaaattataacaatatagaatgaaaacacaggaaagtggtaatttaagaaaaggaggcacggttttggctgaaaaacttattgataacgattttgttatgtttgatttagaggcagacagtgcagaagaagttattagaaagatggcagatgtcatggaacagaatgacagactgattgataaggaaacatatgtggcagatgtgttacagagagaaaaagtgtcaggaacagcagtaggattttcagttgcaacccctcatgcaaagtcagaaggcgtaaagtacgaaaccttggcttttgcacatcttaagaaaccaattgtttgggatggaaaggaagaagtcagcattatatttatgattggcgttccatcacctgcagcaggaaacagacatttggagattttggcatcactgtttagaaaagttatttatgatgactttcgtgagaaacttgttgaggctaagaaacctgaagaaatagtttcactgcttgaagcattatagaaaatattaaaaattttattatttaggaggattaaaaaatgttatcaaagactttaacaatcgaaaattcagaaggattacacatgagaccagcaggtgttgtagcaaaggaaatgggaaaattcgcatgtgacgtaacaatcgtattcggcgataagagaatcaacgctaagagtcttatcaacattatttcagcttgtattaagacaggtgcagaaattacatttgaatgtgacggagaagatgaagaagcagcaatggctaaggttgaagaacttgcaagccagaactttggtgaataatttataagaggtaagagatatgtacaagggtatagcaggatctgaaggaattggtatcggaacagtagttttaattgaagaacatgaaattaatattgaaactaagagagttgaagaaaccggagctgaaattgaaagattacagaatgccattgaaaagtttgtggcagatacaaatgttatggctgaaaaaatggatattactgtaggaaagaaggatgctgatattttaagaggtcatatccagatgcttcaggatccaatgattgaagaacagatttcagctttgattattagtgaaaagattacagcagaaatggctgtagagcaggtattagagcagacagcagaaatgttttcacagattcctgatgaattacttcagcagagagcaacagactttagagatattaagacaagaatgcttaagattttattgggaatagaagacgttgatatttcacaggtacccgcaggaacagttatcgtagcaagagatttaacaccttctatgacagcaggaattaatccggagaacatcgaaggtattcttacggaagtaggtggaagaacatctcattcagctattcttgcaagagcaatggaagtacctgcagtattaagtattgaaaatatttgcagtattgctaagaatggagataaggtagttcttgacggaacaagtggagaagctattttaaatcctgatgatgaaacagttgaaaagttcaaaaagatgtacagcgattatcagaatgaaaaggcattgttaaaagaatatgcaggcaagccttcacagactaaggatggcgtaaaagttgaattagtatgtaatattggaaaacctgcagatgctaacaaggctgttgaatgtgatggcgaaggtattggacttttcagaacagaatttttatttatggatagagattctatgcctacagaagaagaacagtttgaagcatataaggaagtagcagaaaagatgaaagggaaaccggttatcatcagaacacttgatatcggtggtgacaaggatgttccatatcttggattggaacatgaagacaacccattccttggttttagagctattcgttattgcttacagagaaaagatatttatgatattcagttaaaagctttacttagagccagtgcatttggaaagattaagattatggttccacttgtaacaggtgttgatgaattaagacaggttaaggctatgattaaagacattatggctgaattagataaggaaggcgtagcttacaataagaacattgaagttggtgtaatgatggaaacacctgcagcctgcatgatggcagatgctcttgcaaaagaagcagctttctttagtatcggtacaaacgatcttacaggatacacaatggcagtagatagaggaaatgcaaaggttgcatatctttattcaacatataatccggcagtacttagagcaattaagcgtattatcgaatgcggtaagaaagagggaattatggtaggtatgtgtggagaagcagcagcagattcaaaacttatcccacttcttttagcatttggtttagatgaatttagtgtaagtgctacaagtgtattaaagacaagaaagactatttccgattgcacaatggatgaatgtaaggcattagctgataaagttatggaatgtgtaacagaggaagaagttttagaaattttaggatagtcataaatcaataaataaatgcatatttttggtttgttaacggagagcaattataacagggagaaatctttggtgtaattgctcttttcctttctatttttttcgaaaaataagtagttttatacaaaaagttatgtaacccttgacaaacccctgaaaatattaagaatataaagtatagattaatgtacgaagaagggggaagttatgcttgcaagagaacgacaaaatacaattgttgaaatagtaaacagagaaggttcagtaagagtaaaaaatttaagtaaaaaatttggagtaacagaggatagtattagaaaagacttagctcatttagaaaaagacggaatgttaaagaagacttatggtggggcagtaagagtcaggacaaacagtcatgacagatatgtttcacagagaataggtaagaacgtagaagagaagcgtgtaatagcaaaaagggcttatgaaataattcaggacggcgatgttatttttcttgatatttcaaccataaatattgaactggtaaaacttatagttgaggcagacagaccggttacagttgttacaaatatgattgatgccatacttataatgctttatgagaaggataccaagactaaacttattttccttggtggaaaattaaacaggggcagagatggtttcgttggaacaataactaacagaaatatctctaactatcagtttgataaggcatttatgggagtggttggaatagatgtcaacagaaacagagtctatacatatgatacggaagatgcattaacaaagaagtctgtaatggaagtaagtaatgagtgttatatgcttatggaaagagagaaactttctaaggatggcaattacaaatatgccggcatagacgagtttaccggattaattatggaagaaagtgtagaaggcaccataatgtcaaaattaaagtcctataatattgatatatattgttaacagataagctatgtaattaaaattaaaattgacaaatttgccattaaataatagaattgttagcagatggtaaacatagtgaagggaagagtatccttaaagatagcatacagagagtctgaaatggtgagaacaggcagtgaagagtaaggtgaagatggcccccgaatggcatcggtgagtgctacataagccggtgacgggaacacccgttatagtgtaaataaggttggaatgtgttttgtaattattaagaatactattccgataaagtaaagtggtaccacgaagtttacgctctcgtctttatgatgagggcgtttattgtatttgaaattcttattttggaaaggaaattggcaggaaaatgagtaaaacgtattatttaacaacagccattgcttacacatcaggaaagcctcatattggtaatacttatgaagcaattttggctgacagtattgtaagatttaaaagacagcagggatatgatgtaagattccagacaggaactgacgaacacggtcagaaaatagaattaaaggctgcggaagcaggaattacaccaaaggaatttgtagataatgtttccggtgttattaaggaaatctgggatttaatgaatacatcatatgataaattcattagaacaactgatcctgaccatgaaaaacaggttcagaagatttttaagaaactatatgatcagggagatatttataagggacattatgaaggaatgtactgtacaccttgtgaatctttctttacagaatcacagttagtagatggaaagtgtcctgactgtggcagagaagtaacacctgcaaaggaagaagcatatttctttagaatgagtaaatatgcagacagattaattgaacatattaacacacatcctgaattcattcagcctgaatcaagaaagaatgaaatgatgaacaacttccttcttccgggattacaggatttatgtgtatcaagaacatcatttaaatggggaatccctgtagactttgatccaaagcacgttgtttacgtatggattgatgcattatcaaactacattacaggtttgggatatgatgttgatggaaataatgacccattatatgacaaatattggccggctgatcttcaccttattggaaaggatattttaagattccatactatttattggccaattatgcttatggctttagatgttccacttccaaagcagattttcggacatccttggttattacagggtgacggaaaaatgagtaagtcaaagggtaacgttatttatgcggatgacttggcaaatctttttggcgttgatgccgtaagatatttcgtgcttcatgaaatgccatttgaaaatgatggaactattacttgggaattaatggttgagagaatgaattcagaccttgctaatacattaggaaatcttgttaacagaacaatttcaatgtcaaataagtattttgacggagttgtaagcaacaagggagttgacgaagaagttgacgatgactttaagaaggttattttggatacacctgttaaggtagctgaaaagatggacaagttaagagttgcagatgcaattacagaaatcttcacattatttaagagatgtaataagtacattgatgaaacaatgccttgggcacttgctaaggaagaagataagcaggacagacttgccacagtactttataacttaattgaaggtattacaattggcgcaagcctattagagccatttatgcctgaaacatcaaagaagattctggctcagattaatgcacagccaagagcttttgaagacatgacagaatttggcaaatacccatcagacaacaaagtaacagaaaaaccggaaatcttatttgcaagaatggatattaaggatgttatggaaaaggtagaagaaattaaggcagctcagaaggctgaaacagcagaggaaaaatatcctgaagttgaaaagaaacctgaaattacaatagatgattttgataaggttcagattcaggtaggtgaagtaattaagtgtgaacctgttccaaaggctaagaagcttttagtttcacagattaaaattggagcagaaacaagacagattgtttcaggtattgcaaaatactataaacctgaagaaatggtaggaaagaaagttgccgttattactaacttaaaaccatgtaagctttgcggagtggaatcacagggaatgattttggcagcaggagatgacgaaggaaacctttcagttgtaacagttgataaagatattgttagtggaagcgaaatctgctaaatcggaggaaatatgatttttgatacacatgcacattatgacgatgaagcattcgatgatgacagagaaaagttattagagagaatgcaaaacagaggtgttgaatatatcgtaaacgtaggcgcaagtatgtcatcatgtaaaagcacaataggtcttgtgagacgttttccatatgtttatggagcattaggcgttcatccggatgaagtttcagaacttacggaagaagattatcagtggcttaagaaaagcatttacaagcctaaaatcgttgcagtaggcgaaataggcttggattatcattggaatgataataaagagcagcagatagaatggtttgaaaagcaaatggatattgcaagagaggctgaattaccgattattattcacagccgtgatgcggcaaatgacacatatgaagttatgaaggctaacaaggctgatgaaatcggtggagtaattcattgtttttcttacacaaaggaaatggcagaaaaattccttgatatgggattttatctgggaatcggtggtgtagtaacatttaaaaattctaagaaattaagggaagttgtagaatatatgccaatggatagaatggtaatagaaacagactgtccttatttaacaccggaaccaaacagaggaaagagaaatgattcctttaatctgccttacgttgtaaacaaaatagcagagattaagaacattagccctgcagaagttattgatattacttcaaataatgcaaaagacctttatggaataggcagaaagaggtttgattaatggcatatcttggaacaccaagtgcaacaaaggaaataataaataaatatagctttgctttccaaaaaaaattcggacagaactttttaattgactcaaatgtattggaaagcattatcagaggagctgaaataacaaaagatgatttcgttttggaaatcggtccgggaataggaacgatgacacagtatctttgtgaagctgcaagacaggttgtggctgtggaaattgataagatgttaattcctattttggaagatacattgtcagaatatgataatgtggaagttataaatcaggacgtgctaaaggttgacataaaatctttagcagaggaaaagaataatggtaaaccaattaaggttgttgccaatttgccatattacataacaacacctattattatgggattgtttgagagtggtgtgccaattgacagcattacaataatggttcaaaaagaagtggcggacagaatgcagacaggaccgggttcaaaggattatggggcattgtcattggcagttcagtactatgccactgcaaaggttattcttaatgtgtcagcaacatgttttatgccaagaccaaatgttgattcagcggtaataaagctaacaagacataaagaacctacagttaatgtggtagatgaaaaattaatgtttaaaatcataagagcttcttttaatcagagaagaaaaacattagttaacggattgaaaaattcaccggagcttagtttttctaaggaacagatagttaaggccatagaaaaaataggaaaaccggaaactataagaggtgaggcattgactttggaagagtttgcagaacttgcaaatgcctttacagaattaaaataagattttaaattaaatcataatagaataaaaatcatattagaaacgcagaataatttagatggaagtttaaatggttctgcgttctttttatgcttagaaattcatatattgtagaaaaaaaattggaatgtttatgtttaaaaataaaataaaaatcaatatggtaatgtccgtggttcttctcgtgtcaatgacaataatagcctgcaacatggataaggtagctacagttgaaatggaaaaagaaaataaaaatgttaaaactaaaaatggcaaagttgttgtaattgatccgggacatgggggagatgatccgggaaaagtaggcgttaatggcacaaaggaaaaagacgtaaaccttgccatttctaaatgccttaaggaagttttggaagataacggatttgatgtggtaatgacaagaaataaagatgagattctaaatgagggaggaaagttttccaaggttggagatttaaacaaaagatgtagcataataaataatacatatcaaataaacagtaatagcattatgataagcattcatcaaaacagctttacaaacccaaatgtaaaaggtgcccaaagctttttctatgaaaaatcagaaaaaagtaaaaagcttggattaatacttcaaaatcatttgaacaaaaaaattaatacagaaaaagaaaaggcggcaaagccgaacaacagttattatatgcttataaattctaaatgtccgggaacaataatagagtgtggttttttaagcaacccaagtgaggaggaaagtctttcaaaggaggaatatcagaagaaactggcggaaataatatgtaccggaattaaagaatattttggagaaaaataggtaatggtaatagttaatatgatttgtaaaatggggtaatatatgataaaatggacaagataaaaattagatgaggcgtaagatgaaaactataataaaaaaaaccagtgtagacaatatagatatggatacaattaaccaggcaggagagattataagacagggtggtctggttgcatttcctacagaaactgtttacggactgggagcagatgcattaaatgaagaagcggcagcaaagatttatgctgcaaagggacgcccatcagacaatccgttaattgcccacatagcagatttggaaatgcttaaaccgttggttgaagagataccaccggtggctgagaaattaatggatgccttttggccgggacctatgacacttatatttaataagagtaatctggtaccaaagggtacaacaggaggcttggacacagttgcagtaagatatcctaatcaccctattgcacaggcacttattaaggcggctggtgttagtattgcggcaccaagtgctaacctttcaggaaaaccaagcccgactttaggggaacatgtaatagatgacatggacggtcgtattgatatgattattgatggcggaatggtaggaatgggacttgaatcaactatcattgacgtaacagttaatccaccaatgattttaagaccaggatttattacatacgaaatggtaaaagagattgttcccgatgcaacagaggacagaactatttttacaaaaccaactaaggagtttaaaccaaaagctccgggaatgaaatacagacattatgcaccatcggcagattatacgatttataagggcgatgaagtaaaggtggcagaaaaaatcatcgaacttgcaaatgaaaaagcagatgaaggtaaaattacaggaattataacagcagaccagcatttgcatatgtaccagggaagactaaacaagagtattaaggtagtatcactgggagatttagaaaagccggaaacagttgccaatcatttgttcaaggcattaagagactttgacaaagtggatacagaatttgtttttggtgaagcattttcagagaagaatgtgggacaggcaatcatgaacaggcttactaaggcagcaggttataacatcattgatgtatagcagttcggaggtaaaatgctagaattttcaaaaattttgtttgttacggatatggatacgtcaccgggaccacttgcagcaactttgctaaaacattatttgccattagaacaggtaaatattgattcaagaggacttgcagttctttttccggagccgatgaatcctaaaactgtagcaatcgcagcctcaaagggattggacattaaccgtacttcaatacaacttgaaccggaagattttggacaagacgtattggtactggtattagatgagtcaaggaagcaggcagtatatgatgactatgcagaggcagttaatgtttatacattaacagagtatattaacgaagcaggaagcatagttaatccagatggtggtgagttagcggattatgccaagatgtatgaaacattagacaacataattcagaaattagctaacaagcttaaggaaagtaaatacaaaaactaaaaaaatacataaaaaagcacggaggaaaacaaatgggaaagacatttataatggatcatccattgatccagcacaagattggaattattagaagaaaagaaacaggaacaaaagatttcagacagttaatcagcgaaattgcaatgcttatcacatatgaagcaacaagaaacttagaattagctgaccaggaaatcgaaacaccgatatgcaagacaacagttaaagaattaggcggaaagaagttagcaatcgtacctatccttagagcaggtcttggtatggtagacggaatgcttgcaatgattccatcagcaaaagtaggacacattggactttacagagatcctgttacagcattgcctcacgagtactactgtaaattacctgaagattgtgacaagagaaacgtattcgtagtagatccaatgcttgcaacaggtggttctgcaattgcagcaattcagatgcttaaagaaaaaggtgtaaagaacattacattaatgtgcattattgcagcacctgaaggcgtaaaagcaatggaagaagcacatcctgacgtaaatatgtacattggtgcattagatgaaaaattaaatgaacacaagtacatcgttccgggacttggagatgcaggagatagaatcttcggtacaaaataataaaattaacgtgtttgcaatagaaatttttccgtggcaaataaatagtagcatttcacttttgacaagaaattaaaaggagaaagaaatggctagtagtaagagaaaggattacatttcatgggatgagtattttatgggagttgcatctttggcggcactaaggtcaaaggatccaaatactcaggtgggagcatgcatagtaagtgacgataacaaaattttgtcaatgggctataatgggcttccggtaggttgtagcgatgatgaatttccatggaatagagaaagcgacgatccatatgacaataaatatttttacacaactcacagcgaattaaatgccattttgaattatagaggtggcagtcttgaaggagcaaagatttatgtaactttgtttccttgtaatgagtgcgccaaggccattattcagtgtggcattaagaaggttatatatggcgatgataaatatggagatacatcttctgtaaaggcgtcaaagagaatgatggcagcagcaggtgtggaatatattccatatgagaaatcaggcaaagagattaaaataaagctttagtaaacaattctatttttgctgaatatactagactgataaggtttttgattagtttaggatagtatatggattataaatatatacctttttatgttcagggaaatgcagttacgggaatgtattacggacaatggggaatggcggaagatagagacattgaatatgttaaagagatgtaccctctaacttttatgaccattcaggagatggtagagaaggaatgtgattatcaggagtttgcaggaagtatgatgtttgacgaatatcctgacaaaatgggaatcctaaggattgttaatcgtatttttgaaaatattaaaaaagaagaggcatcctgtaatggcaaggaatgcattaagtatcctgatgaccagtggcttaaggatataataatggtattgctgcttaatgaaatatatagaagaagacaaaaaagaaaaagatattattaagattaaaagtgatttagtcttaacaaaaaaagcactaagaataaagggttgaacgaaacctaaatcttagtgctttttcaattaacaagaaaatcctttggaaaatttattaattgatatttccaatgtgtgaaaatatcattaaagggcataaagtattattgcaaaaaaatgtaatatacttcctgcaagaataaacaaatggaaaatagaatgcatccatttatgactgcttccaagtccgtaaagaatagagcctacagtgtaggcaatgcctccggcaacaaggaagataacgccatctgtgcccataacttcaatggtaggttttatgaaaataataataacccatcccatagcaaggtagcaaatcatagaaaatacgctgtatttctttaagtcaattgcagtaagggtacaggcaataactgcacaaccccaaactaagccaaataaagaccatgccaaaacgggatatttggctctcattggaacaagaagtattggtgtgtaacttcctgcaataagaaagtaaatggtgcagtggtcaagaacctgcataaccttcttacccattcccggtcttaaaccatgataaacactggacattgtatataaaacaattaaagttaccccataaatgcaactggaaacaacgccgattccactgtgatgcctggccgaaacaataatgcaaagcacaagagctgcaatacctagagccgcaccaacgatatgggaaaccatgttaaaaatttcttcacctttagaataattaggaagctgtctgtcagctaatttaattctttgcttcataaaaagttcttcctttcttaaaaaatgactactcaacgctatgtagtattcaatactacgtcaaagtatatatatattatacgcaaatgtcaataaaaaaaatgcataaaaaatgaaggctgtataagtgactattgaaaatggcaaattttccataggaataataagtgatgtcataggacaatattaataaatatataacatattcaaaatatgttttttgtctaaaatatattaagaaatgaataaaaactttttgtgtaaaaagcgtatagactttgacaaaatcagtatatataatatgcgtatattcaaaaacaaaacacagaacaacaaaaacaaagaaaattcgacatatgtgcagagaactggtttacccaataggaagaaacagaggcgagagcgttgcacatgttaaagatgtaataagtaaggggggaaaactattgaagaagggtggtttagctgtttttgataatgacgagaattatacagaatcttttttggagtatatagaagagaagaaaggaatgccttttgagattcaggtatttacgaaacaggagtcattattacaatatttggaaagtcgggagccacagttattattggtagcttcagatgtaatgtgccatgagatagagaaggttaacagggagaagattgtaatattggcgggtgaggaggtttcgtcttctttttctgaatacagaaccatctataaatatcagtcaatggaaaatgttatccaccaggttatagattactacattgatataacaaaggacagtatttttgtacctgttacaaagaacaagtcggaaataatcggtatatattcgcctgtaggcaatgtgggaaagactgcagttgcgtgggctatggcacagactttaggagcagattatacagttctttacataaatatgcaggaatattcaggaatggataaaatgtttgatacggattttggagcgaatctgtcagatttaatgtatttctacaagcaatccccggaatcaatggccgttaaacttaaggcagtaacctattcggcggaggggtttgattacataccgccgttggtatattcctgtgatttaagaaatattgatacagggcagtggcttcaatttatacagaatattgcagaattaacagaatatgacaagattattattgagttcggtcaggtacttaacaatccaatgattttgcttgaaagttgcaatagaatatttgtgccggtttctaatgactggatgaatcagtgcaagaagaaggaatgggaagagtatcttttaagaacaggttatgaggaaatattagacagaacggaaatgctgcaagtgccacaaataaggcaatggagcagcttggatgaatatagagaatgttatttgtggggagaacccggagattacataagacaggtattggggggattataatgagcaagtcagaaatagaacagttaagaggtttggtaattgaaagagttgatatgtcaagagaacctgatgacagtgaattgcacgaaatcatagacagtgtaattgaaaaaaatcaggattacagatatatgtcaattaagaaaagacaaataatacataaaaaaatatattcctcaattagagggttaggcataatagaggagctgctggaagaacctgatattacagaaataatgataaatggacctaacaatatttttgttgaaaaaaagggacgtataaacaaaatagatgaaaggtttgaatctgaaaacaggttaaatgatattatccaacagattgtggcaaagaccaaccgtagggtaaatgagtcaaatcccattgtggatacacgacttgaagacggttccagggttaatgtaatattgccaccaattgctcttgaaggacctatagttacaatacgtaaattttcaaaaagaggaattacaatcgacgatatgattagttgggggacaatttcaaaagaggctgccgattttttaaaaatggcagttatggcaggctataatatttttgtaagtggggggacaggatccggtaaaacaacatttctaaatgtgctatctaattttattcctaaagacgaaagaatagtcacaattgaagattcagcagaactaaaacttgattctgttgataatattgtccgaatggaaacaagacaggcaaacagtcagggggagaatgttatttccataagggatttaattaaagcatcattacgagtccgtccggatagaataatcgttggcgaggtaagaggtggggagactttggacatgcttcaggcaatgaatacaggacatgatggttctatgtcaacaggacatggaaattctccatcagatatgatgacaagattggaaacaatggttcttatgggaattgatatgccattggcggctataagagcacagattgcaacagcaatagatatagttattcatttaggaagaatgagagacaaaacaagaaaagtattggaaattaatgaagtgattgggataagaaatggtcagatagaactaaacaggttgtatgtttttaaggaagaacctgaatctgacaaaaataaagttgtgggacaattggaaagaactgaaaatccactaattaataagcaaaagttggaaagaaagggtttggcttaagataattgtccgataagggggaatatgaattattgtatgtcaggaaagaagaagactgtaagtctgataataataggtctgttggtgattttaatgggaagaatgttttatggaagttttaaggcgggaattataattctgccattagtaataccaatatacaggcaatattcaacgaaatacaaagacagggcaaaggcagaatttgaacatcagtataaagaaatgcttgtagccttaaaggatggaattgttacaggatattccgtcgagaacggattaaaagaaagctatcgtgagatggttaatatttatggatatgatggattaatatgttcagagttaagattaatgacttcaagacttaaacttaatacaccaatagagatggtttttaaagattttgcggagagaactgatttagaaagtgctcatatgttttataatactttttccatagcacaaaaatcaggcggtaatatgaacaatgtaataaaaagagttatagaaaatattgttcttaaggaatcagtaaaggaagaaattaatgttgccataaacgacaagaaactggagcagcgtattatgactgtgattccgttgtttttaatcggatatataagtatggcttcccccggttttctggatataatgtacaaatccataatgggaaatatagttatgacggtatgtctaatagtttatctgcttgcatacttgtggagcgaaaaaatagtaaaggtaagcatataagattgcagaaattgtgcaagtataggataagatcgtttgacacggtaaacacagtgattaagagagggggatgacattgaaggtttatacagttctacttggtttgattttaatattttatatattaacagtcaggtatagacgaaccttaagaaaaaagtttaagaaagataaacttagcccattgtacggaatgtcgatgtttattgcagacagaatacctaaaggacttttacataaaaatacatatacggaatctttaataaaaaagttaaatgtacaggaaaacataaaaaaagagatttatatgtatcgtgtaaataaaatagcttcgtgccttggaatgtttattttgtttctgatatttggaatggcaataagtttttctgaaaataaggacaataaagggcaaataaaaacattggatagagacgggcaaagtattagcagttatagtttttttgcaaagaatggagataatgttgaaaaaattaatgttgaagtagaccaaagacaactgtcaaaagatgaatccttaaaactaatggagaatagtagaaataagttagttaagcttgttttggacaagaacaaaagtgctaaccatattgataagccattgaatttgattcgtgaaataccagacaccgatatttcggtaacatgggatataagtgatggtagggttttgaattatgatggacagattatgtctgatgtttcacaggaaggtacaattgttaaccttacggcaaatatggaattaaatgaactaacattaagctacacatttgccgtaaatgtatttccaagaaattacaagggagatattcaggaagcagttcaggaatacataaacagtcaggatagtgagcaaaagaagatttttttgccggaaaatatatcaggcgaaaagattagttattataaaagtgcatcaaaaataggaaaatatattccaatagtagcatttattatgtgtgtggcagtatttttcttgaaggatagggatttaaagagtgaagtgaaaaaacgaaatatacaacttcaatctgattaccctgaaatcctaagcaaaattctattatatagcaatgcaggactttcaataaagagctcaattgaaagaattgtaaggcaatatgaggatgagaaaaagaaaaatccaaaagagtatcattatgcttatgaagagttgaaaatggcaacggtaaaaatgaaaagcggagtgtcagaaattaatgcaataaatcaatatggagaaagatgtgggttgcacaattatataaagttggcaaatattattgaacaaaacatacgcagaggaacaggagagttatcttttgcccttgaaaatgagttaaatagggcactggttgagagaaagaatactgctttaaaaagaggcagcgaaatatcaactaaactgttaggaccaatgacggttatgttaatagtggcactggttattctaatggtaccggcattaatgtcaataaatatgtgaagaagtgaaaacacagtataaaaacaatatgaaaattgaatataaaaataaaatagaaatgtgaaaataaacaattataacaagtgaaaacagggggtatagaaatgttggaaattttgaagacaaaagcaagaattattttaggaaaacagaaggcaatgggcgttatagaggtagtactgataattctggtacttgtaggacttgccttagtatttaaatcacagataagtggaatagctgacggagtttatacaacaataaaaactcagattaaaaagttttaaaatgggggaaaaacaaactttttaaggtaataaattttacgaaaagttttatggaaagtaaaaaatgaaagtaaaaggaagtataaccatctatttaagcatgatacttataagtgtgatgttgcttgttaatgtaattggtgaaagtgcaagaatcagtgcagtacaggcgcagataaaaagctatacatatatgagtgcagagtcagcactggcaggatatggaagacaggtttatgaagattatggaatattacttgtatgggaaaagcagactgttgagtcggtaataaaaaagaacatacaggataatataaatatggcagatttaaatgagccgggactaaattttttaggaacaaatctggttaatttagaagtaaccggaaaggagtatttaacgaaaaaaggaggacaatatttctcaaatcaaattaaatcgtatataaaatatgcaggtgtaatggaaactgttgaaagacttgtgaaagaatgtgaaacatacgaaaactgtaatgaccaaaataaaaataagtgtgacttgaatattgtagtcgatgtcaataagggggaattgcaggaacttgtagaaaatattaatagcatagttacaggtttaaaagaaacaaaagatttaagtaataagtatgattcggttagtcagaaaatagaaaaacttcaatctgattttaataaaaaagagggaaagaaagttttgaaagagtatagagagctgatggcatcaatcgaaataaaatcgaaggatgtggacagtgctatttccaagatagaagtgtacgaaagaaaaaaagaacagtttttgaaaaagaatagctatacatctgatgcaaaagattacatggatactaatttggaaattttggaaaaagtaagggatgagataaagaaggacaaagagcttaacgttttgaaaattaaaaaattagattcaggcaatataagcaaagttaaaaagtcaataagcaacatggggaaagttataagcgaaatggagtctttaattacactggaaagtacagaagaagatagagataattattcaatatttgaaaatttaaaagattttattgatagtggagtattgtcacaggttttagaaaacccggaaaatgtatcaaaaaatactttatccggttctaatctgccatcaactttgaaaggcaaaaaaaataacagtttgtcaaaagaaataaaaaataaatgtgttaatgcactatatgcaggattaaagtttggcaactacaataatccgggaaaaaatacagtattaaagtatgagctggaatatattatttcaggaaatgacagtgataaggagaatcttgcatctgtagtggagaaaattgttttggcaaaaacagggataaatatggcgtatctcattacagataaagaaaaaatggaacaggtgtcagcaatagcagcatctgtggcaattgtaacaggcttgcctttcttagagccggtggcaaagggagtgctaattagtgcatggtcaatggcggaggcagttaatgacatgaaaatattgttatcaggaggtaaggttaccttgacaaaatcaaaggggggctggagaacttccataggcaacataacaaatggtgacaaaaaagaagattcaaaaggactaagttacaaagagtattgccaaatactaattgcagtacagaatacaggggacagtctatatagaataatggatttgatacagataaatatacagaaaaggtataacagtgaattcttaatgagtaaaagtctgacgggttttaagctgaaagctacttatgaaactgcaccattgtttactgctattccaatagtagtaaataatctgacagaggaaaataatgcctataaatatagtatggcttattatgattcttattaggagataagtattatgacaaaacaactaactgatgaaaataatttaaaacaaattagaaaaatagaaatactaaagaaaagaaaaagaagattggaaaaggcattaattcgtaaatataaggaacaaaaattagctaattccaaattagaaaatcaaagattaaaaagtcagaacagcttaaactttaatgcaagaacaggagtagcgtgtagaaaaactgcaaatattataaagaatgaaactatgattacaagaatagaaaaaagattatcgaatttaaaaggatagaaaataaaaggatgtactgattcgttagtcaggaatttaagcctatggagagtatgtatgtgttgtaaagtattcagtgaagtaggaatgaaacatagatgtggttaaagatatgtttcaataacggaaaggatgttttcgtagctaatatgttatggtcaaataaaaaataagatgatgtttctctccaagtacaaaagctattttttaataacccctttttataaaaagcacccaataagacgaaaagaaaacatcctttcataaaaataaaagaaggagaacggaaaaatgtggagacaaaagatacaaagataaaaaatataattaaatgtacagcaaaagctgcaattactatagaggcaacaatttcattaactttatttatgtttgttgtggtatttctagccggtttcataactgctgttgacaagcaactttcaacacagattaaaatgaaccgtttggcagaaaatatggcaaagcaaatgttttacataaaacaagtagatgaaattaccgattatagcgagaaattaaaagaatataaggacaaatttaaagagaatataagtgaaatgaaagacactttgcctgaaagtaatctaataaaagatgattatattgacatggtttatacatatgattataagttacctgttttaagtaaaaccataaccataactcaaagagcaaaggttaaagactggacaggcacggatatgactaaagattatgaactggtttacataactaagtatgggaatgtatatcacagcacaaaagaatgtagtcatttaatactttatattacgggaacagagtatggtaaggttggtgaagcgagaaatgaacagggagaaaaatacacaccttgtgagttttgtggaaataagaagataagtgataccacaacagtatttattacagcagatggaaacagatatcacacaaatctccaatgtagtggaataacaagaaatattatagaaattgatattaaggaagtggataacagaaaaccatgcagcagttgtaatgggggataaaatgtattggatttggataatgatttttttgtgcatatgcacatttacagatataaagaaaagaaatgtttgtggttggttatgtattttaaatatagcggccgcaattatgttgcatacaatatttagggatataagtggaaaatcccttattgagggagcaattattggggggatatttctaataatcagtgtggttacaagggagaaaataggatacggtgacagtcttgtttttcttgcaataggtttgattataggcggagaaaaatgctttgttataattctttggagttttctgctatgtagtatcttctcactagtggcaataattctaaagaaaacaacatttaaaagtaccgttgcctttatgccctttgtgttggcaggagcattagtaacatttatatctacacaataaagggggaaaaatgaaaggcaataaactaaagggagaaataactattgaaacagcaattgtgtttcctattgtaatgctaatggtgttactgttaatttatttttctatgtttttacacgacattgtaaaaatgaaaagctatgcctatggagccggatgcacatatgcagaaatgggatttaaagattttgaaagtaatgttgaaaagaagtttcagtcaataccattgtttattacaaaagtaaatgcaaagtgcggtgaaagcacaaatcagtataagataacactacaatatacatccataagcaatattaagtggatggaagaattcattaataagggaaataacagttatgaaataaatgtggaaaaaagaatgagtcgaaaaattttcggaattacttcggcaattagagataacatacaaaagggggacagtgataattaatggaagttgttaacaaaaaagatggaaacaaaaattttatgataataaaagggattgaaattgatgaaaatgattataaatttaaaatgcttaaaaataataatatagaaaatgtaatcccaataggtcttagagttatagatggagaaaaacaattgtactataacgtaacagagtacattactgtaaaagctatgttttcgcggaaaaagatgtcaggaaaagacttatataatttaataaatgacattaaaaagttatctaaaagcacaaaagaatacctgatggatttaaatgattttttgtttgacattaattatgtgtacataaataagaaatcgggagaatatggtttttgttattgcccaaatgagtatgaagatgtgcagcagaatatgagaaatatttttgacagcatattagaatgtattgaccataacaataagcctgcagttcttatggcttatggaatacagcagattacaattagcgacagttatactgtgcaggatttgtataattgtgctgttgaaaactacaaagaagcaaaggaaagtacatataaaaaggaaggccggaaagagtttgttaaaggagttgagaatattgttattaatacggaaaagaatgtagtaacaaaaccatatgaggaaaaaaagaaaagtctttttgaaaaaataatggaaagattaaaagggaaaaataaatatgaggatgaagatgaactggaagcagaactgaaaaatccttcggaaattaataaaaaagagagtggtttaaaagaaatttcaggacaggctacagaagaaccactgtacaattactcagattatcaaatgacaacaataggcgaggagacagataattacagagacaactatgagaaaggttatgatgataattatgacggagattatgaagaagctacaatgttattaacatcatcaggagtaataaatagaataaccctaaaagaaattagtaatcaggggagcatggaaatcgaaccaaagggttatccgtgcatattaggaaagagtaagttaagcagcgattatatagtggacagtcctgtagtaagcagggttcatttaagactatcggaagaaatgtctaactattatgttgaggatcttaattctactaacggaacttacgttaacgggcaaaaacttgaacctcataaacctaaagaaattaatgtgggagatcaaataactgtagcagatatagactttatagtggagtgataaagtccgtagtggtataatagtcttagtgtaaattacggaatagtccgtgtaatcaagtgcttaaggaggctgttatggacgaaaaaattcaaaagttaaaagagattattgatggaagtgacaatattgtattttttggcggagcaggagtttccacagaaagtagtgttccggattttagaagtgtggacggattatacaatcaggaatatgattatccaccggaaacaattttaagccatactttttataaaaggaatccggaagagttttatagattttatcataataaaatgttatttcctgatgcaaaaccgaatgcagcccacaaagctttggcaaaattagaaaagaaaggaaaactaaaggctgtagtcacgcagaatattgatggcttgcatcaggcagcaggaagtgaaactgtttatgagcttcatggctctgttcatagaaactactgtgaatcctgtggcaagttttacggacttaaagatataatggcgcagaaaggagtacctaagtgtagctgtggaggaattattaagcctgatgtggttttgtatgaagaaggacttgatcagaaaacaataagaaagtctatcgaagccatttccaatgcagatgtacttataatagggggaacttctcttgcggtttatccggcagcagggcttatagattattatagaggaaacaagcttgttcttataaacaagagttccacgccaaaggattcaagagcagacctgattataaatgatgcgattggtaaggttttaggtcagattgtagaataataattttctttttgtataaatagaagtgtcggtgtttaatcggcacttttattgtcacaaagtttatgcatacagggtagagtttttgacaaattaatacagcaccactatggtattatctctttcgtaaaacaaagaaaggagaggtatcatgatagaagtggtatatagtggagaggagcatgaagagcaggatgaggtcaggattccgaaaaatattcatcaaataggaaataacagttcaaacaagaaaatatacatagaagattatgtaatgacatatttaaagaagagcccttcaggtgaggataatgttaaatatggggtattactgggagatgtaaaaagggcaaaaggaaatgtttatatttttgtaaaaggaatggtggaagttcgtgatgtaatagaaaacagtattatttttaatgatgatatctggtccggaatttacaaagatataaagcagttttttgaacagttaaatattgtgggctggtatgtttcggttccttacagggtaagtgaggatatgaatggaataagaaagattcatcttgataactttgccggaaatgacaaagtatgttttttgaaagacagggcagaaaacgaagaaggcttttatagctatgaacagtcaggtcttgaaaggcagcagggctactatatctattatgagaaaaatgaaaaaatgaaaaaatatgttaaaaacttaaaaaacagtgcaacaaacagtggaatagctaacaatgaaataaaaaatattagcgtggatgacaagataggaggcgaggataaaaaagataagaaatcatccaagaagaaattggagaacatagaattaaaagcggaggaggcaaacggtaaaactataaaaatttcaaatgaagaaagtaaacaggataataatttaaacaaaaaagatttaaaaaataaagaaaagagtcaatggtttaaaaatagcaaaattaataataatacagtggaagaaactggagagcccatacgacagggaaggattgcatatggtgtaagtggtcttttaattgtagctttattattatcaacggttgtaatgcttaataattatggagaattaaaaaatattaaaagtactttggcaggaattagtagagaaagagaggctcaggctgttaataaaattttaagtgcatacaccgaaacaacaaaacagagtgccacaaccgtagcaggattggaaagcaagaaagcaatagctgccaatggtagcaatgttactcagaaaaaaaatgacaacagagaggttgtttcaaaacagacaacgggaactaatcagaataataacagcagtaacaatagtattaccaatactacaaatgatagtaataatgctaacagtaataagccttcaggtagtgaaacggaaaataataaaacaaaaagtatttccagtgcttattcaggacaataccatacagttaaaccgggacagacattgtatgatattagtatgagttattatggaacaagtgaaatggtagatgaaataaaagacagaaataacattgacgatgattacacaatcaaggaaggacaaaaaatattattgccttaataaaaaaatggtgtcattattcagcagatattgtataatctttaatagatttaacaaaggaagtgaaatcgtggcaaataaatacattagaaaattcagaagactgaaaaaagaaggtcaaaattctacatatatgaaaaataccaaaaaggtgtttgaaaaaagggctgtaaagcttggaataatagtagctgtgattttgattattgttggagcgttgttcttttacaaaaaatatcacaaatacaccacctacaaggtaattgaatccactaatattaaaggtggagcgagcagtaaatatattccttttggtgactatgttattaagtacagctatgatggaatagcctatattaaggacaaagaaactgtttgggaagaagcatatgaaatgaagcaacctattattgatgtatgtgacgactatgtggcgatagcggataagaataccaatgatattttcatatacaatgataaaggtcgtcagggacaggtttccgtaagctatcctattgtgaaattagaggtggcaaagcagggggttgttgctgcgttgcttgaggacaaaacatctaactatatagaagtgtacgataaagagggaaaacagttggtatctcacaagtctattattgatgaaaatggatatccgattaatttctcaatgtcagatgatggggaaagaatggcagtttcgtaccttaccgtgaaaaatggctcttttgaaaacaagatacagttttatgatttttctaattcagggaaaaacatagaaaaccgaatggtaaaagagtttagcggatatggtgagacgattgttcctacaatcagttatgtttcaaacagtcaggtagtggcaataggcgaagatatagtttctatatataaggtgggtaacaaggatattaccaaaaaggatataaaaataaaagaagaaatacagaaagtattttataatgacaaatatgtaggattggtatttaaaaatgccagcacggacagaccttacagaattgaagtatacaattcaagtggatcccagatattaaattctacagtggatatggattttgaaaatgttacatttgccggagataatattttaatgtatagtgatatgcgatgcgaaatattatcaataaaaggtgtgaaaaaatttcagactaattttaagggacagatttatggattaatgccatatgacgattccaaaacgtatttgttaatgactaactcaaaaatacagaagattcgattgaaataacggaggaatgaaatgggcaatataatgctgacaggggtaacggtttttgttgtggtaatgattgctataggaatgaagagaggacttgtaaagacggcattttctttcggctcgatttttatagcacttatactggtgaatattttaacacctgttgcaaaagaggtaataaaaaatacaccggtttatgactcaataaaccaaaatatacaaagctatgtaagtgaacatatagcaacatctacagaaaatatgacggaaacaggaatcaataatcaagagaaaatcattaatgaacttccattacctaatggactaaaagaatcattaacgaaaaataataatcaaagcagttatgattcattggcagtaaatacatttaaggaatatgttgtggcatatttaacagatgttgttttaaacgcagtggtatatattttgctatttatggttatatctatattaatgaaaacattagtggaagtgttaaacatagtaacaaaacttccggttattcatacatttaacatggcaggtggagcattaatcggtttcgcacaggcaatattaatcatatggttattgtgtatggtagttacgatcttcagctcaacatcctggggacagacagtttgcaaggcaatagcagacaacggagtgttaagcatgatttatgataacaacttaatacaaaatatagtaaatagcttgttttagataacaataataattaaagagttttatggctaaaataaggtgcttaaacttttttaaaaaaagtttaaaaaagttattgacaaaacaaaaggtatttgatacattataaaagctgtttagcaagtggattaaacaatccacttatggctccatggtcaagcggttaagacaccgccctttcacggcggtaacaggggttcaaatccccttgga

SEQ ID NO: 12670 - DNA, 47189 bp, Unknown
  gut microbiota DNA sequence
cttccgtcagcttatctgaaaagatgagtcttgacgataaaaagaacccttgctataatgtaagagttctatatatatggcgagttagccaagtggtaaggcatcggtctgcaacaccgctatcaccagttcaaatctggtactcgcctctcaaaaatctcaggaatgttcctgagattttttttcgcatatttttcccatgcagccgaaaaattctcaaagcaaacaataggcagagattcgcaattttgcgagcatagcgtaaagcaaaaatcaactgtttgagccgtaggcgagttttgatttttgttttacaataggtggaggagcaaaataagaactctcaacgtgtttgcatgaaaatttttcggctgcatggggataaaatgtaaaaacaaaaaaatatcgaaaaatttgtaataaatatgtaatatatcttcaggaatatgttataatcaaagtaacgtgcgaaaaaatggagttcggaaggagatatttaatgaacaagaagttaataagtattgtgacaattatggcaatgcttgtggttatgattatacctgcatgggcaggcggtggtgataacacaggcgacgacaattttggcgcagctatttatgtgaagaaagatggcgtagaaggtgcatacacattaggaacagctaaggaatttaagctagagttctgggcatcaggcattgttggaaagcaggttgtaagaactgtttcagtaacaggcgacaatcaggtatcatctattgaatacaaagatggcggagagtggtacgacattagcggatttaataaggaaatgactattgcaggtaatgatttggacagaactattagagtcgtttttgataaggaaggtagatatacaatttcttatggattggtgaatacagaaggtcaggatgttgtaaaggatcagttaaatattgaaatagcagacggacagattaaaattgttaaagaaactgagacaactacaaccgcaacagcagaaacaactacacctgcagtagtagagacaacaacatcagcagcggcagaaacaactacaacaacagcaaagacaactacagttgcaccaacaccaactacaactgcaaaggtaacaacaactcaaaaacctacagcacagaaagttagcgttggaaatacaaggataacaaagatcgtaaaaactaagaagagtgccaaggtaatttataaaaagattgcaaaagtatcaggatatcagcttcagttgtctagatcttcaaaattcaagaaggcagtaacaaagacaactaagaaagttagctataaatttaaaaagttaaaggcaaataaaaaatattacgtaagagttagaggttatgtaaagacttcaaacggtacaacttacggaaaatggagaaagaagaactttaaaacagcaaaataatgtgacagataaagaatgaaagaaggaaaagatgaaatttttaaagagaacaattggaataataatcgtgatggcggctattatttcaggacttcaattaaaaagtgaattggcttatggagcaacacctacgatttctaaaagtacagtaacattagaaaagggtaaaagaaaaaaaataaaagttaaaaatgtttcagcgagaacgaaagttaaatggagaacatctaataaatttgcagttactgtttcaaaaaaaggtagaattagagctgtaaattatggagctgcaacaatttctgcaacttgtaaatcaagaacaatgacttgtaaggttacagttcctgatacttctaagaatgttgtcataacgaaatatcctacaacattaacagaaggccagacaggtatggttgtagcaaagtcagttaataaaatttcatatatgtcttcaaatgactcaatagcaaaagtcaataaagaaggtactgttgaggcgttaaatccgggtaaagcggaaataacagcgaaatcctcacagggatatagcaaatgtacaataaatgttttgtcaagtgatgtaaataacagattgtatgattctaacggaatcagtattaagaaagttaacgctgacggaacaaaggttaacggttttgtaagccaggcaaaaggtcagaattttactgttatggtagatggaatagacgaaagtaatgttaagtcatgcaagtggagtgttgggaatagcgatgttgtttcaaaactttcagcagtaagtggaagcaagcttaaagctactttgaaagcagtaaatgaaggcaaagttaacattacagcaaaggttacatacaaaaacaaaaatgttgttacatatacaaatacaatttatgtttcaaaccctgaaacggaagttcagaagttaattgtttatggaacagcattaggcaatgaaagacagcagtatatttcttttaaaggtttaggagaacatagtactattacttggactaattcaaacaaaaaatgtgccactttaacaacttatgaaaagaaagcggcagttttaggcacaaaaccgggaacgggtacaattacagcaaatgtagatggaaaagtattcaacataaggtatacagttgttaatccaacagttaataatttaaaggcagttataaaaaaaggtgaaaaagtacagtttcctattttgggtgacacaggtacagttcctgaatttacaagcagaaatgaaagcgttgccacagtttcaagtgatggtgtcgttaaaggtgtaaattcaggagttacatatgttgatgtaaaaatcggaaatattcacaagtcttatagaatcgaagtatatgcaaaaggtatgtacaagattgtaaatagggctatgtacatagtcaatcattggaaatatagtcagccaaaaagaatgagaaaaggatactatgattgttcagctttggtttggaaaggctataaatcatacaagcactacaacaagaaacttggaagtggttcttatgcaaagacagcagcaagcctgtttgattatttaaaagaaaaaaatcaaatagtatattatggttttattgacatagatgatatgaaaccgggtgatttgattttttacggagattacaatgcggcagtaaaatacagcacaccgggaagaactttaaacatctatcatgtatctatgtatgcaggtgcaggcaaagtggtagaaaaaggtggacagactattaactacaataatatttcgcatatagttggaataggaagagtggtagactaatggaatataatattggaacagtagtaacattaaaaaaaggacatccttgtggaactaatgaatgggaaattataagaacgggtgcagattttaagttgaaatgtaaaggctgcggtcgtatagtaatggttccaagaaaaactttcgaaaaaagcgtaaagaagattttgcagtaaataaaaaaacgaaagctttgtttaaaaccaaaagatttcggaaaaaaattcacaaaatgaaaaaaaagtccttgaacacagggactttttttgatattatagtaattcgtgatatatattaattacgcataacgagtattcgttatgatccttgctttttcaaacgaaaaggccagagaccaaaaggaggtagaagcatgaacaaatatgaattaacagttgttgttagtgcaaaacttgatgatgaaggaagaacagctgaagtagaaaaggtaaaagcacttatcgaaaagttcggtggtacaattacaaagatcgaagaagctggtaagaagaaattagcttacgaaatccagaagatgtcagaagcattctattacttcatcgatattgacactgaaaacacagattttcctagcgagttagaaagccagcttcgtattatggaaaatgttatcagatttatgactgttgcagtagaagcatagtttgatacattagagaggtataatatgaataaagttattcttatgggtcgtttgactcgtgaccctgaagttagatattcaacatcaggagataatcagttggctattgcgagatacacattagcagtagatcgtagatttaagagagatggagatcagagcgctgactttatcagatgtgtagcatttggtagaagcggtgaatttgctgaaaaatatttccatcagggaactaagatagttgccgaaggtcgtattcagacaggcagttatcaggacaaagatggtaagacagtttacacaacagaagtagttgttgaaaaccaggaatttgcagaaagcaaagctacagcagatagcaataataactatcagccacagcagcagccggttgcatcacagccaacagcacctgcaggagacggttttatgaacattcctgacagtgtagatgattcaggtttaccatttaacttttaacagattcgaatagaatctcattaacgaaaataggaggtcaagttatgccatataataagagtgaaagaccagattctccaatgagaagaagaggcggtcgtagaagaaaaaaagtttgtgcattttgtgctaacgaaaacaaggcaatcgattataaagatgtagctacattaaagagatacgtatctgaaagaggaaaaattcttcctagaagaatcacaggaaactgtgctagacatcagagagctcttacaacagctatcaagagagctagaaatatcgcattaatgccatacacagtagaataatcgcgaagcacacaagcaacgtgtgcccagtgctacaaataaaaagaagtggaaccacttatgcttgcataagaggttccacttctttttatttgtagcggctgtcgcatgctgcgacagccgcgtgcttatagacattctcttcatcattcccccatacccaaaaagtatatgatagatgataaagagaatgtctataagaagtgcgggcatatttatggataattactgaaaagtaagtgcagacaaagatatttcccacttctaagtgtttccattcctacatctttgtcaagtcttcctggtccactgttttcattccattccttaccagcaatgcggcaactttgtctgtatcctcgtccttaacacggaataccataagagcatcgtctgtgcctcttgcaagaaaagcatacacataatctacactatagccgttggaagctataacattcatagcttttgccattgaaccgggttcatccggaagcttaactccaataacatgtgtaaggttacaaatccaatcattgtctcttaacagagtaagagtattaaaaggatcgtctacaataatacgaataattccgaaatcgcttgaatcggcaatctggaatgcacgcatatctattttgtgttcggcaagaaaattggtaaagtttgcaatattacccggtttgttttcaatgaacactgaaatctgatgaatatacatataaaaacctcctaaattttacgtttatctataacacgaactgcttttccttctgaacgtgtaattgattttggttcaaccaatttaaccttagcataaatgccaagcatactcttaagagcggtaacaatatctttctccttagactcaattgagctaactgtatcagagaacatttcaggtgtcatttcaaccaaaacttccatagtatcactattgtttacacggtcaataataagctggtagttagccggcattccctgtttaataagaacttcttcaacctgagaaggataaacattaacacctttgacaataagcatatcatctgaacgtcccattaatctgtgaatacgtgcatgagtacgtccacatttacatttttccctggtaatatatgtaatatcctttgtacgatatctgataagtggaaaagcttccttagcgaagcttgtgaatactaactcaccaatctgaccatcaggaacaggctcaaatgtgtcaggatctacgatttccggaatgaaataatcttcacaaatatgcataccattctgttcttcgcattcaaaagcaacacctggaccttctatttctgtaagtccataaatatcataggctttaataccaagtctgttctcgatgtcagctctcatatcctctgaccaggcttcagcaccaaaaattccggcttttaattttatctggtctttgataccacgttcttcaattgattcagccaaatatgatgcataactaggtgtacaacaaagaatagttgaaccaaaatcagtcataaactgaagctgtctgtcagtgttacctgatgacataggaagtgttaaagaaccaaccttctgtgaaccaccgtttaatccgaagccacctgtgaaaagaccatatccataagctacgtgaactacatcttcatctgttccaccggcagccacaagggctctggcacatccatcttcccacatatcaatatctttcttagtataaaaatctactacacgcttacctgttgtacctgaagttgagtgaatacgtacacaattcttaagaggtactgctaataagccgtatggataagcatctcttaaatcgtctttcgttaaaaaaggtaacttagaaatatcttttaaagattttatatcgtcaggtgttacacctttttccaccattttttttctgtaaaaaggtacattctcgtatactctttttaccacgtctaaaagtccctctgtttgaatctgctcaatcttttcacgagaagcagtttcaatttcttcctgaaaatattttcccattgtttcattcctttctgtcgctcaagtatagtaatataattttacaacatataacgctttaaagcaataaagtacaaaaaacaaaattaacaaaaatagacataaataaatagtaaaaatacataaaaaaaatcaaccaaaaaaatttttacaagcaaagatgtgctttttatggggcaaaaagcctaaaaaattgcacaaaaggggggacaaaaacgcccttaataaaaacgtttttcctcccataaaatctagcaattgcaaaaattatatgatatagtgatttttagtataaaacatgaaaaatgaaaaaaaatataggctatatgagaataagaggaggagaaaccaatggacaacaatttaaggggggtacctgttgaggggtttgctgacaaaagtcgcgaagcggccgtcgagggaatagtattattaaagaatgaaaacaacacactcccattaacagaacaggataaggtttcagtttttggaagaccaatgattgagtactacagaagcggaacaggttcaggaggagctgtaaacgttgaatacacaacaaatattttggacggatttgaaaacagcaaccttaactttaataagactatagttgaagactataaggaatggttaaaagaccatccatttgataacggtggcggtggatgggcatgcgagccatggttccagaaagatatggaaatcacagcagattatgcaaagaaacaggcagaatcaactaacaaggctgtatacattatcggacgtacagcaggagaagataaggacaacgccaactgggtaggaagctatcttcttacagatgaagaaaaagaaaaccttaagaacataacagaagctttcgaagatgtttgtgtagttcttaacgtttcaaatattatcgaccttaagtggattgatgaagaacagtttaagggacacatcaaatcagtaattattgtatggcagggcggtatggaaggtggaaacgcagtagctgaagcactttcaggcaaggctacaccaagcggtaaattacctgacacagtagcttatgatattgaagactatcctgctaatgacaactttggcaacgaacttacaaacctttacaaagaagacatttatgtaggatatcgttattttgaaacatttgcacctgaaaaagttcaatttgaatttggtttcggactttcatacacaacatttgagattgaaacagtatcagccgatgcagatgatgaaaaaatcacattagaagttaaggtaactaacacaggtgataagttctcaggaaaagaagttgttcaggtatactacgaagcaccacagggagctttgggacagcctgcaagacagctttgtgcatacgagaaaacagaaaatcttgcaccgggtcagagccagacattaaagattgctttcgatattaacggaattgcatcatatgatgactcaggcgttacaggcaacaagtcgtgctacgtattagaagcaggagattacaacttctacgtaggtaacagcgtaaaaaataataaacgagcttatacatataaaattgaagagcttaaagtaacagaacagctttcagaagctgcttgcccaaatgatgataatcttacattaatgaagccgggcaaaagaaaagaagatggaacatatgaaataacatatgtaccatcacagaagccaacagtagacatggctaagagaattgaagaaaatcttccaaaggatatggaaattacaggtgatgtaggaattacattacaggatgtaaaagcaggtaaaaacactattgaagagttcgttgcacagcttacagttgcagaattagcacagattgtaagaggtgaaggaatgagtaaccctagagttacaaaaggaacagcttcagcttttggtggattaagcgatacattgtttgcttacggaatccctgcagcatgttgtgctgacggtcctagtggacttagaatggaaggaaaagctacacagcttcctattggaacagcactttcagcatcatggaatcctaagcttgtaagagaactttacacaatggaaggtcaggaattatacggaaatcaggtagatacattacttggacccggagtaaacattcacagacatcctttaaacggacgtaactttgaatattattcagaagatccatacctttcaggtacaattgcagttgcttcaacaggcggtattaaagacggtggagcatggggcacaattaagcattttgcattaaacggtcaggaatcacatagatttaagattgatgcagtatgctcagaaagagcaattagacagatttatcttaaaacatttgaaatggcagtaaaagccggaacagttaaggcattaatgacagcctataatcctattaacggacattgggcagcttcaaattacgatctttgtacaacaattcttagaaatgaatggggatatgacggtatcgtcatgactgactggtgggctaagatgaacgacgttgtagaaggtggagaagaatcaaatcaggatacaagagacatggttcgctcacagaatgacttatatatggttgtaaataacaacggagcagaagttaattcaaacaatgataatactgaagagtcagttaaggagggaaagcttactgttggagaacttcagagagcagcaattaatatttgtaactttattctttcagcacctgttattgaaagagaattagttgatactgatattgcaaaacattttgattcaattccaaacgaccaggctaagtatcaggtattcaatgttggaaaagatgataaggtaatgtttaacagtggaacggaagctacattggaagttgaagaagaaggagaatatacaattattgtaaatatcgcatttgacaagtccaacttatcacagtcaacagtaaacgttaatgctaacggcacaacaatggtagtaatccagactaacggaacagatggcaactggattacacagaagctttgcaaggttaaacttgacaagggtgtatacaacttaaaacttgaagaagtactagcaggaatcaaagttaaatatattcagtttaagaagattcctaagaaaaataaataaatgtaaaaagcatacagtctattatgattggttagtcaaagcatagcatatgacaattgaaaaaggtctgctggagatattgttccagtggactttttctttactcctttagaggggtaccttaatgtttggcatataacagagaaaaaaatgatgaaattgtgcaaaatcacaagaagaataaaaacggttttatagtgaaaacgttataacaccaaataattgtataaaatgcacaaaaagaagcagacaaaatgcgcaaaaagcataaggaaaatgcataaagaacaggttgatttatgggaaatgaataaaaagtgtacaacataacccatgggtagttgaaaaaaacattttaatttggtagaattgtctaataagggataaataatcgaagggattcgacaagatcttggatgaaaggagaaaaaacatgaatatttcaaaaaggaaacaaggaatactcgcaataatatgtactattgcgatgattgtaacatcaattacggtgtacaatccaagggaggtaaaggctggccaaagcgatgcggcatcttatgattattcaactactgcgtggttaggagatggagctggaggtggtaagtataacaataaatacaagttggctccattaagaggtgttagtaatattgctaatatacagaaaccgccgtttgctacagcagacggaatttatatggccttagccactgatgacgtaaaaaaagtaacagttaatggtactgaaacatctgaatatgatatgcaaggggctggaatgttattacatttagcagctatgacagaaaaatataatgatattttgatttataattcaaagggagaagcatttgctgaattatatggactttatgcagacggaacagattcaggaacagttgaaccagtagagaaacctgcagcaccagcagacttgaaggtttcatttaacgaagaagagaaaacatgcacaatttcatttggtgaagttgaaggaattacaacatacaatttttatgttggaggggaaaaaatagggacagttccagaaaataagacatttaatatatcagatttaaatgtagaagaaggaaaggaatatatttttggagttacttcagtaaatgctaaaaatgttgaatccaacaaagcaacaacaaaagctacaacacctgtatttagcgcaccttcagcaccaactcagatttatgcaaatattaatcctgcccagacagattatactgttggtgttgttcaggcagttacaggtgccaaaggttatagattttatataaatggagaatttgctaaagaaatagctaaagatcaagttattacaatcgcagaaatggaagaaaagtatggacttaagcgcggagaagataacacatttggtatttcagcttttaatgataagggagagtcagctagaacagaaataaaagttagtgttccagctggagaaacttttgaaaatggaaaagaattaattccgaatgatagaaaaagttatagtggaaaagttggagagattgtaggtggtaatccatatgatgttcagaatgttattaaaaaaataaaatttgaacagaacaaatggtatgtggtgaaattctcagcaacttgtgatgttaataaaaagattcaggtaagagttcaggaagatattacatggcataatgaggcaggagggcattacaatgttgctcttaatgcaggagaaagtacagatgtaataatcaaattcaaggctaataagtcaactgatgagggaatgttaaacttctgtatgggatatgtggaaaatacagtttcggaagaagcaaatatgaatatttctaatattagtttgattggatacaatgatgaaccacagattgagaatatgtctgaaataaaagtagacggtaacagcgttgcatatgtaagtaatgtaactgcagcttgtattacaaattattcaaacaaaaatggttatggttattttaatgcagttgataagaaagcatattatacaggagaagataaagctattcctgtaagtgataaaggattagacttaaagagcattgcattaaatgtaacaatgacaccgggagcaagtattagattagcagctccaacaggtttaagattccagacaactgttgaatcaggaaatgatattgccgtagatgatattttagatttaaaaacaggaacagtaacaacaggtactcttattacaacacgacgtttgtacgaagcgaatgacaatacacttacaagggatagtgattataaattcctcgatattgaaaatgatggatggtttaatgatggaacaaagacaacaacaggaaagttctgtggttcaattgttagaattaaagacggaaactatgatagagaatttatcgctgtaggatatgcaactattaattattcaaatggtgatccaaagactgtatatgcagaagttactgtaaacaacgctaaatcaattcagtacgttgctaataaagtaaaagccagcgagaaatttagtggttacactgctgaacagaagaacatcattgaaaagtacattgctaatagaaaggagatattagaataatggaaagaagatatataagcccagagatggatataatagaatttgacacaaatgatgtaataactacaagtggtgagctcggtggtgaaaagcctggattaacagatgtaattgatgtaaacacaatgaaaaattggtcagatttctttgaataaaaaataaacaacttaataataaaacaagctgtgctttaactcaacattaaagcacagcttattttttgtcctcattactatcatcttcccctaaaggtctataacaatgttcaataaatgcgaaagattaaaaatcagacaaaccagccggattgtcgacttattgtatgggtgtattacttgatttgaagggcaaaaaaatgtatactagtagttatcagtatgaaatggattataaccccgaagggtacgcatttaacctgataagttacgaaaacataggaggcaaaaatgataacattaagtaaaggcggagcataccttattggtggcacagaagttgtagaaacaggtgcaggctcagaagaattactaaagaacaagttaggggataaataccttacaaaagaagatgctgcaaagaatactatggcatatggtattttgaacgaacacaacacatcaggcaacatggacaagcttcagattaagtttgataagcttacatcccatgatattacatttgttggaatcattcagacagcaagagcttcaggattagagaaattcccaattccttatgtgcttacaaactgtcataacagtttatgtgctgttggtggaacaattaacgaagatgaccatatgtttggacttacatgtgctaagaaatatggcggaatttatgtaccacctcaccaggcagttattcatcagtttgccagagagatgttagcaggtggcggcaagatgattcttggttctgattcacatacacgttatggtgctcttggtactatggctatgggtgaaggcggacctgaattggttaagcagttactttcacagacatatgacattaatatgcctgaagtaatcggtatctacatgacaggagagcctgctaagggtgtaggacctcaggacgttgcacttgcaattatcggagaagtatttgacaagggttatgttaagaataaagttatggaatttgtaggacctggtgtttctaacttaagcgcagattttagaattggcgttgacgttatgacaacagaaacaacatgtctttcatctatttggcgtacagatgagaagattaaggaattctatgacatccatggaagagtagatgagtataaagaattaaatcctggcgaagttacatactatgatggaattgtttatgttgatttatctaagattaaacctatgattgcaatgccattccatccaagtaacacatatactattgaagaattaaatgctaacttggaagatattctccacgatgttgaaaagaaagctttagtttcattagatggacaggttgattataaacttacaaacaagattcgtgatggaaaactttatgttgaccagggaatcattgcaggttgtgcaggtggtggttttgaaaacatttgtgcagcagcagatatattaaagggacatagcattggagctgacgaatttacacttagtgtatatcctgcttccatgccagtatatatggaattaatcaaaaacggatgcgcagcagatattatggctgccggcggtgttatgaagacagcattctgtggaccttgtttcggtgcaggtgatacaccggctaacaatgccttcagtatcagacattcaacacgtaacttccctaacagagaaggaagtaagttacagaatggacagatttcttcagttgcacttatggatgccagatctattgcagcaacagcagctaacaagggttatcttacagcagctacagatgttgatgttgagtttaagggacgtaagtatcattttgacaagagtatttatgaaaacagagtatttgactcacacggaatagcagatcctgatacagaaatccagtttggaccaaacatcaaagactggccggaaatggttgcacttacagacaatcttcttcttaaagttgtttcagagattcatgatccggttacaacaacagatgaattaataccatcaggtgaaacatcatcttatcgttctaacccacttggacttgcagagtttgcactttcaagaaaggaccctgaatatgtaggaaaggctaaagaagtacagaaagcagaaaaagcaagagaagcaggacagaatcctgcagatgcacttccggaagttggaggagtatttgaagcgttaaagagcaatcttcctcagtacaagattgacaatgatacagtaggtatcggaagcactatttttgcagtaaaaccgggtgacggttcagcaagagaacaggctgcttcatgtcagaaggtattaggcggatgggctaatattgcctgtgaatatgcaacaaagagatatcgttcaaaccttattaactggggtatgcttccattcatttatgaatcagaagaattaccatttaagaacggtgactatatttttgtaccggaaatagttgaagctgttaagaacaaagctacagacgtacaggcttacgttgtagatgatgacaagaatgttaaaccatttacattaaagcttggcgaaatgactgacgacgaacgtgacattatattaaaaggctgcctgattaattacaacagaaaataaataattaaaacagggaggagaccatatgggaaacaagaatgtcataacaaaagatgactgttatttgtttggaaaaggtactcattatgaaatatatgagaaactgggtgcgcatgttacaacaattgatggtgtaaaaggaacatatttcgcagtttgggcaccccatgcagttaacgttgccgttataggtgattttaatgactggttgggatttaaccataacatgaagatggaaaatgattcaggcatctgggaacttttcataccggaggttgaagaaggagcaatgtacaagtatgttatttctacacaaagtggggatacattgtacaaagctgatccttatggtttttgggctgagaaaagacccggaaatgcttcaagggtagcaaatattgataattacaaatggaaagatgctaaatggatatcagagaaggcaaaggagaatcactatgaacttccaatgtcaatctatgaggttcatccgggttcatggaaaaaggattttaaaggtcctgatgatgaagacggattctatgattacaagcgtatggctaaagaacttgtagcatatgttaaggatatgggatatactcatgtagaacttatgggtatattggaacatccttttgatggttcatggggatatcaggttgtgggatattatgcacctacatcaagatatggaacacctcaggattttatgtatttggtagatgctttccacaaagcaggaatcggggttattttggactgggtacctgcccacttcccaaaagatgctcacggacttgcaatgtttgacggaacaccactttatgaatatgcagatccaagattgggagaacatcctgactgggggactaaggttttcgattattctaagacagaagttgttaatttccttattgcaaacgcattattctgggttgaaaaatatcacatagacggacttcgagttgacgcagttgcttctatgttatatttggattacggaagagaagacggacagtgggtttctaataagtatggcggtaatgagaacttggaagctattgagttctttaaacatttaagtagtgttatgaattacagaaatccaagagcatatattattgctgaagaatccacagcatggcctaaggttactatgtcacctaaggatggaggacttggattttcttacaagtggaatatgggctggatgcatgatttcttagagtatactaagcttgatcctttgtttaagaagggtaatcataataagatgactttcggattaacttatgcatttagtgagaattttattttggtattatctcacgatgaagttgttcatttgaaatgttcaatgattaataagatgccgggttatccacaggataagtttaagaacttaaagacagcatatacatttatgttgggacatccgggcagaaagctgttatttatgggacaggaatttgcccagttacaggaatggtcagaggctagaagccttgactggtatctgcttgatgaacctgaacataaagacatgcaggaatatgtaaagaaattacttcacttatataaggaatatccggcactttacactgaaacaaagggctatggagcttttgagtggattaatgccaatgactgtgaaagaagtattttcagtttcataagaaagacaacagaagctgattataagaactctatcggtttcgtgtgtaactttacaccaatggaaagacctgattatgttgtaggagttccaaaagccggaacttacaagagattggttacaacagaaacaggtgagaaacaggttgtaagctacagagccaagaaaggcgagtgcgatggaagaccatatagattggaaatgccacttagaccatacgaatcagtagttttcgaatttccaaaaacaagaaaaaagaaagctacaccaaagaagaaaacaaaataaaaaataaaattgtctgtggtacaaaaaaatagtgccacagacatttttttgtgctatgattaggattgattaaatacaaggattgaatgggtgatgaaatgaaaaagaaagttatagcagttgttgcaattgtgctgattcttgcaattgcagtggttataggaataaattttaacaagaagcagtctaagaataacaagcagagcaatagcggacaggcaacgtctacatataatggtaagttgccggggattgatttatattatggaagtcagaaggttggaagtcttaacggctacacaatggatatggaagaagaacatatgcgtgatgttattgtccctgttaatacagacagaacggttccaattacaatatcaactaatggcaataaggtttcagagatttcttacgaaatgaagagtactgaggacaaccgtttgatagataatggaacccttgccggctggaaacagaaggacggcaagattactttgaattatcaggccagtgccattatggaacagggaacagagtatttctgggaaataattatcaaaacagataagtatgagcagattaattattacgcaagggtaatggttacggataaggagtttgttactgaacagattaagtttgcgaagaattttgcacagactgctttaaagggcgagggagcttcaaagcttgctcagtatattgagcctgatagtagccttcctaatgataaccttggtcagactactattaagtcaagttacaatagccttatttggacttcacttaagcctgagcttatatctgatataacaataacagcaaaagagttttgcataaaggacaccggggaagccggaacttatacaatgaattatcagattagaacaactaatgctgagaaggttaaagagaaatataatgtttctgaaacaatcacaatatggagttgtgcaggaagaatttatgttttggcatatgacagggaagtaaatcagatttggacagcagacaagaataacgtaggcggaagttttattgacttaggtattcagaaagaaacaaaggctgattttgttgaaagttcaaatcagcagtttatggcgtttcaggttaacggcgatgtttacgtaatggatttgaatgaaagaaaaatcaaacaggtttacaatcttaatgccaagaatgctgaacagcttaacaatactaaggcaagggtaattaccgtgaatgacaagggcaatgttgactatatgatttatggttatagtaaggctaaggagcatgtaggcgaaaacggaatttctattttaagatataattatgagtctaacagttccaaagaggcggcttttgtaccttgcaaagtgcctgcttacaacttggagaagcagttgtcacagctttgttacgtaggcgacggaactctttatattatgatgaacaacactatttactatgcaaaccttaaaactaaggagtggggagcgttggtagaaaatgtggaagacggaagttttgcaattaacagcgacggaagtatgttggcttacaatacaagtggtaaggcttatgatacggaaaacattacaattgttaacttaaagaatggtgaaaagaagactattgaggcgggagctgacaatattattaccgtatatggttacacgggaacgaacctgatttatggaataggttctcagagtgacgtgtcaaagaagagttttgtacctgttagcaagttggtaattgttgataaggattataaagaagttaagtcatattcacagaataaggtttatattacaggtgttgaaataacagacaatattattaatattaagcggtacaagggcaagagccagatttcagatgaccagcttttggataatactgagactaagaaacctgttgcaaaaacaagctattatgtggatgatgtaaagcaaaaggaattagctttggcatttactaatgcacttgatggaactaagcagctttcagttgaaaagattggcaaggtaacttttgacagtagttctaaggttaatgctacttttgagagcaagaaagaaaataattattatgtttacggatatggaaagcttcaggggatttacagcgacaagaacgttgcaactaatgcggcaaaagctacatatggacttgtaacggataaccgtggacataagatatgggtttttgaagagaattataattaaaaatatacgaaaaggtcaaaatgcttattagaaaagagtgttttgacttttttctttatctttacgcgaaaaatttttaatgttatacttaaagttagtaaaaaattcgggaggaactatgcgatttatacatactggtgacattcatcttggtgccactccggagagcaaaagaccttgggcggctaaccgtggagatgaaatttggaatactttagaacgtttaattaaaaaaataaaaatagacccggtagatttgcttattattgcaggggatatgtttcacagacagccgttacttcgtgaacttaaggaagttgattatttgttttcgactattcctgacacaaaggttgttttgtgcgcgggaaatcatgatgccattaaaaagggctctttttatgacggcttcaaatggagtgagaatgttattttcttaggtgacaagaatattgaaagtgtggagattcctgagcttaatacatgtgtgtatggactaagttatcaccagactgaaattaaggatgcaatgtatgaccatgttattgtggacagaccggatatgattaatattctggtggctcatggcggtgacgaaaagcatattcccattaatagaaagaagcttgcaatgtcaggttttgactacgtggcaatgggacatattcataagcctgaaatagatgaaaagatgaagatggcatacagtggttctcttgaacctattgatatgaatgatattggacctagaggctatatttatggggagatttcaaagagaggtcttgaacttgaatttgtgccttttgcaaagagaatttacagggaacttgatttcacggtaactccaacagctactaatttggaaataagacatagactgattgacatgattaaggagcagggacaggatgatatgtacaagattacttttagcggttacagagatcctgattttgacattgatgtttcagatattgaaggtgttggaaatgttgtaagtgttatcgacaatacggttcctgattatgattttgaagaattgtacgctgaaaataaggacaatattcttggaatgtacataaagaaatttcttgacagggagagtcttacacctttgcagcgtaaaaccctttactatggaacaaaggcattgatggatgccatggaggacagggcatgattataaaggacatacgattaactaattttggaaaatttaatcataaaatggtaactcttgaaccgggacttaatattgtatatggtgagaatgaagcgggaaagactactcttcatacttttataagaggaatgctctttggaatagaaaaacagcgtggaaaggcaagtggtaaggacctttacactaagtatgagccatgggagaatccggctaattatcatggtatgatgcgaatcgaaagcgacggtgtaacttatcgtattgagagaaattttaataagcttaataagtcttttaaggttattaatgaagataagggtattgagcttaaaacagaggagattgaaaatcttttcgcagggcttgatgaaagctgttactacaatactataagcataagccagcttggcagcgttacagataaggaacttgaagttattctgaagaattatgcggcaaatcttggcacaacaaagtctatggagattgatattaaatcagcatttgcagacttagataagcagaagaaaaatataatgattgaaagccgaattgccgaagaggatgttgttgagaaggctattaagaatgccaaagaggatttggaggtttctcagggcgaacagcatacaataattgcttcgatagagcagaaaaagcagtctttatttaatctttctaataagaagaaggaattgtcagctcttgatgcaaaacgacttgaagccttaaataaacttaatgagcgtaaggagaatctttatcaggaggcgattactttgactgctgacagtgagaagttttcagcttcccttgaacagattgaaaatcaccagaagcagcttgaacaggagcttgctgacaagggcattgacggaagagagactatggaatatcttcttgaaaaagttactaacagaagtaatatgcctgttttgtttattatccttatgatgggatgtattggtggtgctgcaggttttattatgggcaattaccagatgatggatttaaagcagttttgggttaagccgggtatatgccttggtgcggcttttgtttttcttatacttgcaatctttaagtatggatttaataagaagaagcgtcagaagaagttggatgccttaaaggagattaagcttgtaatggataagctcgacgcggcaaagcacgaaagggtttatgttgaacgtcagcttaacaataagaaagaagctttaaaggatactcaggagtttattaaagccgaggaagaaaaaagcgttgatatgcaggattatagtgacgagttaaaggacttggaagcgaaggaacgtgaaatcaacgaggcaatttcaaagtctcagtggattcttgaacagaagcaggaaaaggatattgagcttcagaagaagattgatgaacttgaggagcgatttaacaagattaagaaagcaaaagttgaaatacaggctattgaggacgccaagagtaatattgaagatatagcagatgaaatcagaaatagtttcggtaagagattaaatgagagagcatcttattatatttcacaaattacaaacggcaaatatgacaatctttcaatagatgacaaacttaacatatctgtaaacagtaagcacgctctcatagctgctacacgacttagcaagggcacaatagagcagatatatatggcacttagacttgcggcagcagatattatatttgaaaaggacaagaaacctatacttcttgatgatgcctttgcaatgtatgataacaagcgaatgggtaatactatgagatttatggcagaaaatatggaacaggtaatcatcttctcatgccatacaagagagaagctaatggcggacaagttaggacttaagtataactttataaggttgtagtggagagttgcaagattatgaagttattttttgagaagatggggattttttgtaggaatggtagggattataagagaaaaacgaattgtctaataagaaatatgttccatagtgtatataaacaacgagcatttaaggaaaatattatagatgtaccccgaaaaacaagagaattaatatgtcggggtacattttagactaacttatatagtatgttgcataaataaactggaaatttagggtgctgtaccccgaaaaacaagagaattaatatgttggggtacatttacaacttacagatacagtatgttgcacaaataaactggaaatttagggtgctgtaccccgaaaaacaagagaattaatatgttggggtacatttacagcttacagatacagtgtgttgcacaattacatgcagaaaattagaaaacgtaccccgaaaaacgacaaaactgctatattggggtacaggacataaaaaagggctcaaacactaattagtatgtcatatcaaactaattagtgctgaacccatacaaattcaatagtgataaaaatcaatctatcttataactaatgaagtatttatattgattaacaattattagaaagtcatattcttttaatgagaaatcaaactaagataacctcctttatcttttcgatttctttaacgagaatacaaactctgttccaacgccttcggtgctgattacatcgattgtttcgttgtgtcccataataatttcttttacgatggcaagtccgattccggagcctgttttgtcacgaccacgggaaaggtcggtcttgtagaatcgctgccagattttgtcgatgctgtcctgtgggattcccataccaaaatccttaacggaacaatattgtttttcgcctttgttataaagcttgattataatctttgaacccggattactgaacttaatggcgttatcaagtaggttgtaaagaacctgttcaatcttgcctttgtcagcgtatacattgcagtgctttggtggaaactgaataatcaattcaatattcttcttctcacaactgccctggaaagtatcaactgttgaagcgataactgattccatattaaagtcttcaaaaataagttcaggaccggtgctgttccaacggttaaggtcacgcaatcctgaagtaagcttttcgagacggttagcctcagataaaacaattgaaagatatttgttgtaatcttccggtggaattgttccatccattatagcttcaatatagccctttatagaagttaaaggagagcggaaatcatgggaaatattagaaataaactccttttgataagctcgtgagttgtttaattgcttagacatatattgaagtgagtgcgccacgtcaccgatttcatcgtcattgttaaccttaagtccttcgtattcaaaattacctttggcatattccattgccgcaagtctaatctgcttaagtggcaaataaataaaccacataaagttaaagaatataataagtgaaagagccagtataattgcgtaagtaacgtagaaaataagtgttacatcatagcaactttttttaataatggaagtaggcatatgcgccacaatatatccataagtcttattattatttttgacttcatagacaacacttaaagtgtcggttttaaaaatattataaaatttgccaatcttgtaatgcgtattcttgtaatcatcaggcttgaatttttcaatcaaaatattagaagaatcttttgaaagattatttgttgtgcctgtgtaataaaatggtttgcggttactatcaagaataagtatgtcacagtccagtacgttgttaaaatcatttaaaaattgcttaggattgtctaaatcatcaagtgagttgtccacgcagtccacagcattacttcctattacagaggcatatttgtaaagggtgttaatgttattggtcagaagatgattataaatcaagttatttgaccaataagaaattaacaaaaaacctaatattgcaaaagaaaaataccctgtaaaaaatttagttaaaatagaatttttcatatttagttatgtacctcgaatctatatcctacactccaaactgtaccaattgaccactgatccgtgtcagcaattttttcacgaatacgtttaatgtgaacgtctacagttcttgtatctccggcatattcataaccccagatatggtcaagaagttgctctcttgtaaatacttgattaggtgatgaagcaaggaagtacaataattcaatctctcttggagtcatttcaacaggtttgcccttgtaaataacttcgtagtttgaaagattaataataagatccttgtattcaacacgtttttcatcaggcttctttgccacaggagccggagcttcagtgtaacgtctgagaactgccttaacacgggcaacaagttcctttgagtcaaaaggtttaataatatagtcatctgcaccaagttcaagacctaaaactttgtcgaaaacttctgttttggcagaaagcataataataggaacctttgattctcttcttatttcacggcatacttcgtaaccgtcaagtcccggaagcataatatccaacaaaataagatttggagcatattctttaaacgcatcaagagccgactggccatcatgctcaatacgtgtttcgtagcattccttagttaaatataaagatataaggtttgcaatgttttcatcatcgtcaactattaagattttctgtttgtttgccattttaaatcctcctgttaaaaaaatctatttaaattctacaactgtggcacctgcaccaccttcgccatgttcacctgttctgtaggattttacatagctacatttcttaagatggttttgaactgcatttctaagagctccggtgcctttgccgtgaataacatatacctgtggcaaatgtgcaatgtaagcatcatctaagtatttgtcaagttgagaaatagcttcgtcaactgtttttccaattaaattaatttcagttttaatattcatagacttgttcattttaatcttgcctgttgaaccacgggttaagcctggtgccttaatatcaggttcgtcaataatttcaaggtcgcgaatattaaccttagagtttagtatacccatttttactgtaagattaccggctgcattaggcaatgaagcaacagtaccgttaagattcatgctcaaaacttttacacctgtgccaagcttaaagtcggaaggcttgtaagcctttttaggtttggcagctttaattgatgagcctacctggttctttttaagctttgctccaacattacttctggatttttccatttcgcgggtattgccggattttccatatttattaatagctttgatagcttcgtcggctgtttccttagcttccttgagaatatcaacagcttcttcgcgtgccttgttaagaattttgtcacgttgttcattaagcttttctgtcttaagttcataatcacgtttaagtgatttaatctgagacttataaactgcaatagtttcctgatctttttcaatctggattcgctgtctttctatttcggacaaaacatcctcaaactgctcattatctgaatcgatgtgagacttagcatcttcaataatgtagtcaggaagacctaacttgcttgaaatagcaaaagcattgctctttccgggaacaccaataagaagtctgtaagttggtctgagtgtttctacgtcaaactcgcaacttgcgttttgaactccctcagtggataaggcaaataattttaattcactgtaatgtgttgttgccataattcttgaaccgatgtttttaaggaaagtaagaattgaaatgccaagggctgcaccttccacaggatccgttcctgcaccaagttcatcgaaaagtaccagtgaatcctgatctgcctgattaagtatattaacagtattaaccatatgagctgaaaaagtacttaagctttgctcaatgctctgttcatcaccaatgtcagcaaaaacttctttgaaaacagcaagtttgctaccctcaaaagccggaatgtgaagtcccgcctggcccataagcgttaaaagtcctacagttttaagtgaaactgttttaccaccggtgttaggacctgtaacaatcaaaaggttaaagtcttttccaagatgaatgtctataggcacaacttttttaggatccaaaagagggtggcgtcccttcttaatattaatctgtctttgatcattaaactcaggcattgaagctttcatttcttttgcaagagaagccttagcgaaaataaagtcaagcttaggtaatatttccatgtctgtttttaattcgtaaatatgctcggcacaggccatactaaggttagcaagaataatttgaatctcatcagcttccttagcttccagttcacgaagcttattattaagctctactacagcagcaggttcaataaataatgtggaacctgtagatgactggtcgtgaatgataccattaacatttccgcggtattcctgtttgacaggtacacagtaacggccatccctcattgtaataagggcatcctgaagataagtgtgacctgactgggaattaatgagagatgacaactggctgtgaacacggtcgttggtaatcttcatctgtcttcttatatttttaagattagcagatgcatcgtcagctatttcatcctctgaaataatacatctttcaatgtcattcttcaaattagttaaaggttcaatagcctcaaacatgtcatcaagactatctctttcagcctcatcatcacggcgggagaaagttttaactcttaaggcaacttttaaaagggagtcaattctaagtaattctccggtgccaagagtacttccaatctctaatcttttaatggattcgccaatattgtgaatacctgagaaagaaaggcttcctttctgccagattcgtgataaggcatcacctgtctgtttttgattttcttttattttatgaatatcggcagatggaacaagtgcgtggcaaagcttcttgccaggctcagaacctgcctgattttctaacatttttattattttatagtattcaagggttttaagaactttttcgttcatgataaagcctccaattcttgtatttagatacataatcaattataataaagattgactgtcaggtaaagaaaatcttaacatttggaggaaaagatgagatatatagaaacattaagagagggcgaaagaattcaggaaacatatttgtgcagacagagaactactgcaatgactaaaacaggaaaagaatacgagaatgttattcttcaggacaaaacaggttccttggacgccaagatatgggatccgcactcaatggggatagatgagtttgatgcacttgattatgttgaagtaaatggtgatgtaacagtgtttaacggtcagacacagcttagtattaagcgtgcaagaaagattagcgaaacagatgttgacccgactaattatttaccatgtactaacaaaaacattgacgaaatgatgatagaattaacaaaattcatcgccggtgttaataacccttattataaacaggttttaacaaaactatttattgacaatacagaatttgcggaagcatttaagaagcattcagcagccaaaagcgtacatcacggttttattggcggcttgcttgaacatacattatcagttgcaaagatgtgtgatttctttgcaaaacaatatcctattttaaatagagatttacttatgacatcagctatttgtcacgatattggaaaggtttatgaactttcagactttccaatgaatgattacacagatgcaggccagttacttggacacattgttatgggttcagaaatgcttggaaagattatggattcaattcctgattttccgactaagttaaagaatgaattgaagcattgtattcttgcacatcacggagagcttgaatatggttcacctaaaaaaccggctcttatagaggcaatggcacttaatcttgcagataatgcagatgcaaagattgagacaatgacagaacttttaaacagtaacagttctgcttcatcagaccagtggttaggatacaacagattgcttgaaactaatgttagaaagacaagcgaattaaagtaataaataaatagataataatacaaatacgcaataattagcataaatatgcgaaaaaatatacagataattatttaaaggaattttcatgattaagaaaaatgatattttagatttaacaattgaagatttaggcgtaaacggagagggtataggcaaagttgatggctatactctttttgttaaagatgctgtaataggagataaagttacagttaaggttatgaaggctaataagaactttggttttgcaagattaatggaaattaaggagccttcaaaggacagagttttgccaagatgcaatgttgcaagacagtgtggaggttgccagattcagtgcattaattacaatgaacagcttagatttaagaagaataaggtttataataatcttgtgagaatcggtggacagagtgattttgtaatgaatgaggtaattggaatggatgaaccttttaactatagaaataagtctcaatttccagttggaatggataaggaaggaaatattatttcaggtttttatgcaggaagaactcattctattataaatatagaaagctgtgaccttgggttaaaaattgatggaagagatgttaacagggaagtaatggatgtggttaaggcatttatggttcaatacggaattaagccttacaatgaagtaacccacaagggtttggttcgtcatgtcctaattagaattggtgcaaaaactaaacagataatggtttgcgtaattataaatggcaagaatcttcctaatgaagaaaaactaacagaagagttatgtaaacttgaaggaatgtatagcatttctcttaacattaatactaagaaaagcaatgtgattcttggggacaaggtgattaacttatatggccccggatatattgaggattatattggagatgtgaaatttagaatttctccattgtcatttttccaggttaatccggttcagacagaaaagttatacaataaggctttagaatatgctaacttaacaggaaatgaaatagtatgggatttgtattgtggaattggaagtatatccttatttctggcaaaaaaggcaaaacaggttttgggtgttgaaatagtaccggaagcaattgctgatgcaaaaataaatgctaagataaataacatcgacaacgcagaatttttcgttggagcagcagaggatgtagtaacggaatattttgaaaatcacaaagatgacgaggaatgtaagccggatgttattgttgttgacccaccgagaaagggttgtgatcataagcttctggaaacaatagtggaaatgaatcctgaaagagtggtttacgtaagctgtgacagcgcaacgcttgcaagagatgtgaagtggcttagtgaaaatggttataagttaaaagaggtcacaccttgtgatatgtttggtcagacaacacatgtagagtgcgtggttgcactacatcgggtcgatatgtaagaatccttgattttaggcactttgagagcttttttaggtttgataaaaatggctcaaataggagaaaaaagacactttccaatggagttgacgtttctgtagtattagatgtggtgattgggaacacacggtagtaacgttcacaattaaagaaaaaacaaatatttacttcgtagtaattaagacaaaggattactcgttttcagcaatgaaaatgagcaatccttatttttttgaaaggagcatttgaaaatggaagaaattaagaatgttaatctgacacaattgaaaccttttaaaaatcatccctttaggatttcttcgcaatccaaaatataacgtatatccagtcatcgaatttattgaaaagcacattagtaaactttgcgaagaaggtgttgtatgggcaggatattttatgtgtctagaaaaagatggataaagcaatagataattgaaattcaagagaaaacgtagtaaaatacaaacatacaattataccattggacggaattataaaatagtataatacagaaactataacacagataaaatgataaatggtgcttttggttaacgatataaaaagaaaggggaataagatatgagcaggagcataaagaaatgttttgcagttatgctagcactcgttgttttcgtgtcggggatgagcaatatgtcattatctacattggcagatgatacaattcaagaaacaactgcgatttctgaagagacaactgatacaaaagaaaacaagacgcctgcaaaagaagatgcaacgcctgcaaaagaagatgcaacgcctgcaaaagaagatgcaacccttgcagaggaagatgcaacagtgtgggaagaaagcaccaaagatgtaacagcagaattgggacgtgctgaaaatcctgtgaaaaaaattgtggatacgcctttgaaaaaagctgttagagcagttcttccggaaccaagcggtctgggaagatttgaggcagaaaattgcgatactgtgcacggctcaggaagtgaaccaaagaaaaacagtggcaatgaaaatttttcgaatagtggttgggtttccgacatgaatacatggccgaatgatgaaccttcctacattacgacaaatgtaaattgtccgtctgctggaagatatgaaatcaaaatcggatatactgctgggattaatggtatgggcgatgataaaagtaagccgacagaaattgacgtcagagttaacgatggagagtggattcatatagatggtgttcctttaacagattcttggaatactgttagtgtcgttagtaaagaaattaatttaaagaagggtaataataagattgatgttacaggtgcgcgcaatgtgtggtatggtgataccaataattggcagtgggtcaatctggattattttgaccttgtggcaatagaagtgccggcagaaggcagacatgaagcagaacattctgattcatatacacaaggcggtgcaaagaatccgcctaatgttgttatcaatgaagatggtgattggaataaaaagttttcgggaagtggatatgttggcaacttaaattcctatcctctggatgatgaaggaaaggatattcgttcctatctgacacagaaattatacgctgaaagaccgggaaaatatttgttgaccataggatatgcgtatagaaataatgcaggtgatagcagcaaacctacgaatattgatgtcagattgaatggaggatcatggaaatctgttacagcaaaccaaacggcagattggaatgatgtaagagaggttagcactgttattgaattaaaacgtggagaaaataccatagatataacaggtgcaagtaatatatggtatgcaggaacaggagattactggcagcagattaatttagactattttgatatttcttctcctttagcagaaggaaaacatgaagcagaagagtatcatatatccggaaataaaagtgaagataagcagtatgaaataaaagataatggtggtggcatttattctgaaaataaatatgcaactatttggaatactctgacaggtgaggaacatgagtacctggggtataatgtttatgcacagcatgcaggtaaatataagcttgctgttaaatatggaaccaaatatgatggagatatatttgtaaagataggaaagggagaatggaaacaactttccgctccgtctacaggagagtggaatgtagtaaagaccgtagagatggacattacattgccaaaaggtgagaatacaatatatattgccggacgccaaacaacgggcaataaatataacgagtatatcaatattgattgtttcgaattaacacgacaggtagataagtccaatatcgcattggataagccggtcagaaccagtggtaaccgtagtgatgatgtcaatgataaggataattataaaaggtactttccggaagaagcggtagatggttatgatgattccagatggggaggtcgtgcaaatcagaatgaaaactggtttgagatagatcttgaggggatttatgaaatcaatcaggttatgttgaagtttgaacgtgcctatccaaaggattttgaaattcaggtttccagagacagaaaatcatggacgactacagaaactgtaaagggctggacaccttccgagaatgcagatccgaatgcaaaataccaatggaattctaatatttcttatcatggaaaggcaagatatatcagaattaatgcgacaagtcttaaaaataaaggttggggattgtctatttgggagtttgttgtaaaaggcgataaactgccggcagatgtgaaagatgtggcagtaaataaaacagcaacagcaagttcaagtaacgagaatgaagttgcatgggcgattgacggaaaagatgactccagatggggatctatcagtggagatgcgcagtggtatcagattaaccttggaaaagaatatgcgttacacagtgtagacttaaaatttgaacgtgcgtatccggaggactttacaattaaaacatcgaaggatggaaagtcatgggagacaataaagactgtaaccggatggaaaaatccagggtcagcaggcaatcttagttccagtgccagagttggatatagctttaaactggacagtgaaaaaaatgcatcttacattcggatagagtcatcgaaagctgctaatagctcatggggactatctatctgggagtttgaagcatggggtaaggaaacgaatttacaggaatattggaaagatgttcaagggaaaaagtacggaatttatccggtcgataaactatatgataaaaccgaaacggaaaaagcggctcatatgaagtatgcggatggatcggaaaaagattatacaatattaaattcagatttggtgcagggagatgtattagccacaaatgacacttatgaagtcgtttatgaaccaggcaaaaataattacatctatttctacgttaatccaagagatatacatattgattttggagaagatgaaaataacgagaaagataaagtacgttggtctggaaattcgaaagatgcaaaccttgttaaaaataataacaagtggggggcaaatgattataatagtgatgttttagaattctgtgggcagaaagcagccactgttcagtataaaattaaggatttgggaaataaagattctgttagcacatggattggatgtcagatttatggtacaacaaacaatgtaagtgatcttggtaagaaagatcctaaatttgaaattaaaattaaaattaacattacaaaagcacatagcctttccattgtagacactattgaagaggatggttgtctgggtgtgaaggatccccaaaatattaaatataaatggcagagaagcagtgatggcgtaaacgactggcaggatataccagagaagagagatgacatgcaggtattgtataatggtggaaagaaacttgatgtttctcgtgatgcaggtggtggtatgtattaccgtgtcagtgaagatggaaaagacgattggtcattggtatatagagtaaactactataataatgtacagaatggtgactttgaaaatccgattatgtgcacaccgggaaaatcaggagcgtcgttcccatttaacgcgaatggggatgaacagcaatatccgaatggatatccggggctgtattggaaaacaacaggaccaggctggcaaagtattaatggcggtaccaaggttggtcatgatattgaaattgttaatggtagaaatctgaaagtaaataaagagtaccaggaaggtcagttttccgtaacttatgaggaaatgtataaagatgggacccatggtgatcagtttgctgaattgaattgtgagaatatcggggcgttgtatcaagatattctgacaacaccttcatcagagtgttattgggatttggatcatgcaggacgttggaatcaaaatacgatgtatgtcgtggcaatggcggcaaaagatgcaaggcaatatatgacttcagagcagttgaatccaaacaatggtatatcagatacctttatcaaaaaactgaaaacaatggataatgataatcagttgaagaattccaaatcagaatatgatgagggaacagaaatcaatctcgggagtggaattgtggcaagagtatggaaagttcgtagtgagtctgttgcagcagggcattgggaacgccatagaggacagtataaagtaccgaatacagataaggatcatttaacacgtttcttctttgtttctgcagagggtggcggaaaaacacatagtgaaatcaacaatggtggaaaccttaccgtaggaaaccttttggataatgtttcctttgaaatgaggaaaagttattccataacatataaacttcaggaatatggtgtaaatggcaatctaaacacagtaacagagcatacaatagaggggaaaacggttcctggtggaaaggtagttgttcctagtagttttgagaaagacggtacaacttacaatctgtccgactatactttaacaaatgcaaaaatgaacgataaggacttctattataataataaagggcagatgactgtagaatttaatcatgatacattagttcttgtgtatgtaaaaaatattataacggtcacaaagattgtgcagggtgtggaagcaaaaaatcttccgaaggattacaaggtgaccgttgaattagcgaaagtaaatggaaatcagaagaaattagtaacactgagtgattttaaagaaatcgaaaaagtgaatgcgaatgatgccggagggcttttcgcaagtggaacgattcaagcttcagagttaggcttacaggatggtgaccgatatacagttgttgaaaaggttgacagaacattcaatggtaaagataacaatagatatgcattggttcagattactgacagcattaatgaaacaattaataatttgccagtaaatgcaaaacaacaatttgagtattcaattggtgcaagcggaattaattataaaggaagtcagtcaaattcagcgacaatcaccaatatttataagccgacacgtacgattaaagttacaaagaaagtagaaggcaaatttggtgaacgggataagtcatttaaattcacgttgacattgagtgaagcggcggtaagttataatgatgacaccttcccgaatgatagaaaggtaacgtcaaatggttctacatatagtttcagtctgaaacataatgaaagcattgaatttgtagtaccggatggctgtactgccagcgtttcggaagatgattattcatcagaaggatatgttacaacgtggaattcagaaattaagaatgtagtaatttctgagaacaaatcgactacatgtaccaactcacgtgacctgactcctaccggtttgaacaatagagcaaagccatttatcattttacttggttgtgcattattggcagtagcttgttttgtggcaggaaaaaaaggaaaatttagaaagttaggctgaagagaataactgtaaaaaataattttcgggaagggaatcttatggcatcaaagaacatgaaggatatttcgaacttgttaaaaaatcttaagttccgaaaaaaaatgttcggggggatagatgaaaaagacgtttggcgaaagctggatgaattgcaggaagaatatcagaatgtttatgatgccaaaggaaccgccaaagaggcagaggacatagatgatcctggagaggtaattaaaaacaaaagaaagaaactgtttcaaaaagaagaaattatcatattctttgaaagactgatttttctggcggcattggtgtatattatatttggtgtgatttttgggattacaccaatgaaaaataaagatatgtcaccgaaaatcaatgcaggagatttgatgcttttctatcgcttggagaataactttagcattagagatgtggtgatttttgaaaaagaaggtgtttcgtatactgggagaatcattgcaaaagatggcgatacggtagaaatcaccaatgaagcagaagtaaaagttaatggttcgttgcttgcagaaaatgatatatattattcgacacctatgtatgataataatgtatcatatccggttacgctcagagaaaatcaatattttatcttgtgtgattaccgtgagggagcaaaggacagtcgatatttcggtgcagtagaaatggaagagattaagggaaaagtgattacaattataagaaaaaatgaattgtaattgaagcgctgatttgtaatttattgtgtattacggagggcagattggagaaacaatatcaatgaatctgacagagaaatataatccatatgtatctctgtgataaaggtagtattttggtacttcctatagaatatgtaaaaaaaataataaaagaaaggatgtttattatgaattcgaaaaacaaaaaaataataaaagaaaggatgtttactatgaatttgaaaaacaaaaaaatctttagccgcatagcagcaggtgttatgacggtggcaatggcaattacattattgccgggaactatgaaaacagtgaatgcagcagaacctgtaacaagcgcttcacttgatgtaaatttgtataagagagcagatgtatatgctccaaatacaacatttgaatttgaggttactaatttaacagcagaacaggcaaaagcaacaaatggtggtaaggatttaaagccaccgtttaaaaatgcgccagcaggtgctgtaaaaccaggaacaattgaattagcaccggcagcagaagatttaactgagacatctattagtaaaaaacttacatttaccttagttgcagataaatttacaacggaaggtatcggaacttaccgttataaagtaaagcagaaagaggggacctatgaaggcattaaatatgatgtcggagagagatatttagatgttactgttgctacagatggaaccaatttttatattgcaagtgcatctttagtcttgtaccaagaagatgggcaacttgtaaagagtggagcttttgtaaatacatatggtgttaataagccggatacagagaacccagttccaaagccagacggaacagtaaacgatttagttattagtaagacagtaactggtaactatggtgaaagagataaaaagtttatctttgaaattacaattaacggtgcagaaggcgaatggtataatttagaaggacaaccggcaattaaaaaaggtaccgctgcaagaattgaactgaaacatggagatacagtgaaaatttatggtttaactgaaaatgatacctatacaattaaagagctagaagcagacgactataaaacaacatttgagacaaaattgaatggtactaataaggccggtggaagtggaaatattaaaacagcaacaggtaccattgatgctggaacttcattacagacacaggaagttgcatttaccaatgacaggaccggttccgcaacaggttttgcttcaagttacggaccatatgcacttatggttgttttagcaggtgctgtagcatttgtattattccgtaagaaaagagcagaatactaaaaattagaataagtttgtgagagtttttacacgtgaaacaagtaattgcgtgatatggaaaggatatcaaggtggggatagcagtaaaatgtgcaagggttggaaataaaatacttagttttatagccatggtgttggttctgattatgctgttatatggtggttattcgttatggaataccataatgatatatcgtggggcattttcatccaatgatttgctcaaataccagcctactggggatgggccgaatagcattacgctaggagaacttatgaagttgaacaaggatgtggttgggtggattacaatttttgatacccatattagttatcctgttgttcagggaaaagataatcaggaatatttgaacaaagatgtatttggtaaattttccttttcaggttctatctttttagattatcgaaatgcttgtgattttactgacagttattcaattatttatggtcatcatatggaatatggtgctatgtttggagatgttgttgaatttaaaaatgatgattattttcaggagcacaagacaggagcattgtttttgttagatgatacatataagattacattgtttgcgtgtgtagagactcaggaatttaataacaaaatttataatccgaccgtacaaggtaaagacaatttagatacccttttgaaatatattaaggacgaagcagttcagtatcgtgatattcctctgaatcatgatgataagattatcggaatatcaacctgcgctgaagcaggaacgaatgaacgagttgtcttgtttggacggttggataaataaaaaaacaagtaaagatggaggtactataatatgaaaaacaagatgaaacagtttgttatattgcggctacttccatgtttcgttgcacttctgctgttccagacacaggcatatgcagaagaaaaggtatattgtaccgcttctattccggtagagattaagacactaggggattcggtaccttcaggtattgagtataaagtggtaattaaatctgaaaatgaaacaaaccctatgccagatgtaaaagaggttacgattaaggataatggcaaagtagaaattggtcccatgacttatacaaaaccgggaagatataattatttcatttctcaggaagcgggtaatgcagaacattttacttatgatagtgctgtttacacggtaacagtctccattgaaaatgatggaaatggtggtttgaagtctgtaatatatgcagtggaaaatggagctacggaaaaaacagatgacgtagtcttttcgaatacatacgaagcggtaacaacatcagcagtgacgacgacagcagcaccgacagtaattttagagaaaccaacaactccaaaagaaacagtaacagtgattacaaacccaccggaaaatgcacctaaaacaggtgagagaattatttctgcaattgttgttggcatattaggtatttcaatgttggtattgagtattgttatgaacaaaaaaagaaaagcagaaaaataataaaaaatatggaagaaaggatggcattgatatgtatcctttctttttttgaccgacaaggaataaaatttaatgcttccgttttccatcataccaatcaagagtgtgttcagatatggcttctgtgaaggagttagcgacaggcatttttccaccatatttagaataccaatcatcaggatataacacatcatttttcagataagcttttgaggtgttcacatcttctgattccccttttcgaagttttctggcaacaacaacagaacggcagttgtcaatttcataggtacaggttgagagcataagtaatgagtctttttcatttacggtcacaggacactgatagagagaacgtatttctacttgatgaagaaagtctagaaattcctcattatcattaaattcaccttgcatataatcaaagccgtcgttatgggaataagttcctgagactctcataaacgaaatgattttccatttggattcatcatagatggagtcaaatatgaggataggatgctttttgtaaaattccatatctttatattttggaagttgaaaaaacatcattcgagtagattccatattgtggccatggattacaatgttttttgtaggagtctctacattacaattggcatcaatatataggcagccatttttatccgtgtctccttttaaattatggtgcagataaaaatcggagtttttttctccctgaacgacaggataatcaatattggttcccggaattctgagccagccctttgtatctttgtttgtctttaaaagctgggaaaatttcaatagcagaccgtcggaatttttatttccggaatcaaattccgaagaattatagtaagcagcatttatctttttgctttgttgctttaagtagtatggctgtattccaagataaaaaataagatatgcagcacagccaagaaaaaccagaaaggttatgccggatagcatggtatatattcggttctttttctttttgggagtattcattgcaatttctcctaatactaataataaattatgactgtaatggcgtatggttttcgccacatgtattatactagcctgactgctctcacgggcaagcccgtggggttctgattgccaagtgtagcttgtaatcgtacaccattttcaggctttggagttacaagtgtaaacctgtttgaatcagagctttcattaccaagcagtcctacgaccacattagcggtaaatttctgtcttacgacaaggaagtacaatcaatctccctaacatttagttgttaagctactttaattccactgtttagtattttgatatgattagccttaatccatgcgattagggctttttctttgtcatagcacctgccgaaatctgtaatacatttatctttgtctatatcctgcgttctgtagtcgtaacaatagagcaaaaatgatgaataccaatctctttgtaccaatgttccgtctcgaagtctgtagagcctatcagacagctttttcttaatgtagtcatctgccgtgtggtcgtactggcttgccctataattattcgaaacttctatatatgcgccgcctgtgactttgaatttcttttcaacagtagtttgaaatccagacgggcaacgattctttatagatttgccaaagcgctttttcttattaaatttgcctttgctattaacagtagtcttcttagcccgtttcatcagcttgcttgcatttttaggttctgtgacgaatgtatctccaagacttcgcagatagttagcatcttcgtttattgcaagctgtctatttactgcatttatacggcataattcagcgtgtttggctttcagcttcttgtagtgattagaatatttccaagtctttttacctttcttgatcgtgccgtcaggattgtaattctgtggattggttgcccgtctactcctgtccatagcacgataatataagcgttccttgcgttcagaagtctgtatgctgttgccacgctctgaaaggttcttcagtccgacttcagtatcagaagtataggcaactgtctgcgttcctatatcagcacctatcatgcctttaccgtatttatgtcttggattgccgaatctatcatatttaggcttagctttgccttctattgtcagatgcagatatactctgtacttacctcttatcaatcttggaacaagagtagcatagcaaggtctgtaagtatctatacaacaggcttcttctataagcgtattgacagcatcagcatccatcttgtcaggattctcaagataagacaaaacggcgttaacttcatcagactgaaacctgtcgttgacatgaatcccgaattgcatctttctaagtttgaatcgaagtttaccatcctcaacaaacatcggaataccacgatttatctgttttgctctgatacatggtaattctccgtattttgagaaatgtgtaatcttaccgttatcataaagacatttttccatacctcgccatatgtcttcggcttttgtgagagcaaacaccgcatctatactgtatttcttgcctataggaatcatagatgtcctgcaaaaatcccatgtaacattataagatttctgcatatcattgagctgattagcgagagctttaagtttgtccttatcctcagtattgccgtacatttttagtagtttacgatatttcttggtacgcatgagctggtcgtaattctttctcataagactaacaagctcgttgccagctttgcggattttatcagaaagagccacgactttcagaacatcaggataaggcatatcagtttctacaactaggatatgcctgtcagaaagtttatgatattgtttcagaagtttcttgtattctttgtcactcatgatctttctgttcctcgatgtatttctttaccgtagcttcacttatatgacctacggtagatacaaaatatcctcttgaccataatactccacaccgagagtagaactgttttaattgtggatatgccttgaacatttcaattgcactgatacttttcaatgttcttactatatcgcaaggggcaactgtctgtgggcaatctacaaatatatgtatatggtctggcatcacttccaacgctttgattatgtatccgtactgattacagatatttgcaaggatatttttgagtgtgtcatctgcaccattctgcaataccgaaaatctgaatttcggacaccagatgatatggtactgcgtcagatatttacaatgcgaagcactatgatattgttcctcgctcatcgtctgtttctcctaactgatatttttcctgaatccccctgcgcatcaggtcaaggaaggtaatagtagttccttcttcgacagaatagatacgggcaaggttttcaagctgttctttccactcggaaggaatggaaatgttaatctgtacattattactttttggtcgtgccatgattaccccctccaaatactgtgcttctaacgcatctctaaaatactcactttcattttgaactttgcactattatacatagataatatgtttactctatgttaatgtcaagtagtagaaatatagttttgcacagaaaaagcagctttcatcccacacgcaagcgtatgggttttacgccgcaatttataacttcccggcaaagtaaaaagtatttcatcagccttgttttgtatgctataatatgtgcatggtatatgatgacaaaggaaatgtacttgtacaagataagatagatgaaaattggggaggcttgacattccccggtggtcacgttaaaaaaggagaatcgtttgtagattcggtaatacgtgaagtatatgaagaaacaggattaaaaatagaaaatccaagaatttgtgggacaaaagattggccgagagaagacggctctagatacatagttgtattttataaaacaaataaattcagcggaacattaaaatcatcagacgaaggtgaagtaaaatggatgcctttagtccgataaataagaaatttacgtgcatatttctgaaagcatgggtataaaaacacataatgtaacttcagtatttgtagaataattcaactaataattgagttcaaatcagaagaagattcaactagagattgatggatattaagaagatatggtgttacgatgttttacaagaaaagcttttcgtaacaaattaagaaagaaggtaaaaaatgcttacacaacaaaaatatttattagcacttacaatttctcatattgtgagctcgttgatggtaataaatgaaatacatagtaagttacagtatcaaatgaatatttacatttttctacctgtagcaatcttaattgcaactagtatagcctataagtatgtacagtcaatgctaatatatgtagcgtcatttaccgtccttgcaatttgtagctttatattttggtcaaatgaaaccatcataaaagaagtctttttacacaaaccatcttatggatgtattatttatctagttataatgattattagcgcaatagttatgccatttacaagtcccaacagtatttttggtattagaattccacaaacggaggattatcctgaggtttggcacagagcacatgtgtttacttctgcgctattgagtctgatgatattaccaaccattatcgtcatatttcatatggaacctcgttacagctttgttttatgtaatatttttttactagtttcattgattataggaattgtttatgcagttattattgcaattccaattgagaaagcagaaaaaatgcaaattgctaaagaacttgaagaacaaataaaaaaagaacaaggatatcgttagactcaattgaaaaaaacttcttaaattaacaaagtttgtcagtgtagtatctagggggagaaagagtatttaattaaattacgtgttaagtttgaatttagtgaagaggtgtaattatgaagttgaaggtattattggctgttccttacaaaggtaatagtatatatgaactaagaaaaattctttctcaaaatgatgtagatttatatgttttcccagaaggatttttggatagtaatacattgactgaagctcttaaaattataaagaatgaacagaaatatatcattacaggttttaaagatttgcgtaataatggtcaacataaagtgcttgttattgataacggtaagattgttgatgaatatacaaaatgcattttaactaagggtgaaaaagaaaagggaaaacaacacggtgaaaaaatcacttgtgttaataccaaatttggaaaaataggcgtcctgatttgttatgagattcattttccagaagtagcaaggataatgtctttagaagatccgattatgcttataaatattattggaacaggaatgtatcatgatttacaacttgaacagtggacaacattagcaaaagctagagccattgaaaatgaagtgtatattttgggatgttcacattatgaagaagaaatacctttagcatatgtttataactctgtgggacgatgtgaattgatgaaaacaaacgagtgtggtggatttgttgttgaagttgatttggacaaaagtaatgcaaaggtaatcaattatttagaagatagagtaccaaggttatttaatgttttatctgaatgataaatagataatgaatatgatgtaggtatagaactgtaaacttcttgcttgtcggactgactaagatagagaaaataggaatggaggaagagaatatgacaggtagccacagtgcccagaagataaagaaagtgcaattgtggaggcgttgaagcattttaagatgattcagcagaaataaaaggagtttgataaatcggaagtttacagctctttcaatagcatttctagtgtgtcaaaagattttgacaaagctcaaaagccgattgtcaaagccttttgatagcgccaatatctgtatttgattaagatacaaatgcaaggaggtaaattgaatggaactcggaaatcaaattaaaaaatatcgttcggaactccaattatcacaagaccaattagccgagcacatatatgtttctcgacaaacgatttcaaattgggagaatgagaaaagttatccggatgtaaatagcttggttcttttgagtgaagtattcaagacctccattgataatttaatcaaaggagatattgaaaatatgaaagaaaaaatcaatgaacaagaaattaagaagtttaactattatggtaacattttcactgtgcatctggtaattacccttttatcggcagtcccgttattcttttggttggaacggcttgcatttattccatttggaattctttttgtaattacgatgtactgggctttgaaagtggaaaaagtgaaaaaggacaacgatattcagacttacaaagagattgtagccttttctgaaggaaaaagattggacgaaatacagaagcagcgagaaatcggaaaacgaccatatcaaaatgtactgaaaatgattgtagctgcaattgttgcaatcgtagtatgttttttgattggactattgtttcatttgcttggaaattagacacttgtttttggaataataggcataggaagggactgtgaaatttcaggcttttggcgagtctgaaagcatgcatttacactgacgacggcatttcgttaccaagacggaaaggtgcaggtcaaccacaatcacttccttggttatacaaaggacgaggaaggaaaaccggtaaagaaacagttggaggttgactttatttgtaataaaggctctaaaaagtattatattcagtccgcatatatgttacgaacggaagaaaaaatggcacaagagattcgcccatttttgaaaatcaatgattcatttaagaaaattgtaatcactttggatacaccaaaaccattttataatgacgatggcattttgatgatgaacgtgtatgacttcttactaaacatggattcattggagttataagaaagtgcaattgtggaggcgttgaagcattttaagatgtttcagcagaaataaaaagagtttgataaatcggaatttataaaggagaatattaatgaaactatttttatgttcgcacttttcaagtgtgggaagtctgataaaggaagaaattgaaaataagaaagtcgcatttattccaacagcttcactgcgtgaaggctacaccggttatgtcggctcggctcgaaaattattcaaaaagttgggagcaatcgtaactgaaattgatatttcaacggaggcttattcaacgatacagtctgtttttgaagaagcagatgtgatatattttaccggcggaaattctt

SEQ ID NO: 12671 - DNA, 218 bp, Unknown
  gut microbiota DNA sequence
ccaaatcaaaaatgggctacagatgtaactgagtttaaagttcctggtgataaaaagaaaatatatttgagcgccatcatagatttatatgacagatatccagtagcatatgtaattagtggacgaaatgataatcaattagtttttaaaacttttgataaagcgattatggctaatcctgatgccaagcctatttttcactctgatcgtggctttca

SEQ ID NO: 12672 - DNA, 580 bp, Unknown
  gut microbiota DNA sequence
gtcctccgttcgtcaatacataaatagattcatatattctcagtgcgcctgttacattcataacaagaacaaaaaatatctgtggtgatgctaccggaataattatcttaaaaaagcgctgtactacattcgcgccatcaatgctggcagcctctaaaagcccttgatctacattctgtaatcctgctaatatcaaaagcattgacataccagagtttttccagatatccaaaatcataacagaaaatttagaataagcctgattattcaaccatccaattttagcgattccaagttgtcccagataatagttgataacccctgcatctgtctgaaaaaaggcttgccagatgattgccacaaacgttagtgctactaacgatggaaaaaaataaacagacctaaaaaatacggttatttttttgggcagaatgttgtcaaccagcacagcaagaataagtcctattgctgtatttcccagtgaacaacatatggtgtaccataaagtatttttcagagcagttaaagatctgacatctgcaaatatttttttataattctccattcctgcaaacgtact

SEQ ID NO: 12673 - DNA, 2212 bp, Unknown
  gut microbiota DNA sequence
cacaatgagattgtctccgggcctgatgtcaaatatttttctggcttttgccggaatcacaatctgacctttctcgcctacttttaccatgccaaaaatgtgttttcctttcggcgggacttccaacccaagagaatcctttttttcataattgatcaggtcatccaccgtcacgccaaagatatctgcgagccttttgcacctttcgatatccggcagggattccccggtttcccttagttaaaaatattactcttgttgattactcaactcttccaataaatcggtaatatatctcaatttcctgtattctttcgttatcctcattcgttgttgcttcatgtatgaggattttttctatcatggcatttaataatggtgctgtcagttcctttggtacggaatattccttgattaactcaatccacttttcagcacctatcatatcctgttccattttacttagttcttctcttaggcttgttatctgctgttccagttctatctgttctttttggtacttgctggacaacatcacaaaatttcgctctgttatcttctcacaggctctatcttcatacattttcgcaaataaacggtcaatctcattttgtctgttctcggctttcttcaatgtacttgcctttttcttcttttcccgtattctctctgcattgccagctttctgtatcttgttcaataccttttcttcgtcctgctgtactgccttagcccaatactgcaagcgttccaatacggcttgatacagcacatcataacgaatgtagtgcatagaacaattacctttgccaaactgcccgtagtaactgcaagcataataactgtaaggcgttttatttgtcttattcgttccaaatctcatagaccaaccacaatccgcacacttgacaagccctgcaaaaatcggcgttgccttttcctttgtctgtctgcgtcttgattttatctgctcctgcacacgatagaacacttccttgtcaataatcggctcgtgagtgttttctactcgaaaccattcactttcgggcttacgcactttctttttgctcttgaacgataccgtagactgcatattgtgaacactgtttccgatataaacctcacttttcaatatcgccttgacatgagcaatcgtccactcataacgcttactttcgggttttccctcaaagatatgtgcaaaagtaccgtatcttgtaaaatttagccatgacgctgtcggaactttttctgctcttaactgctttgtgatttttgcacttccgtaaccttgataggctagggaaaagattttttcaataatccattttgtttcatcatcaaccaacagttttcctttgatgtcagggtgtttcttatatcctaacggagcataagcaccgtaatgagccccctccgcaaactttgtcttaaatgctgatttgactttacggcttgtatctcttgccacccattcattgatgatgttcttaaatggtgcaatctcactttcgcctttttcgctgtctacaccgtcatcaatcgctatgtagcggacattatgactagggaaatacaattctgtatattgtcctgtcataatataatttctgccaagacgggaaaggtctttcgttacaacacagttgatttttcctgcctctatatcctcaatcattctttgaaaactcggtctgtcaaaatttgttcccgaccagccgtcatcaatatattcatcaatgacattcaaatgatgttcttttgcatataaacgcaacatacttctctgtgtggtaatgctggaactttcgccctgtaattcatcatctcggcttaacctaagataaagtgcagtattgtaaatctgttgtttcattgtcagttatcctcctttataactaacccgtgtttacaatacctgcttgcaagtaaagtataacatgggtactttttgtcattcaatctatttcttacaactgcaccgattttatgcgattgtctgctttgctttttccagcatgacatcagttagaagttcttccattgttttgcccttttcggaaaaatgctcttttactacaatctttgtctttcctctgttgccaatgccacacttgccatttttcttttgaattgtttttacagcattatcaataacacataccccctttctgtaaaatctttctaagcaattcaacggcttttgtcatag

SEQ ID NO: 12674 - DNA, 179 bp, Unknown
  gut microbiota DNA sequence
gccacattgggactgagacacggcccagactcctacgggaggcagcagtggggaatattgcacaatggaggaaactctgatgcagcgacgccgcgtgaaggatgaagtatttcggtatgtaaacttctatcagcagggaagaaaatgacggtacctgactaagaagccccggctaacta

SEQ ID NO: 12675 - DNA, 446 bp, Unknown
  gut microbiota DNA sequence
cgggatgaagacttttgtgactgagtggcggacgggtgagtaacgcgtgggtaacctgccttatacagggggatagcagttggaaacgactggtaataccgcataagcgcacagtaccgcatggtacagtgtgaaaaactccggtggtataagatggacccgcgtctgattagctagttggcagggtaacggcctaccaaggcgacgatcagtagccgacctgagagggtgaccggccacattgggactgagacacggcccaaactcctacgggaggcagcagtggggaatattgcacaatggaggaaactctgatgcagcgacgccgcgtgagtgaagaagtatttcggtatgtaaagctctatcagcagggaagataatgacggtacctgactaagaagcaccggctaaatacgtgccagcagccgcggtaatacgtatggtgc

SEQ ID NO: 12676 - DNA, 304 bp, Unknown
  gut microbiota DNA sequence
gtgaagaagtatttcggtatgtaaagctctatcagcagggaagaaaatgacggtacctgactaagaagccccggctaactacgtgccagcagccgcggtaatacgtagggggcaagcgttatccggatttactgggtgtaaagggagcgtagacggcacggcaagccagatgtgaaagcccggggctcaaccccgggactgcatttggaactgctgagctagagtgtcggagaggcaagtggaattcctagtgtagcggtgaaatgcgtagatattaggaggaacaccagtggcgaaggcggct

SEQ ID NO: 12677 - DNA, 144 bp, Unknown
  gut microbiota DNA sequence
gagacaagtctgaagtgaaagcccggggctcaaccccgggactgctttggaaactgccttgctagagtgctggagaggtaagtggaattcctagtgtagcggtgaaatgcgtagatattaggaggaacaccagtggcgaaggcg

SEQ ID NO: 12678 - DNA, 139 bp, Unknown
  gut microbiota DNA sequence
aatggcaagtctgatgtgaaaggccggggctcaaccccgggactgcattggaaactgtcaatctagagtaccggaggggtaagtggaattcctagtgtagcggtgaaatgcgtagatattaggaggaacaccagtggcg

SEQ ID NO: 12679 - DNA, 224 bp, Unknown
  gut microbiota DNA sequence
agtaagccgccttcgccaccggtgttcctcctaatatctacgcatttcaccgctacactaggaattccacttacctctcctgcactccagccgcacagtttcaaaagcagtcccggggttaagccccgggctttcacttctgacttgcacagccacctacgctccctttacacccagtaaatccggataacgcttgcaccatacgtattaccgcggctgctggc

SEQ ID NO: 12680 - DNA, 153 bp, Unknown
  gut microbiota DNA sequence
aatccggataacgcttgcaccatacgtattaccgcggctgctggcacgtatttagccggtgcttcttagtcaggtaccgtcattttcttccctgctgatagagctttacataccgaaatacttcttcgctcacgcggcgtcgctgcatcaggg

SEQ ID NO: 12681 - DNA, 169323 bp, Unknown
  gut microbiota DNA sequence
ttggcaacgacaaaaaagcccttaactatggttattaaccacagctaagggcttagtttataatatggaatttgttcagagccaagctccgaactttagtctgcaagccacctgttaattgttccgttacccataaaccactggataacaagaataatggcacttgctatgactgttatcaatttgttatcaaaagactaatcgaaatcgctgaaacccgcataaacactggcttttttaagcaactcgatttattcaaactctatagttccaggtggcttacttgtcaaatcgtacattactctattgaccccgcgcacctcgtttatgattctgctcattacctttgtcaatacttcgtaaggtatttctgcagcttctgctgtcatgaaatctacagtatttactgcacgaagtgcaatggcataatcatatgttctttcgtcgcccattacacctacgctacgcatatttgtaagtgctgcaaaatactgtcctattgttttatccaatccggcatttgcaatttcttcacgatagattgcatctgcatcctgtaccattttaactttttcggctgttacttcaccgatgatacggattccaagtcccggacctgggaaaggctgacggtatactaaatattcaggtatacccatttctaagccggcttttcttacttcgtccttaaataaatcacgaagtggttcgattatttccttaaaatctacacagtcaggtaatccacctacgttgtgatgtgacttaattactgctgattcgccacctaaaccactttcaacaacgtcaggataaattgttccctgtacaaggaagtcaactgctccgattttctttgcttcttcttcaaaaactctgataaattcttcaccaattattttacgcttctgttcaggttcttttactcctgctaacttgctgtagtaacgttcctgtgcgtttacacggacaaagtttaagtcatatggaccgtcaggaccgaatactgcttctacttcgtcaccttcgtttttacgaagtaagccatggtctacgaatacacatgtaagctgttttccaatggcttttgaaagcattactgctgcaactgatgaatctacaccacctgacaatgcacataaaaccttaccatcgccaactttttcacggattgccttaattgattcttctacaaatgaatccattctccagtctcctgaacactggcaaattccacgaacgaagttgtataacatctttgttccttcctgtgtgtgaagtacttctggatggaactgtattgcataaagtttcttttcttcgttttctgctgatgcacaagggcaatcctttgtgtgtgatgagatttcaaatcccggtgccacctgtgatatataatcaaaatgactcatccagcaaactgtttttggtgaaacatctgcaaaaatctttgactgagtcttgtctattaatacttctgtcttaccatattcacgtacatctgcacgttctacttttccgcctaacacatgcatcataagctgtgctccgtagcaaagtcctaacactggaacgcctaattcaaataattcttttgaatatgttggagaatcggcttcataacaactatttggtccacctgttaagatgataccctttgggttcattgctttgattttttcaatgtctgttttgtaagaatatatttcacaatatacattacattcacgaacacgtcttgcaaccaactggttatactgaccaccaaagtcaagaacgattactaattctttcttcaatgtatttcctcctaaaatggtgcctgcaccatactactgtaaaaggtaattgctatataaaatctaattacctgctaatttttaattctaccctatttttctatttaaaacaagtacactgtactaacttttataattcccataacttataacctgactgctctctatatacaaaatatttttaaacttatacatctttcagactcataatatactttcacacgttcctaaattttaatatcatttcaagtacttataacgaagtaagagcacctgccctacttcctcgtatgacagatgctccctatttcaataccctaactttacaattttgttaacaaccgcaggtactttttattaaatgaatcttctcgggaatttcttctgtacactattcgtttcgatcgcattccgaatatctgtatacctagtctattccttactatttgtcctgcttcgacttcactatctaccttaaccataagatgttattcttcattgaattttcgttttgaataattcctatcctatccaattctttgtaacacctcatccaataatcactacttaaacaatcttccgttgattgccatgttagcagatatcactgggtaaaactcctttcaccactaaacttagatactgttgttattaggttgacatctaataacaagtgggtcgttaacttctttgtagaagtctttttaggtatttaatacgtttttgtttgtatgttcaatatagcacaatttttccttattttaaagggggttcaagcacttttttcatctttataaacattgcataaatgcccttttatttaaacatttttatgaatcgtttttttataaaaaatgactattgtctctctaacatctgcttaacatacttgccggtataacttgttggatgttctgcaacctgctcaggtgttcctgcaactacaactgttccaccacggtcaccaccgtcaggtcccatatcaattatataatctgccacttttattacgtccagattatgctcaataaccactactgtattaccttcatctgttaatctgtgaagaatctctactaatttatgcacatcagcaaaatgaagacctgttgttggttcatccaatacatatattgtttttcctgtgcttctcttacttaattctgttgcaagcttaattctctgtgcttcaccacccgacaatgttgttgacggctgtcctaattttaaataaccaagacctacatcatacaatgtctgtaccttgttaagaattctaggcacattcttaaagaaatccaatgcttcttccactgtcatttcaagaacatcataaatagtcttacctttgtagtgtacttccagtgtttccctgttgtaacgctttccgccacaaacctcacatggaacatatacatcaggaagaaaatgcatttcaacttttaaaattccgtcacctgaacacgcttcacaacgaccgccttttacattaaaactaaatctgccttttttatatcctctttcctttgcatcagttgttgcagcaaaaagatctcttatcatatcaaacattccggtatatgttgccgggtttgaacgtggagttctgcctattggtgactgatcaatatttattaccttatcaagctgctccattccctctatcttcttgcattttccgggaatggttcttgccctgttcagtctttttgcaagactcttataaagtatctcattaaccagtgagctttttcccgagcctgaaactcctgttacacaggtaagcactcctataggaattttcacatcaatgttcttaaggttattttcctttgcacctacaacctttaaaaatccctttggttttctacgtgttgttggaacaggtattttaatttctccgcttaaatattttcctgtaattgaattaggatttttcattatatcctctgcagttcctgtagcaataacctgtccaccgtgttctcctgctcccggacctatgtcaaccacataatctgctgcacgcattgtatcctcatcatgttcaactacaatcaaagtatttcccaaatctcttaaatgcttcaacgttgcaagaagcttatcattatcattctgatgcaatccaatacttggctcatccattatataagctacaccaaccaagcctgaacctatctgagttgccaaacgtatacgctgagcctctccacctgacaaagttcccgtagctcttgaaagactaagataatcaagtccaacgtcaactaagaattgaagacgtcctttaatttctttcaaaatctcttttcctatctttagctgagtttcagtcaattgcaattcatccaaatactggcgcaaatctcttacagacatttctgtcatttcataaatattcttatctccaatagttacagccaacgattcctttttaagtctctgtccgtggcatgttgcacatggcgtaaatctcatatatgtttcatattctgcctttgttgactctgcgcttgtttcacgatatcgtctttctacatttttaattaatccttcaaaagcaatatcataaactccaatacctctttgccccttgtatcttacggctactttttcaccatttgttccataaatcaaaatatcatgtatctcttttgtataatcctcaaaaggtgtatcaagagaaaaattgtattttaaagccaatgcctgaagtattgcattactaaaactctttccgtcatttgcactctgccaccccaatactacaattgctccctgattaatgcttaaactcttatcaggaataataaggtcttcgtcaaattccatcttgtatcccaaaccataacagtcaggacaagccccaaaaggattattaaaagaaaaacttctaggctgtacttcgtcaatacttattccacagtcagggcaggcaaaattctgactaaaagtcatctcttccccaccaataacatctactatcattagtccgttgccaagctttaaagcattttcaacagaatcagtaagacgcttttcaattccttcacgaatgctaagtcggtctataataatttcgatactgtgctttatgtttttttctaacttaatttcttcagttagttcatacatattgccatcaactcttactcgcaaatagccacttttcttagcactttcaaatactttttcgtgacgtcctttctttcctcttacaacaggtgccaatatctgaaacttagtacgttcttccagcataagaatacgatctaccatttcatcaactgtctgtttctttatttcacgtccgcattttggacaatgtggaatacctgctcttgcataaagcaatctcatataatcgtatatttctgttactgttccaactgttgaacgtggattcttgtttgttgatttctgatcaattgaaatagccggtggtaatccttcaatactttcaacctgtggtttttccatctgccctaagaactgtcttgcataggaagataatgattccatatatcttctctgtccttctgcataaatagtgtcaaaagcaagggatgacttacctgaaccgcttaaacctgttactaccgtaaattcatctcttggtatatcaatatcaatatttttcaaattgtgctcatttgcaccttttatatgaatatattttttattgtctttcattttattttcctatctttttctatctttgttatttggttattttatatcttttccaaataaattccgttatagatttttagttatcttcctgcaactttcttaattccgccaacttatctcgcatttcaatagctgtttcaaaatcaagttctgctgcagctctttccattttcttcttaaccttttcgataagttttttaagttccttataatccattgattcaggatctttctcaacgtcgctaatctttctgtccacttctttggaaatgctaataaggtctcgaacagccttcttaatagttgttggagtaatgccgtgctcattattgtatttctgctgaatctctctacgtctgttagtttccgttaaggctttatccattgaatcagtaatattgtcagcatacattattacgtggccttctgcatttcttgcagctcgtccaatagtctgaataagtgatgtttctgaacgtaaaaacccttccttgtcagcatccaatattgcaactaaagcaatttccggtatgtccaaaccttctcttaaaaggttaataccaaccaaaacatcaaaaacatccaatcgcatatctctgataatctgagttctctctaacgtatctatatctgaatgaaggtatttaaccctaattcccacatcgcgcatataatctgtcaaatcctcagccatacgcttcgtcaaagttgttaccaaaactttattcttcttggcaacttccttgttaatctcagttataaggtcatcaatctgtccttcaaccggtcttacttcaacttccggatcaagcaatcctgtaggtcttataatctgctctgcacgtcctaattcatgttcctgttcataaacattaggcgtagctgacacaaacatcatctggtcaatcatgctttcaaattcttcaaaattaaggggtctgttatccttcgccgaaggcagtctgaacccataatcaactaaagtagactttcttgactggtcaccggcatacattcctctaatctgtggaatcgtaatatgagactcatctactattatcaagaaatcatctccgaaatattccattaatgtatgaggtgtggctcccggctccaaacctgccatatgtcttgaatagttctctattcctgaacaaaaacctgtttctcttagcatttccatatcaaaattagttcgttctgcaatacgctgtgcctctattaatttgtcttctgatttaaaatatgctacctgttcctctaactctttctctatatccttaatggcgcgctccatcttttcaggtggcacaacataatgagaattagggaatattgctacatgttcaagctcgttcttaatctgacccgttaaagcatcaatctctgaaattctctcgatttcatcatcaaaaaattcaactctaattgcactatccgtatacgaagcaggaaatatttccagattctctccacgaaccctgaaagttccacgtttaaagtccatatcatttctgtcatactgtatttcaataagcttatgaataatctcatctctatctctaatggtattcggtcttaaagacacaaccatgttcttgtaatctattgggtctcccaaaccatatatacatgaaactgaagaaataataattacatctttacgctccattaaagccattgttgccgaatgacgtaacttatctatttcatcattaattgatgaatccttctcaatatatgtgtctgtgcttggaacataagcctccggctgataataatcgtagtaggaaacaaaatattccacagcattattaggaaaaaactccttaaactcaccgtaaagctgagctgccaaagtcttattatgagcaataataagtgtaggtttatttaattgttcaataacattcgccattgtaaaagtcttacctgaacctgttacaccaagcaaagtctggaattgttttcctttcttaaaaccttcaactaactcttcaatagcctgcggctggtccccggtaggcttatactctgaaactaattcaaaatgatccatatgatttctcccaattagctctaatcaatatttgagtattttcaaacccaaatcatttatcaactacttttcttagtattgttacttgtcaagtatatcattcaaaagaacaaaagtacagaacaaaatcgaatgtttgttctgtacttttgttattcttttattattcctctattaacttttcatattcgtccgtaggtattggctttgagaaataatatccctgaatcacttctgctccaattgattttaagaagttaacctgtttttctgactcaacaccttctactactaccgaaatatttaatttcttggacaattctacaatagactcaacaattatgttgtttctttcattttcattatccaaatttcgcataaacgccatatccaatttaagtacgtctataggtgcatcctttaacatattaagtgatgaatatccgcttccgaaatcatccatcaaaatcttaaagccttcttcctgcaattcacttattattgaatatattacctgcttttcctcagtatatactgtttccgtaatttcaagttgcaaatcctttggttccaaattatatttttcaaccagttccaaaagatttgataccagattagttctatagaaatttactcttgaaacattaacagaaataggaagtacacttccgtttttgtcccttttttaatacatccgtctctataattgcatgttatattatagcattttaacgtcacgataacaatgtgaaacccagcctattaatatgatttttagacaaataaataaccaaaactttcgtaaaaactttgtctattttgacactttacaaatttaattttttcataagcatttgtcaaaataaaaaggaacatttttcatttacccttttacttattttatacagttattcaaagcatagaaaaagaccatacatatatcttcgtttgcaagatatatgtatggtctttctgttcattatttcattaattccataattgtttcttttgccttttcaagctgtgtatcgcttgttgcattttcttccaattctgcttcaacatcaggagttattccctttccgtgaatgtttttgccacttggagtataataatcctgaactgtaagttttaccgctgagccgtcgcttaatggaagaattgtctgtacaattcctttaccaaatgactgtgtgcctacgatttttcctgcattaaagtcctgaattgcacctgcaaaaatttctgatgcactggcgctgtccttattctgcaaaacaaccattggcatttcaaggcacttgctgtctgaagtctgcttttcctcatttccatatttatccttagttgaaaccaaatttccttcaggaagtatttcatcaagcatcttgcagactgtctcatataatccaccaggattgcttctaacatcaaagataacagccttcattccctgcttcttcaagtcatccaatgctttcgtaaactggtcataagtaacttcttcaaactgacttatctgtatataaccaatctttttcttcttatcaagcatcttatattcaacagtaggctcattaacctgatctcttgttattgtaaagtcaatgtatttcttttcggactctctgtaaacagttatgtcaactgttgttcctttttcgcccttcatttcagtaacaacattgttaatgtcaacaccagttacttctttgccctttactttataaataatatctccgttctttactcctgcctttgcagccggtgcatcggcaaaagccttaactaccgtaattattcctgtttcagcattctgagataccaaagcacctattccgctgtaagttcctgacgtctgttccatcattttccggtattcttctgccgtgtaataaacagaatacggatcatttaagccttccaacaatcctttgtaaattccatcttccaagtcagattcattaaccttatttaagaacttagcatctataagtttatttatataatcaagcttttgtgatgttttttcactgattgtttttccggatgtgttctggtttgcaaaatacaaacctgttccaacaccacctaccacaactgccatggcaagcattccaaagaagaatccaagtaaaaaacggttcttattctttttcatcatgactccttaattcaagtttattttaaataatcccaaggattaacatatgccccgttcttacgtactgcaaaatgtaaatggttaccctgtgatgctcctgtatttcctacaagtccaatgctctgtcctgcgcttacctttgttcctgctgaaactaaaagtgcagacatatgcatatatacactatatacaccattgccgtgattaataccaatccagttgcctgctgttgtactataattagcccactctactgtacctgaacctgctgcaacaatagtggttcctgctgatgccggaatatcaatacccttatgaaattcagaacctctatatccatatcctgaagatatagttgtatgtcccggaagtggccatgtaaatccaccgcctgaaactgttccactacttcctgagtttccactgtttgaagtatctgttgtattgcttcctgtatttgatgatgtattgcttgtactactatttgaactagctgcctgctgtttctttgctaccgcctcacgtcttgctttttccgctgcggccttacttgcctgctcagcaactgcctggtttttgctctgttcttcaacagatgcaactctcttttcctgtgcactgatttctgcttccaattcatcagatgtggcctcattatgtgctatcaaatcttcataatttttaagttcctgctgctttgattcagaaagattagtaagcttagtctggtcactcttctgctgtgcctgtattgtctgaagattctttttctcagttacaagagtactctttgcagaagctattttctctttagtcttcttcatcttattaagcatatctctgtcatactgtgataactctgttatgtactctgccttatttaagaaatcagttatgctctttgaattaaaaatcaaatctatcatctgagtatcaccattctcatacatatatttgattctaagcttcatatcttcatactgctcatttatgctaacctgagcattgttcaattccttctgagtcttagatatcttgtcttctgtttttgataatttctgattagtcttgtacatctctgtagccaaattagttaacttcttatcaactgactgaatgtactcctgtgcatcagacttagatttctgtagtttattattttcatcctgagcctgttgcttctgattctgcaaatctgaaagtttattcttctcatcgttaactgttccaaacgcattaattggaatagcagtaactgccaatgctgccacgagaacaaaacttaatactttagattttctcattactttctccttatctctttccctgttaactcaattaactttatacctttaagtgctttctcattgacacaattgatcctattaaaccaatacctgctccaattccaagtcctaatggaacaagcaccaaaaaaatctgatgaactgacgcaaaaggaatactgttgccaagtacaccaaatttagtcataataagatcaattaatctgtcataaacaagtcttattataacaagcggaattattgaacctaataaaccgattgttacaccttctataataaatggtgctcttacaaaactattagttgctccaataagcttcataattttaatctcgtgtcttcttactgaaataccaatcataaccgtgttgcttataaggaaaataccaacaccaagcaaaataataatcaatgcaatagacgcatatcctaacattttgccaaagtttgtaagaaactctcttgttgggtttgaatacttaacctgtcttacaccctgaaccttttccattgctgtggcaaaagctttctggtcattaatactatttaagtaaactgtgtaagatgctgaattagccaatgggttttcctttgaaaatccctctgccaaatcaggattatctttaaaataattctttttgaaaccttcccaagcttcctctgctgatgtatattcgtagctctttacacgggaatctgacttaattgtttttccaatatcatctattccctgctggcttaacccttcgttaaagaatattgttaccccaacctgttgctcaactttcttttccataaagttaacattaataataattgtaaaaattacacctattaaaaatatacacgcagcaatagttcctattgatgcaagggaaaacagtttgtttctctttatgtttacaaaaccctgttttaaacagtagtttgctgttctagtattcatctgtctgttcctcccctttgctgtcctctacttttacacctttcttcatagttatgacacgcttgttcatagccttaactatttccatgttatgtgtaacaacaataactgttgttccctgctcattaattttttcaagcagtttcataatctcccatgaattttcagggtcaaggtttcctgtaggttcatcagccaaaatatactgtggtttattaacaagtgctcttgcaagggcaactctctgctgctcaccacctgacaattctgacggattggaacgatatttttctgaaagtcccaccaaagataatactcttgccacattctttttaatctctcttggtgacgcccctattactctctgtgcaaaagcaatatttgagtaaacatctctatcctgtaacaatctgaaatcctgaaaaacaactccaacctttctcctatacttagctgttcctcttgatttaagttttgataaattaacatcatctaccactattgttccctctgtgggatttaactctttaagaagcagtttgataaatgttgactttcctgagccactggctccaacaacaaatacaaactctccttcctctatttcaagatttaaattgcttaacgccggtgcaccattgccataagacttacttacaccttctattttaatcattatatgcctcctaatattctgctctaaatagaaatatataacacaaatgtgtttttttgtgggtgggcaaagcacgtaacaatccttgtaataaaattttaatatatttccgaattgaatttgctccactagcacaatatgaaggtccacagggaccttcatattgctacattttaactatttattttctaaaaatctgtgttatccatgtatttcatgtacttaacaaccataagggcaatcttaaatgtaattgcatcctcaaatactcttaaatctagtcctgtactcttctgcaacttgtccagtctgtatactaaagtatttctgtgaatatatagctgtcttgatgtttcagatacattcaagctgttttcaaagaacttattaattgttgtcaatgtttcttcgtcaaattcatccggtgactttccttcaaaaatctcgctaatgaacatcttgcaaagtggaattggtaactgataaattaatcttccgattccaagattattgtaagcaattacgttcttagtgctaaagaaaatctttcctacatcaagggccattcttgcttccttgtatgaacgtgatacttccttgatctccttaacaatagttccgtatgctacagtagccttaaccattgcctctgtgttaagcatgtccacaattgtccttgctatcttttcaatatcttcatatccctgtttttcgtctaactccttaacaagaataatgctcttttcatctactgctgtaataaagtctttcttattacctgagaacaatgttctaactgtttctaaagcaacactgtccttttcgttctttgtttcaataatacagacacatcttcttgcatccacatcaatgtacaacttctttgatctattataaatatcaacaaggagtagattgtctaataataagtttttgataaaattgtctttatcaaatctttctttatatgcaacaagcagattctgaatctggaaggcagccatctttcctaccataaacacgtcatcgcttgttccctgagctatcagaatcagttctaactggctttcatcataaaccttaaagaactggtattcctgtactgactggctgtctgccggagaattaacaaagctcattatagcatgtccaaactcatctcctaactgggaagtactggcaataatctttccgtctgtatctgccacatgtaaatctacccttgaaatactttttattccttctattgtgttctgtaaaatctgatttgatatcataggccactccttgttctaaaaaattcgtacattctgtcaaactatattttaaaccagtttatgacaaaaaacaagagaaaagagctaatcaatagtacttttatcttgtaatttttgtcaaaataaccaactattttacagcatcaaaaaaatcctttataatatcgtatgatttttttacccccactcttgacaaagagcctaataaaaactccaaaggaatttcttattaagtaaaaaagactgcccaaatcgggcagtcttttgataaatatatatattagtttgtgataactttttctgtatccttatcaaagatgtgaagttttgtaagatccattgccataacaacttcatcaccaggtctagctgttgtacgagcattaactcttgctgtacaatcgaatccttcaaggtcaaagtataagtatacttcagcaccaagtaattcgtaaattctgattgttgtcttaaatgcactatcaggtgacatttcaatgaaactttcttcatcatgaatatcttccggtctgatacccataacaactgtcttaccaacataaccaccgtcaataagccttctagcctgttcagccggtactgtaatgtatgttctagcctgtccaatgtggagcttaatgtcagctccttcctgttcaacttctgcatcgatgaagttcatctgtggtgaacccataaatcctgctacgaataagttaaccggcttatcatataagttcttaggtgaatctacctgctgtacaacaccatccttcataactacgattcttgtaccaagtgtcatagcttctgtctggtcatgcgttacgtagatgattgttgcgcctaatctcttatgaatcttagcgatttccacacgcatctgtactcttaatttagcatccaagtttgaaagaggttcatccataaggaataccttagggttacgaacgatagcacgtcccatagcaactctctgtctctgaccacctgataaagccttaggcttacgatcaagtaactgttcaaggtcaagaatcttagctgcatccttaactaatctttcctgttcagccttaggtacttttcttaacttaaggccaaatgccatattatcatatactgtcatatgtggatataaagcgtagttctggaataccattgcgatatctctatcctttggttcaacatcgtttactaacttatctccgatgtataattctcctgatgaaatttcttcaagacctgcaatcattctaagtgttgttgacttaccacaaccagatggtcctacgaagatgataaattctttatccttgatttcaaggttaaaatcctttactgcacagaatccgtttggatataccttgcagatatttcttaatgataaacttgccattttaaaaattcctcctagtattgaaatagtttctctatctcgcgtctgattgtattctaaatcactgacactaaaaatgctatattgtaaataaacaaaataacaaaaaaatctttgttaatattgcatacagcccctattatttatttaaaaatatgttactttcgccaatgattatacggtgttctttgagcaatctgccgatagctcttttaaattcacttttgctcatctgaaaatcttctctaatcacctcaggtttagccttatctgtatatcctaactgaccaccgttattctcaatgtatttatatattttttcggcatcttcgtccatttgtaaatatgctttctttctaagtgaaaggtctaatttgccatcaggtcttacactttttactcttgcctgaatctgctgaccgatttctaatcttgttgtaagctctttcttctgtacaagtccgtgatacttattatctacagcaacaaaaacaccgtactcaggattgtagttataaactgttcctattacaacatcatcaggttcatatgttgaggtacattttaagaacttatacgccttcattgttgcacataatctgttacttttgtccaaatatactcctactaataccttgtcccctgacttaattgaaactgtctgctccttgtatggcaaaaataagtctttttctaagccccagtcaagaaatgcaccattctttgaaacttccttaactgtcaaaactgctgtttcgtctaattcaactaaaggcttgtttactgttgctataagtctgtcctgtgaatctctgtaaataaatacctttacttcatcaccaacatttgctccttcaggaacctgcttctttggaagaagcacctgttcttcctctgtgccaagatatgcaccaaaatctaccattcttactatttctaatttttgtgttcttcctaattccattttttgtctctccgttctattttttatagtttacctgatattagcacttttataaaaaagaggtcagactttaacgccataacctcttttatcattacataagcattattcttgtaagtgtctctccactttgattttcgaagctaatacctattccattttcttcgctataaagatatggtgtaataatttcaccttccatagcttctttattatacacaatatctacctcatggcaaggaaaatttgttggtaaaaattcttcagccgcccttaaataattagcattgttcatatgaccattgctgtctatgtaagtttttaaaaccttaaacgactctaatttggttctttcactactaaacctaatctttcttgacgcctttatattatcaaatatcggttccggtttataaacacttgaatcctcttcagtaattcttaaaggttttcgtgtctgaatatcaataagaacccagaggctgtctgcctgaacaagataatctccattttcatcttttatgaaatactgtcttgaagcaaacatgctgctaaactttgaaggagatgtgcctattgttattttctgtccaaacataataggtctgttaactataactttgtatgcaacaagtacccacgccctggcctctcttttcatataacttacgccatgaccaatatcttctgaatgaaaggtggagcaatcctgcaaaagatttaatatctcatgcattggaacttttccatttctgtctgttctgctgtaacttactgttgtctcatatgaaaacatttattgcccctctttcttctattatttacttagatgttgttgtttccggtacagttgttgtctcaggtgccttagttgttgtctccggtgccttagttgttgtttccggtaccttagttgtaggctgtgttgtaacaggctttgttgtaggctgtgttgtaacaggctttgttgtaggctgctgtgcaacagcttctactacaactttaagtgttgctgttcttgcagtgtatgcctgatttgagtactgtgccttatatgttaatgtatatgttccaggtttctttgtatcaacctttcctgtaactgtaacgctgttcttaatatttaaagcattacccttgtaatccttaactgaagctacataattcaaaggattaaatgcgctgttctgtttaacctttacagttgtattcttcattgtaagacttaccttgtggtcttttacaacgtatttaatagtcttctttgctgtcttcttatttgtgcccgtaactttatatgtaatgtaatatttgcccttgtttgcaaacttaaccacaccattcttaatcttaactttcttcttattatacttaacagtaacttttattttcgaagtaatattcttgcctgctgctgtctttgcagtaacattagataaaacattaactgaactgtttaaagctacatcaggattctttactgcacctgaaataataggtttctttgtatctactaccttaaattttaaaatcttagtctttgaatttcctaagctgtcttttactttaaacttaatcttatactttcctaatttagatgttttaatcttaccaactgtagtaatctttacattttttttggtaagaacgttgcctgctttgtcttttactgtaattaagtcagacaatttaacttttgttccatactcaatagtctttacttttgcagtaattacaggcttattgctcttgtatggattcttaggatcaggatcagttgggtcccaatctgtaaacttaccgtttgtaataggtgtaaatgaaggtctcttaataggatcatccttctttgttcctctaaaaattataacctttgttcctaatgcacaatgatcataaatccacttagaatctttacataaaagtcttacacaaccgtgtgatgccttctgtcccattacattgtatgccctaactgacattgttgatttatcaccattcttgtaataccaaactgaatggaataagatgctgtctgtaattcttgtacaatactgtgcataacaattacctatcatctcatgccatctgtatttaacaggtgtataaaatgttcctataggtgtttcattacttggtgaacaaatcatagcctttattgcttttccgtttttgtaaactgttgtacagtttgttcctaagttaactttaataacgtaacctttgctttctttagcttctgtcttaactgttgctgtgcctgaaataccaaacgccataacaacaatcattaatactgctactaattttgatgtgattttcttcatatcattactcctttgcttattttgaagccctttacggcttattccctttaacagaattcgcccttattatactattttatttggcaatatacaatcacaaacacctatttagttgtttttcataagtggttcatatataatgtacttaaacgtttttattttacaaaaatatcgtatttacttaaaatttatattttataatctaagaaaatgcacataatattatggaggcttttatgctcaaaaacaaatttaaactttttatttttatgctggcaattggtttcgttctcataacattggacgttaatgttacaactccatttaaatatccgcataaatataacaattcaggttcggtaatcggagaatttcagtattataacattgcatctaactataatgcctggtgcgattacaaagttattaacacaagttcagaaaaagctgatgaaaattcacattataatacaacaaatgataatagctcaaccaattcatcaacaaacaccggtcagagcacggcaaaagttattgaccacgtttattttggaaatatttcagtagatattttcagtgatgctttaggttttcttcttatatttattgcatgcttaaacttagctaaagttaataaccgtttcaaatacggttcagttacgacattgttcgccttaattttacacattgttattttggcacttccgtttttccttaacggaatagttctatgcaatacagctctcgttttgggactggcttatcttggaagcaatattataactacttttatgttcagtagcggacttcttaagatgtgcacagacatttgctgtagagatgagagaaaatggtgcaaaatgacttggtacgttacttttgttctacagattttagtcacatttgttttctggataggttcagatttcaatatgctcctggctgtgggcagattctttgaaggcgtacttgtatttatggtaattgttttttggattatcctgaaacgtacatattattatttagaaaggacatggcttaattatgaaaaacaaaattaatttaggaacaaagtttattgcatttcttgctctttttatgtttagcattttggcaattaatgtttctgccaaagcagggcaaatgaaaatgcatgccatttatgttgacaggggtgatgccattgttatcgaaagtaacggacattttatgcttgtggattcaggtatttcacaaacatctgaaaaggtacttgcatatcttaaatctttaaacattccggataaaaaaattgactacgttatatcaacccaccctgacggggaccatgttggcggttttcctgctgttttcaaggaatatgaaatcggtcaggtaatttactcaccatgtacaaaaccaagcaaagactaccttagttttataaaaaccgttaaggagaaagattgtcctttcaggattccggtggaaggtgaaaaattcaaattgggcgatgcaactgtggaagtggtttatgacggttcacaaggttcaacctataatgaagccagcattgttatgcgtgtcacatgcgataacaagtctattctcttaaccggcgaccttccatctactatggaaaatgagcttcttaaacaaggttataattttaaggctgatgttcttaaaataggtcatcacggtgctgccgcttcatcatgcgccaacttccttgacgcagttgcgccacaatacgctgttgtttcctgcggaactcctgatatatgcgaatttcctaaggaatcagtacttcaaagacttgcaagacgttttatcaaattatatagaactgcagatgctaatgtagttatcaattttaacaacggtgtaatttctacttccaataaagaaaacaatccttttgtttcaataaaaaaaggtacgattacattgagtaataacgttttctacgcaacaggtaaacaaatcaaacctactgtcaatttgtacgttgacggtcagttagttcctgcatatcattacaagattacttattcatctaacattaacacaggtgttgccaaggttaaacttactgcaacagaagttaaatacgttagcgtatgttcaactacatttttgattttgcctaagaaagaaacactgaaaggttccgtttcttcttataacagtgcacatttaagttgggacaagcaaggttccgcaacaggttacacaataatgtattccactgacaaaacatttaacacggcatttaaatataaatacattacaaaacctgaaactacaaatactactatcaaaaatcttaaatataacacaaaatactatttcaaaatcagagcatacaaaacaaatgtaggctacggaaaatggagcaaaacagttaaaataaaaacaaaaaagaaccctgctcctgcaactgtaaaaatcaagtcagcaaagaaatattcaaaaacttctatttatgtaaaatggaaagctcagactgcccgcggaaaaagtggctactatgtccagtactccactaacaaacgatttaagaaaaatacgaaaacactaaagaaaaaaacaactttgcaaaactcagctacaattacaaagttgaagaaaaagaaaacatactacatacgtgttcgaggatataataagcatggaaaaggtaattggagcaagacaatgaaggtgaagttgaagtaagagataaaaaatctcttaactttttggcttatttcacagataatatttatataatagtttttagagaatcagggctggcgcaatgccagccctgattgacttaatattttctgttttctttcagctattcggctttattcccctttatgtctaaccctatatatcacatagtacaccgcgccgccaacggttccgcccagggtgttgtacaccaaatccgatatttggaacgtaccaaggtggaacaacaactgtgaaaattcgattccaaaagaaaaaattccaactacaacggtggacttccatagaatctttccaagccttacatcacttccaagaatcttatccttaaacgcccaaagcaaaagcaccgcaaaaggcataaaaagcataaaattctcaataggctccgtagacaaagtaccatctgcattatgaagcccccaatttcccataatatcgcctaatggatcaaaccaaatatctctattcaaaatcgttctaaaaagaatcatagtagaataaaacaccaaaaggaaagcccttctaaatgtagagctttccttaaaatttctaaaccatgtgccaaaaatatttttaatcaggcttcccttcttccagccgtgttcccttgcgtaaagaaaaacaaacatagaaacaaaagccattagcactgctgcgccaaaaggttgataaagtgcagtaagcacctcttttataatgttagtaataatatcatttgctttgtccatagtaaacctttcgtatggataactattctaccgcaacatattgctatctgttgccatacatcttctcataataattctgatattcgccggaaataatagtctcccaccattctctattctcaagataccacttaatagtcttcttaatgccatcagcgaacttagtttccggcaaccagccaagttcgttgtgaatcttagtgggatcgattgcgtaacgcatatcgtgtccctttctgtcggcaacatatgtaataaggctttcaggtttgcctaattctttacaaataatcttaacgatatcaatatttgtcatttcattgtgtccgccaacattgtaaacttcgccaactcttcccttgtgaataatcaagtcaattgcgcgacaatgatcttcaacatataaccagtcacgaacattttcgcccttgccatatacaggaagtggcttgtcatttaatgcattggcaatcataaggggaatcaacttctctgggaagtgatatggtccatagttattagaacatctactgattgtaacaggaagtccgtaagttctgtaatatgcaagaaccaaaaggtcagcccctgcctttgatgaactgtaaggactgcttgtgtgaattggtgtttcctctgtaaagaacaagtcaggtctgtcaagaggaaggtcaccgtaaacttcatcagtagatacctgatgataacgcttaataccatactttctgcaggcatccataagaactgcagtaccaagaatattagtgttaaggaacacttccgggttctctattgaacggtctacatgactttctgctgcaaagttaacaaccatgtcaggatgttcttcctcgaaaagtccgtaaattgcatctctgtcgcaaatgtcgattttgcaaaaacggaaattagggttgtccataactggttcaagagtggataagttacctgcgtaagtgagcttgtccacacaaataattctataatcaggatatgtatttaacatatgaaatacaaagttacttccgataaatccagctccaccggtaacgataatgctcataatggtttactccttgtgaaaaatgagtaacgaatcacttccatatttcgttaattataacataaaatcttatatatttatcgtgaatatcaattttttctcaaaccatttttagtgaatctgtttttattgtaaacggtataataaaaccagcggttttcggcagttaaaaaccagcaatttttagcagccaattccagcaatcatataaataactccaaaggcaatctccacattaagattgttgcaaatcttttcgatgcggtcaccgattgcttctttaaatgcgtccttaatatctttacggataataaaaacaattttgttgaaacctgcttctattgcatcatggatagaataatccatgatgatttctccatttaaaccaactggagcaagttgtttgattccaccgccgaatcaggaaccggtaccggtagccatgataactaatgttattttcatatgtaaatcttctattttttttcttttaattcttctaaatattttttagcatcttttataaagctaattgcaatcattacaataactgcaccaattggaaaagcagccacaatactaactgattgtaaattattcatagaactctctgcaaacaataatgcaatcggaagtaaaatcaataaaatacaccacatcaattgaatccctttatttggttgttttccatcttccaaaatatgataactataacaagaagcagtcaatgcaatcgagtcaaaagatgttgcatagaatgcaatcattgttattaacacaataatcataatagcaggtgcacacggcattgtctttataatagatacaatcattccataaagatctccatctgccaaatactgtgcaataaaatctgcctttcctgttacctgcatacccattgaataatttccaagtacaatgaaacttgtcaatgttgatccaacaccaaatatataaccgcccaaaattgtctgacgtacagttcttcctcgtgaaatacttccaataaaaaacggagctgccacacaccataccatccaatatgcccaataatagattgtccagttctgcgggaagttcgaagttctaagcggatcagtaaaagtagataaatcaatgaagttttgggccatcttacccaaagatgcaaatccagtctcaataatataacgtgtttctccaccgaacaaaagaacaaaggcaattagaccaaagaacatataaatacaaatgttagccagcttgctaattcccttaaatccatgcaacaaggaataagtatatacggcacaagtaatcagaagaataataatattaatcacagtacggctaattgcaatatggaacagttccccaataattgtcgccatcaacggagttgcaacactgaatgtagtcgcagtaccagcaagaagtgcaaatacagctaaaaggtcaataattcggccagcccatccatctgtatgctttcccaaaatcgggcggcaagcttctgaatatttttgtcgatttctttttcttacatgaagcataaagccgaatgcaacagccagcacgagatagaatccccaaggaataaagctccaatggaataaaggatatacgcctgcccaatcttgaatgctccccatttccgcaatatgtggatcagttgcatacaacacccattcagagaaagaataaaacaaaatgtctgctgcaagaccgcaggtgaacatcatagaaccccatgcaaaaaaggagtacttcggtttctcatctggttcgccgagaacaatatttccatatttagatccagcaatataaagtgaaacaataaaaattccaagaccaataattagataatacgttccaaaagtatcaccaaagaaaaaacgaatttggctcaataccgcatttgactgttctggcacaaagaagaacagtacacaaagcgcaattacaattgctaacggcactagcgttatcatccagtctatttttccatgctcttttttcgtgttcattttaattttcctccacatattttttatagctttcatccaatgcaaccagttctgatagattatccacttctataatatccgatgcattcattggacgaattcctaatttgaagtcatcaggatggcaaaacattgctacatcatcccaatatatctgccgattttgtttttcttcaaattctacttccaagaaatgtttcaactttcgaccatcttccgctgtccatctggaaatactgtacagttgccagccacccttgcctccagtccgactacaagaggtcacaattccgttttttacagtctgaagccactcgtccgtttcatcgtctgtccaaacgctgttatacccagagcgttcgaattctggtgaaagaatcttcggattataaataatctgatccccatccaagataatcgcattttcaatatgatttcttgcaacatagagtgacgaaatattattgcatgtatcataatatggattttcaataagctccactcccagatactcccgctccagtttctcaaattgctctttcaaatatcctaccaccacatagatttcattgattccgttcttgtgtaagccgtcaatcaccgtatctatcatacgaattccgttcacacgaactagcggtttaggagtggtcagcgtaattggatgcattcgattacccagtcctgccgccatgatgattgctctttctactttatgcatttagttatcctccctttctttttgcttctttaattcatcttgaacgattcgatagtattcctttgcataccgatactgacgcagcgaatattcgccaaattccacacccaagtttcgcttatactcacaccagttgctccacaacagtccacaggccgcaatgtaacaataaattttaattctggttgcatcgtcacatccttccgtaaaatatgatactatcaaacgatctacctgccgtttgttataaagcgaatagatacagaacatcgccacatcaacatgggggtcctgcatccctgcatactcccagtcgatcagtctaatttcctcttgtccatccttctcaacaaaaaggaaattatctggcacagcatcaatatgcgtcagaaccttctcagatacatgcgaatctatatattcttttaatgaaagaacatttgctttcgtctttgcgtagtccttgtaaacagacggcatcccatcccatagagactcataaaactccatctgtccaaagatgtcaaactcatggtttactttcaacttcatttcatggaaatttttcaacctattcatgcactttttaacatcttcgtaatttaacggatcacatactctggctccttccagaaactccgtaattttatacccgttttcaggattaatataggcaatatcatcacagattttttttccatcaatcgtgtggtatacctctgcttcctgcctgcgattgatgagttgatcggttccctcgcctgggatacgcataatgtactttttccctttacaagtaaaaaggaacgagcgatttgtcatgccttttttcaagacagtaatatctgtgatctcatctgattttgcattcaacgctttaccgatcacttgaattgcatctgtttttagctgattcgaatcactatcaatttcccggagctgttcataagtgttgatttccacaacatctgccgaatgtacaacccgcgcagcaacaatcatacgatctttgtgatacaatgcctcttcccaaaaagagccatcatatctttgatttccgcataattcttcaatacaacgctctacaatatctgcatcctccttaatcagataacaaattccaatcatcgcattaccgccagatgcctccggcacagtgacaagttccattttccgattaacacgaacattgctctcattgtctacgaggtcactaaccatataccatgaataaagctcatgccgatggaacggatttcggtcacaccatatatcgcacggaacgatatacgaattttccaaatgctccttaaccagtttcaaagaatgaagattattcttagctgcatactctgtattaacaaccaattctaccccataatcatcaatcagatattcatacttctccttcatgaatccaactacgacatagatttctttgattccaacctcatgaagttgcctaataatacgttcgacaagaggttcaccattaacttcaagtagtcctttcggcatttctgtattaataggaaccatacgcattccaaatccagcggctaaaatgattgctctttgaggtgtcttttctttgaactcggtgattgctttcaccgttggccggattgagtcatccagatagtccatcttgatgagttcttttaatgatcgattgaccactcctaatgaatgtcctgactcttccgctaaaattctttgattaataaatggttctagcaaaagtgtgttcaaaatatcgctttcttgtttgttcatgtacgctttttcctttctttttgtgaacatcaattcatataaaatccgaccttccaaggtgtttttaaaagaaggtcggtctcccattcatacagatctaaattataagatttttgtctgtccgaaatccaaccgcaatatttgatgcgttactctttcattttcaggtggcagcttcatgtaatctccatatgcaacctttaaaaagcagtcatattcttgtggaatattaaactcttcatcttcaaatttatgcttcactgtttttcttaatacgctttctggaaaataccaatacccataacatgatccagcttgaatgcccatcatttttgtattatgatgctttgaatataatcgattcactttcgctctcagataatgcattgtgcaaactttaccgacgatatccgttggcaaaaatttcagacgctttttcagaccttttcctttccatactttatatccagatttcgacatgattgcctgtgccaaaaatgccatttcaagtccttcaatttttctctccataatattatcggaaatataatagtagggaaacacgtcaacaaaaatttcattatgttccaaatttttatttccaatattttcaatataagttgttcccttcaaacgtactttactgaaaaccagtggattacttttatttgtttcatagttgtctaaaaagaatctattgtccaactctttaggtgctattgatataaatttctcataatcatcgcaacacataccaatatccatgtcatcatcccaaggaataaaaccactgtgtctaactgcacctagcattgagcctgagtccaaaaaataattgatattgtttaaatcacatattctctttatttctttagcaatcattaactgtgcacgtcttaattttattacattttcctcaaccatacataactcccatcttataatttaaaactagctagtcttttttccgtagcttcatcaacttattaaggatttctgtcttatttttaaataggacaatcaccataacaagcagaattgtgtatcgtagccaagtatatgaaaagcccactatcattatgcccatcatcgccaacacaaaaacagataatgctattataaactttatgtcatatatttcttctaattctgaattattatcaactatttttttgtaagccaaataatgagcaaaagaaaaaaccatataacatatcaatgtggtgtaaccagcagcataatatccgtacaacccgataaaaatataatttaacaggatattaagaagcgctcccgaacacgatgcgaccataacaaatttggttttttcataataaaattcaatgtttgcaaaaagtggatataaaaacataaaaaacacagaggccgctacagatggcataacccaaattgcgtcataatattcctctgttgcaaataatttaatcagttctggaccaaatgccatagccatagcacatcccattgccactagcaataggataaagttagcattgctccctatttccttataatgttttctttttatattctgatatgtgtatgggataaatgagctattaattgcgccagtaataattgtcatcatcattgccaatgtatatgcaattccatatatggcagcttccgatgtcccaaccattttatcgatcattattctgtcggactgattaagtactgtcatcgacaaataatgtggaattaacggaatattaaacgatagtgcatacttccaaaaaaagctattaaaaaaacactttccctttgcaaacgctcgaatataaaaatataaacccaatacaacttgtacaagaacaaatgataaaacgcgagcctccgccttataggatgttgaaatgaccgcaataattccgattaggggacttcctattgctattatcattgttgtaaaaattaaacttttatagttgtattgatacctctgctctgcagaccaaaacaaatacgcgggttcaaatagtaattgtacaaacatcgcgacaacaaataatgtacccagccctaataattcattccaaaattgtggaattgcaatataaattaaaaaaagcacaaacgtaactgtcgtcgacaatccttgcagtgaagaaacaaattcactcttcttttctggatattttgtcaaaccattattaaaaatacctgccgataaattcaacgtagcaaaaattgtcagcacttgataccacgattgataaatcgtatatactccatactgctgtgtcgtcattatacgtgtgaaaataggtgtactaattaatgctattcccttttgaattatattacaagcagtaaaccagatagatgctttcaccggagcggataagcttttatatttatctactaaggttttcaatttcaatttcatctttgaacccttccgttacctccattttttataagattttccacatcagatactgtcactcggttgaagtctccctcaattgaatgctttaagcaacttgctgcaacagcaaactcgatagcacttttatcatctttaccagtgattaaactgtaaatcattgcacctgtaaagctatcaccaccaccgactcgatctacaatatcaatatcgtaatgtgtggagtaatttgcagttccggttgcgacatcatatatcattccgctccacccattgcggcttgcgttaatgctttctcgtaaagtaatggcaacttttttgcagccaaatcgttcacagatttcttttgccacatactcatagccattcttattcaactttcccgattcgacattgttgttcggtgccttgattccaagaaccttatccgcatcttcttcatttgcaatgcaaacatcaacatactgaacaagattacgcattacttcctgtgctttttcagaactccaaagattttttctaaaattcaggtcacaagaaattgtaatacctttttctctcgcttccttacaagcctgctcacaaatctgcaccatattatcagacaacgccggatcaattccagtccaatgaaaccatgtcacaccgtcaaacaatgcttcccaatcaaagtcggttggctcagctaaagcaatcgatgagtatgctctatcataaattaccttagatgggcgctgagaagcacccttttcgaggtaataaaggcccattcgaccattcttgaaaaaagttttgcttgtatctacaccgaaatagcgcagagcgttcaatgatgcacgtccgacatcattatcagggacaactgtcaagaattccgactgtatgccaaaattagccagtgacaccgcgacatttgcttctccaccacagaatgtagcatctaaactatccttttgaaataattttgtatatcctggcgatgcaagtcttaaaagaatctcgccaaaagaaaggaccttcatatttatcgcctccttaaattttcacataatgctgctctgtcaggaatttcaactcgactatgctgctgtactttttcagcatttccgtcatgcccatgttcattgcatcaaggactgccgttcttgtaacaaatgccattgtggattctccgtaattttccttttcatcatgagagtatccatcgaatcctgccagataaatcttctttgcccccatctgggtaaaatatttaattgccatcaaacctgcattgtcttttaccgcttcaatgtcgcacagaagttctcgatattttgtctgaatatacacattatcagccggaatattcgatgtaacaatgcacttctctctattcgatgcatccaattctctgaagcgtctcaaattgctcagaaaaatataatcagtatttacgagaggatagttataattaacacttatcgtcacaacatcttcatttataaacgatgctatcttttccctctcttctgtcgaactctttcccggcgcaatcagcagaattgtttttcctttaattttttcctgtaactctgtcttatgttcttcctgcgattttccagttgccatatatcttaaataaagctgttctatgtattccttatcataagagatccttttgtcttcatccatcatgtcaaagatttcattcatattttcgacagtcaaggtcttcttatcatccaaatacccagcataattcggatgggcgttatgtgccgcggacaaataatttggcaaagaatatccccaatagtttcgctgataaaactcattcaaaatttcatcaataatagatagcaacggtttaatatcgtaatttccatccgcattatcgttcaaatactgtacaaatagctctgtgtttaaattacccgctcctcgtcccattccatatacagaggaatcaataatgagttctcgatcagaatgcagatccaccaaactttgagcgttcgagtaggccagctgcatattattatgtgaatgaaaaccgattttaattttctcattcagattatgttcaactaaataaaaaagcctcgtcaggtccttgcgtttcatcattccaaaactatccacaatataaaacgcatacggctctaattcattcactcgacggatcaagtcaaggaattcttcatccgtatagctcagtgaaaccattgcctgaacaaagaccttatatcctttattttttatttttttacattcttccaacgcaactacgcggtctttcttgtgaaaagccacacgcaaaccatccacagatactccattatactctggcagatcttccggacgatatttgccatagtcagtaagcattacaaatgttttgccctctttgtttttcggaatgattttggctacttcatcaagtgagctaaatcttgtaacatctttatcatattctacggtattcataaggaatccgcattcaataatatcaacattagcctctacaagcccatgaacaattttcttctcattctcaaagccaaatctacaatcgttgcagtaaccaccatctcttagtgtacaatctaatacctgtattttgttcattatactttctccacgaaatattcttacttctcttgaagctcatagttatagattgcatccgcaatcataaagtcttctgcctcatcaatatctacgctttcaatttcgccgacctcaacaatatacggtttatctccgattcggcgattaagttctgtcattaccgtgtttctatagatatagaaaccgcttgtttcctcatacaatgccggcaaatcctgtgtgcgagggatattattcagctcataattgaacggttttccatctttccacagaaaatcctgtaacttcttagcagcaaaggaagaatcatattctccactcttgacagcttccaaacccttctcaagcgattcttttttaataaaaggtgctgtcgtatgcgtcatcacataaatatctgcagacacttcgttcgcaaagcaatgcagtacttcattcatttttgtcgtatcttgatccaagctggttgaacgttgcagatactttactccctcaggaataaactcctgaatatcaggattgctacaataaacgtaaacctcatccacaccttcaactgtcaacagagtagagagaatgtaatggcaaagcggcttaccattcgtaaagctcttcgtatttttctgcggcaagcgacgattattcagcttcataggcacaattgctactgttttcattgtatatcctccataaaatcattaaatgttttatactttctataattttccatattgattatcttttcgttttccaccccacaaaattttccatatgcaatatatctttccatttcacttttttccgtaaaaagactcctatatattatcatatcttcttctgtcacattttgtttttttcttttaattcccgcataataacaccgagcactttcctcaaatcgtgttcgcccctttacaaggaactgatctagtgaacagattatttttgcgggatttcctgcacatacagtatttgacggtatacgtccagaaacaacacttcctgcgccaataataacattatctcctatatttgatcccattaatattatggagttcataccaatgaagacattttttccaatgatagtgtctctttgttgccttggcagttctccataaatatttccaagaactgaatagctataatcatgtgcaagtataataactccggctgttatttgggtattatcgccaataaaaatgtgttgaagacttgtttcatcaatggtagtatttttcgcactgtaaacagtcacattgtttccaattgttgcccccccccgcttacaatatgcaatatatttctctcctgaacttttttcgcgatatattaactttcttagaatctgctttatcattattatatctcctctattatatttggatacaaagatgccagtttcttaataacctctgctgtataaaggactcgttggttttggctgtttaatttactcgtatagaaaatcaattttgcatttgattttatacacaaatatgtactaatcaaagctgtagacgtcattgttacaagcgttttattttccattccttcgatattaagtgcaatggcttcccacggaatcgttagatccacatttgtcgtatatcctaattttttaaagcgattttctttatttctaggatgtacttttactattatgttatctttgccatagattttagctaaattttcaaccagctctacatcacctgttaggatgccatcattgtagtaggattcttcaaaaaaaataacatctctatcatacgaatccctacattcctttacagaaaatactttattcaagatagggttaataatactctttgtttcaagcaagctcggaatttctattacttttgattgtgtatcccacaaacaaagattcggatcaaaaaagtagaattttttaaacacagataaaacatgtggaaaacatttgtagtataaatttttaattatcgatggatttttacgccgcatacaaatggcatgttcgtatatccttgaatatgaagaagctccctcttcgaacattgcaatgtttttgcatccatgttcgtgcataagccattgaccgattgcgttagaaaaacctcctaaaccagcaaataggtattcatcaactacatcattttcttttatattagaagattcaagcaatttaggtagctgtttttttatataataccagcttatcattttcggtgcattccaatcaagtgtttcgttatcggcaacaacaaccgaatcaaaaacaccacacaatctttttgcaattatattcgaattaggtgttgattttgaaattatcaattcactccaatacgaagaataaaaaacgcactttatttgaatcgcaacaatcagctggtaaaccgtgcagcaatggaatactatttttttatctctcattccgcatttccaccccatttctttttaaattaatattaattgttgatatatttcccattgccaaaggtatcaaataataaatcatttgtgttataaaatatgttgacgtattatctgtaagatataatataaacatatatatagttgcaagtaaatagtactctccaactgcagtcccgttccgtctatttagcttgacagttttgtatttaaaacagtagtaaatccatatcaacattccaataaagccaatttcgataaacataacaagaatatcgctgtgtatacttgctgcaactccataaccgcctattctaaagccgctagaatacaagcttccccaatatcgtgaaaaataagtgtagccattgcctaaaaaaaggggggaaaatttgtaaaactttcttgcatatgaataatagctaagtcttcccataaaatcaattccaaatctagtagccagtatctctaaagccccactccaaataatatatacataccctactgtcaacatcgagaaaaccagaaagaagaatatacttcttcctttcatcgtttttccttttcgtaatactacccaataagaaactattgcaactgctaatgctaatatctctattctttttagacctaagacaataagaataaacgaaagcagtattttttttatgtggcttctttcctttttgttctctacaaaaatataatacaaaaagaacagtcccatagcaaaagtgagatcatgtacttccatcatatacgaagcggctgtatttacaccggttatagcactaatcaaatatagtccaatctctcgaactccataattaaaaataagaggaattatagatcccagtgtataagaggtcactcccgcataaaataaaacatctatactttttttcccaaacaaatagtatccacagcttgcatacccccatgcaagagccaaatacaatatcgtactaaataatctcgtataattttctattgttacatcctctcgaaacgcccaaataaccatcgaatagaagcaaaaagcaacaaagggcgcaatcattaggttataatgactttttatttgctcatattttttgttttttcttgttgcattgttctgaactgaaataacaactgccaaataataaagtgcccatattccagcaacaatatacttaatgctatagttaatattcgttccgttaaatctatttgtaaatattattattccagaaataaaatatgggatttgtgactttctaatctttataagtttacctctcacaactttctttcctcctgtctctttcgctgttttatcttaatcgtctcaccacaaacctcattattagcacgtcactatctcttaggtgataagacatttatacgtcatctgaaattactatttaacggaacagtgctctcttcttcttccaattttggagcaatgccatcatatatgtcaagaacttactctttttataaattgcctggcaaaataatttttgctttgctggcattttggaaaaatcatattttttgattacaccttgtacacagtcatcacaaatcatagattctatcactttgtttgatgccatgcaattaaagccactatgatctacttcttgcattatagtcacacgaagatttgctaaaaacatactgtcaattctacgacacagatttgtgcaattatctttttccttaacaatttgatactcataaagatatagcttttttatttgttcaaatctttctggtctgtacttcgttgttaaggttccaacattatgataatagttataccctgccaattcattgatagccacaatatggctatgactcataaattcaatatcaaaaataacatcttctgatatatattctctctctgagcaaaaacgtatactgttttgctctatgatttcgcgacaaaatattccaacacaaacagacattccagaatagttttgcccatattcatcgtatcccaacatacttggaagcaatatttccataacttcttgtttattaaatacccttcccgcaaaaggatgtcgacttaccacttcgtgtgtttcatatacatcagtcataccacctaagcatgcatcggcatggtatttttccgcaactcttagaagttctcgaaaatgttctgaagatacagtatcatctgaatcaacaaatgacacatattttccctttgccacagcaagcccactatttctagcatagccaagcccttcattttctttatgtatcacatgaacaaaagaatatttacttgcgtattcatcgcatatttctgaacttttatcctttgagccatcatctacaagtataatttcgtagttagatatattttgagttaaaagagactccatacatctttgtaaatatttttccacattataaactggtacaataatactcaattgtaaattcatattttctccatcatttagttttcatttgattttcaatatcagcatccacgatttcctcgccggtcttatgcttcagctgttccttagatgcttcactcagaccgttattaataacacagttcatatcgcaggtgctgcacttgtccagatcctctttagtgactttgccatcacggtagtcacggcagattttcagctcatacatgctatatggatgtttactaaacaaagccttaaacttatgtttaagtacccagaacccaggtttccaaatatacttatgcattgcaggagaagctgaacctatcatccaacaatctctgtcacagcagcgaacctttgctctaacctgctctgcttcagggctattccataattcatcccagctctggttgtttaagttacccattacttctttatcttttgttccgttacatggcattacatctccgtatggatcaataaagaatgtatcaaaactcatatcacaagggagtaatctcttctgtccgtaaatataattaataagtccgtgattgaaataagctctcatccatttcttaggactctttgatctaagtaattcgttaattaaatcttcgaaattctttgctaccattggacggtctttgattatattctttgcttctacgaaatagaaactgttatgtaatgaagcagttgcaaattccattcccatttcattagaaatcttataaagtggtactaaatcaggtgcattcttgtcctgaaccgtcattccgaaaccaacatccttcattcccatttcacgtaatttcttaagtgttgtataacccttgttatatccatcatctaatccacggatttcattgtttgtctgttcaagaccttcaattgaaatacggattccgatattaggaaattccttacacaaatcaacaattctatctgtgaaaaatccattagttgaaataacaattctatcactcttcttatataattctctaacaatgtcctttaaatctgtacgtataaaaggttctccgccagttatatttgtaaagtacattttaggtaattttttaattgtttcaattgaaatttcttcttcaggttttgatggtgctttatatctgttacacattgaacaacgtgcgttacatctatatgttacgataactgtaccatttaattttttctctgccattatgttctctcccttttcccttttattcgtatatcttaatcaatttattacaatattcttcaatcgtatcaaagttaatatctttacagttttcactgtatttatctaacttttctttgtcattccacaattcatcgattttactctttaaatcttcgccattgccgctttcaaacaattccccagtctttcctactgatatcagttctggaattcctccaatattagcaccaagaaccggcgttccatacatctgactttccattactgaaaatgggcaattttcataccattctgatggatatatagagaatcttgcttctcttataagtttttcaagagcttctcccttttgaaaacctacatttttaatattgctaattccattaatttcttcttccaaaggacctgttcccgcaaatataaactgaacatctggaagtttcttacacacttctataagtgttcctattcctttttcttctgaaaatcttccgaagtaaagaacataatctttcttctctgcttctttccattcaactttatctataaaattatgaagtgcaatagtcttacttgcaaacaaaggatttgaatccatctttgtcttcataaattcactacaacatatcattgaatctatgtatttatatgttcctttcattttccaaaacattgcttccattgttccaactgctgatttggctgtgcttccatgaatacacttacctttaaagcaattcataaaatgtccgcctaaacacttttcacaattttcgtgtgtatttggattgttgcacatatgatttgggcaaaccagattataatcgtgtgcggtaaatataatcttgcatttatgtcctgtctgttttgaccatttctttatttctaatataacacttggagttatctgatatgtaaagttgtttaaatggaccacatcaggctgaaagtcttcaagaacaagtctgattttctttcttgcctcacttgaatatatagttttaattggataagtcagtttagaaagttttgaacctccatgaaagtccatatcagatgtataggcttctgcatgatttccaacacatcttccttcatgttccattccaaagtattgtactttgtgtccctgcctttctaaatactcacctaatttgaatatatatgtttctgaacctccatttggatacaaaaacttatttaccattaaaatcttcatattttattccttatattttttactttattttactttctacaacttcaaacacttttctgactataattgcaaatataatcgctcctattaaagttaatattactgtaataaaatattgaatccatccatttccaaatatattagtaatcttcattttttgtaatattctaaacaccatcatatggcataaatatatctccatacttattccacttaagaatttagctatcttattgtccaatacttttacatttgaagtaatcgcatataatagcatcactactgaaactaatagacacataaacacattaccattcagcagataatatacaataatagtaatactcataacacttaacatttgccatgcttttatttttgatatttcatttctatataaataaactaatcctccagctataaagaaacatgcactataaaggatattcgttctgtttatctcaaaataatttgaacctattaaattatatatcgcactaattccgaaagctatccaagctctctttttattctgtattaaaacacaataaaaaggaaaacatatgtaaaagacaaatatcagtcctaaaaaccaaccaactccaataacagaaatattacctgcgtttggcaaaaaaccaaacattaatgtcaaatctgcaaaggcttcatataaagattcaatcgaaggtgacataattaaatctacaaaaactaatagtgcaaaaaatggcaatatttttttaaatctttttacataaaatttttctaatgttatttcgttttttaatattttttcataatatccacagcacattccaaaagccgaaatcaccataaacaaaaatacaaaattagtaaatgatggaataattttattataaatatatccacctatttcatagttattatttgctcccatatgcatcataacgataccaattgctgcaatagctcttaagccatctatcgcaccataatgtttcttttccatattctaacctctatacaactccattgttttctcaaccacatcatcccaattatatttctcacaaatgaaatctgcagcttcttctttatacttcttaaccatcttaggcttatcacaagcctgctgtagtttttctcttaagtcatctacatctgattttttgaataccagtgccttgtcttctacaactgacgcgcattcatctatatctgatacaagacagcagttaccatagctcattgcttcaagcaggctcagtggcattccctccaggtcacttggaagtgtatatacatacacattactgtataactcatccaattcttctccctgaacgaatcctgtaaagattattctgtcgtcatcttttgccatctgtcttaattcgttagcaaactcatctgtatctgaacttccaccggctattaccaatttcttatctgtttttacttttttaaaagcttctaccagatacttaagccctttttcaggaaccagtcgtcccaggaataagatgtaatcatctttttccaatccgaattttgcttttataatctgtggttctcttattatcggtctgtttactccgttaggaataaacttagtttctcttccatatgtatctctgaaataatcctgcacgccacggcttaatactattatttcgtctgcgtgctttactgcacacttctcacccatcattatgtaagtccttgcaagcttgccccacttagctctctgatggtccaggccgtgaattgttgctatgcatctcttgccgaataacttaggaagccataacattgcacaaggtccttctgcgtgaaaatgaacaatatcgtatcttcccatagacgcttttatgcctgcaaaaactgaggctgacattgctgccaaccctttgcagtttattgtaggcactgttttcaggtttattcctttgtagtttttaatcttcgcactgtcaaattccttaccgctaacatgatgtccgccacggttgtagcatgttactttgtgacctttgttaaccattcttgtacaaagttcttccaccacaatttccacgccaccttctcttgaaggtattctcttatgacctaacattgcgattcttaatttatctttattcttcttatgcactttttatccccttgcatattttgccaaatattacaccgatcccttctgtcccagcactaccagcactgttttcagaattatttttatatcaagtcctatattccagttcttaatataatcgctgtccatttttactatttcttcgaaatcagtaaaatcacttctgccacttacctgccacattcctgtaagtcccggttttgctgccagacggctcttgtgatgcaattcgtactgattgtattcatccattgttggtggtcttgttcccacaagactcatatcgcctttcaggatgctccagaagttagggaattcatctatagacagatgtctaagataatatccaagtccctttcttgttccgtccggaccgcttcctataattctaggatcagcgtccatcttaaacataagaccttccatcttgttcttcgccataagttccttcttacgttcttccgcatctacatacatagaacggaacttatatattgtaaaagttcttccgttacgaccaactctcttctgtccgaagaatacaggtcccttaggatctgctatcttaattgcaggtgccacaaatataaaaagtatacctgtaactatacatccaacaatgcctgcacagatatccatgcctctcttcaatgccatctctgttattgttacagtattggcacttgttcttataatcttggtgttattaatatgtccgaactcctgagttccaccattaaacttaatatttaatttaatatctacggtaattcctatattaactaaagtttccaccatctgatcaaaattatctgatggatagtttgaattaagtaaaacttcatctacaacatttttgcaaacatagtcatacatatctgttccttctgaaactaccggtattccctggcactctttaattccttcctcatttgtgtttaatgctattcctactatttcaaaactcttgtccggtccatcgtttacttcactgattactttctccatattttccggtgtagtaattatcaaaagtttggtttgtttcttctctcggtaatctctttttcttaaaaatgtttttaagcaaatatgtgcaaaatacattgcaaaaatgtccattacccagaatgcaaaaatcattaatcttgagtatatcgctcctgtatgagtaaagaacataaataccattacgcatagcattaatcctgtattatgaacaagtactcttttaaattcctgaaaatatcctcttcttaggatgtctgaatatgtattcgagaaaaaacttatgcagaaatgcagtgccattattgcaaaaagaagtgttctgtactcctttagcgcatatacattacgtactccattacgtagaaaatatgcaatcaataacgttaaattaatgcacaacaaatcagcaagtataaagtctaaatgcttaacccagctgttcttcttcacgtacatacagtgaatctcccctcctattttttacatagcgtcttttgtatactattgtcttccctttgttgtctatttataatctttacatatttataaagaatctgatgtatattcttgtgtttattatctttatcatatgctttgtgcatatttatacaacttctataaaaatcacttatacactcatatagcttatagctaacgttgcttagctctttttcttttccataatactctatttttcgtcctttttcaatgctcgatattgtcattttagtaataattcagtatttttagtcagtttgttttctttttcagtaaaaacgtttttatgcttatcattttttacatatttgtaaacttttatgacttaaatgtaaattcaaaccctttgccattgcttttatcgggcattggacttacactcttaatatcgactacaatatttcagatgattggtcttcagtattaagatgactgttttttatattgaatgatcagtctacaatattcaagatgattggtgaggtgacatgtttatgaattggagagatagattttcaaaatttatgtatggaagatatggtgcagatcagttttctaagtttttgcttgggcttacaattgcgttgtgtattatttcgctttttgttccaagaagacttggttccctttttagtactttgattttgcttcttattttttatacttattttagaatgttttcacgtaatatttataagcgtgctgctgaaaacgagaagtatatgcgtattctcggtagctggcgcaacaaggttgccaatgagaagaaccttgccagtcagcgcaagtattatcatttctacaagtgtccggaatgtggccagaggattcgtattcctaaaggacacggtaagattcagattcgttgccctaagtgcaacgccacttttataagaagaagttagttttttatgtttggatatgttgttattaataaaccggaattaaaatttaaggagtttgatgtttacaagagtttttattgtggtttgtgttattctttaaggtcccgctatggttttgtcgggcagtttacactttcttatgatatgacttttcttgtaatgcttcttacttctttgtacgaaccgaaggttgctcattctgagcacaaatgtattcgtcatccccttaaggcacagcctatgtcttccagtatttactcagattacgtggctgatatgaatattttattatcttattataaggctatggacgactggaatgatgaccgcagtgttttgaagcttgcttttgccaagcttttaaaaactaagcatcctgatgatggctttgattataacaagaaggcagaagttatttcgtctcttctcaccgaattaggtacccgcgaaaaagagaatgagacgaatattgatgttatggcagggcttttcggtcgtattatgtctgtcctttttgttccaaaagacgaccagtgggctgcttctcttagccgcattggttttttccttggcaaatttatttatattcttgatgcctatgatgatttggaggaggatattaagaaaaatcattacaatcctttcaaatctatttgcaatgaacaggggtttgatgatagaataaagggcatgctacagatgatgatggctgaatgctctaaggagttcgagtatcttcctattttggagaatgctgaggttcttagaaatatcctttacgccggggtttggacggtctattataagaatctgaaggaacgacgtggagaagatgtagcatcagacaatacaataaaagaggatgactaaggttaatgcgtaagctattaggtttacataactttagttttttaggagtttgatatgagtgatccatataaagttcttggcatttcacgagatgccacagatgatgaagtaaaacaggcatatagaaaattaagtcgcaagtatcatcccgatgctaatattaacaatcctaataaggataaggcggaggagatgtttaagttagttggtcaggcttacaatcagattatggatgagcgtaagaatggttatggtagttctggctacggtggctatggcagttatggcaatggttccggtagctatggtaatggtggttctgcctatggtggttcaggtaacggcaactacggtggtggttattccggcaatccttttgatgatttgtttggtggttttggaggcttcggcggttttaacagtgagcagggacaatccagccagtattacggtcaggatgcttcttattacactgctgcatctaactatattaataacagacactttcaggaagctttaaatgtgcttaacaatattcaggaccgtacagcccagtggtatttcttaagtgcattggccaacaatggtctgggcaacaatgttatggctcttgatcttgcaaagactgctttgcagatggaacctgacaaccagacataccaaagacttgtccaaacacttgaaagtggtggtcaatggtacaacacccgccagtattcatatggtggcaattccggtgcaatgtgttgcgctgatccttgcacaacattatgtttgcttaacatgtgttgttgctagaaattaaaattgaattatatatgatttaccaagggaaagtgatgcatcactttcccttggttttgtttttggggttctgtcgtgggatatatttcctttcacatacatttttgtcgttgaggacgttttgagaagcttcttatgtgatatttccccacacaatacttatctccaccatatcctccctctctcacaaatagccgcccggcgtctctgtcttattcttgtgtattacctgtctcgtatactttggtgcaaaaactatatgatattcctattacagactattctattatgttgtatttcttcattagctcattctggtattccttgtcttccgacatcttctccaattcatcatacttcttctgtgagagcaaaactttaattaacttattaatatcctctgttgcctgctgcactccttgtttttttccctgttctatgccttgcttcatgccctgttctatgccttctgctctaccattcttatactgttgatttaattccatctgatatgacatatactcacgcctccattggtcatttcctctggcctcaaataccttcttctgcatgtcccttgcaagcttactttccggttccctgccatcgaaatagtctaataacaactgtagttccctgcctatgccatctctatcacccttggtgttcaaaaaaatcttatgcgttccatcattcaaccttatgttagcatcctcaacacatatattctcgaactcatacacacttctgtccttcttaaagaaatcaaaggtacaaataaagataacataacttactcctagtatatcatatgtatcccctttttcaattatattaaggtctatcacatcctgataatagcgtgacctcttaggtaattccgcataacttgtggtttgcatttccaggttaaaaacagtgttcttgtcatcttccacataaatgtccaatcttactcccttcgctcccggtgccacctgaatggtttcctcataatccagatatttgatatcccggattttaatgtttagtatctgctccaacgttgccttgcatatttccttgtcagacattaccttggcaaacatgaatgaatccgtaatttccaactgatcgtatcttttcatttacatcttatcctccctcgtatttatttatataaatatggtaatggataagtgtgtgaaagtcaacactttatttgtgtttcatatatactgtttatgtgatgttctatgtttttttgtggtgcattcacatttacaagccctttgatgtaagctccgcctgccttataggtctctctccaaatacatttatttaatgtatttcatatagaaatctaagtaaaagaagcttagctttgtaaaacgtacaaaactaagcctataatattctttatgctgacatctttatataagcacttattcttgaaataaactctgaattagttggtcttttgttttcctttctgtcttgaaactctcgcctaagctctaccccattatcagtccatgctacttctatggcatgccttatggctttttctactctttgaggtgttgaattatacttcttcgccacatcaggataaagtatcttggtaactccctcaagtgaggtttcatcctccagcacctgttcaattgcagaaagcatatatttatatccttttagtctggttggtacaccaaggccaatcagcttttttgatatgatgttttccagttccttgccactttttcttttgcattcactattgtacaaagaattccccatgtcttccccggttaggctttcgccattaattactataatgttatatttgtcactttctcccaggctggctgacaccaggcttccttccatccttagcgttgcaataagctgtcgtaatagtttttcgctactgtttttctccattttgttcatttttccctccattttttccatagatattttaatttttttctatatgctatataataaatgcatatttttgtaaaaaaaaggcatagaaaggcacaaattttggtatattgttgttttttgtgtgccaaaaaagatttttaacaaagttattattacaaatgtattttttgcaaagcagttttttataaatgtattttattcaaagctgttttccataaatatattttttgtaaagctattttggtacctttttaaaacttatttttatttacagggggaattttataatgaatcagaaatcacaggatttagattttttaaaaaacactatggttcaaaacattaaccgtcttctttataagaagaattggtccatcaggcaactttcagatcaggccggtcttccatatgaatctattaagaaattagtgggaggtaaaatcaaaaatcccacaatctatactatatctaaggtttgcgatgctcttgattgcagcattgattatcttcttggacgttccgtaatcaatactattgaccaaaaatctcttccgcctagagtttttaatcttttggcagaaattgcctattttgaatcacgcattgccgactacaatcaatctcacaaaaccgattgtgtttccgttcttacgccaacgggtattgttcaggacggaatggttttcgacagtatttccactgatattgttgatatttcaccatatcaacaagattttggtgacattgttttgtgtgggattaagattgttgggcgaaatctttcacctacttattttgacaacgatattcttctgattggcaaggaccgttttcctgaatccggtgagacagggatttttcttattggaaataaagtgtatattcgtaaatatattccaggaatcaggctggagcttgctcccattaatggcgacaaaaactcgcttttcatcgataatatcgatgatgttcactactttggaagggtgcttacagtggttcgtgacgcttgatgtttcttgttattgttaagtttttaacttttttatttattgcaatattgggataattgtattattataaacgtataaaaaatcaaaggaggcttacataatggcttacaaaattactgacggatgtatcggttgtggtgcatgtgaaggtacttgcccagtaggagctattagcaacgatggtagcgtttgcgtaatcgatgcagatacatgtatcgaatgtggcgcttgtgcaggtgcatgcccaacagattcaatcaaattagactaattattataatttatacgctctctttggagcgtattatgtaccgtataggtataaaaaatgccatctttactttatgtaaaggatggcattttttatgtaatattatctatgtaacttttcataatattttttataatatttcttatcgtctttcttttaatattttttaatatttttattgtatctttaaattatttttgctatttgtccttattatctgtctctttatgtattgcatttttttaatatcttttgcattttatatgcgatgcaacattcttctataatgtatttttgtttatgtagtctgtggttttttcccgaaatgagccattccttttttcttgtttttcaaaagaagtttttctgcttttgctttttttcttttttctcgacggcttagcttctgcttgtttctcataagctcatcaagttttcgataacgttcttcttccttttcatcctgaactctcatcatataattcattccttttagaacgttttcgcttacgttgtcacttagctcttttccaaggttcgttgtggattcttttaatgcctttgaaacaaccttattcataaggttctggaactgttctaacttcaagcctgtgctttctgcattctgaccattactctgtgtcatattctgtaccacactctgtacactgccagacattgcctccggcacttcctgatagcaattctccaccccggcttttttctcccttacttccatcagcgaaatcggctgtcttactgtcagtctttcatttgattctttattttccctggttgcttttttcgggtttaccatattttttattgcctttaggctgtagccctgcttctttaagtccctgacttttctaaggctttcgatgttaccttccgtgtagtatctgtgtcccatttcatttcttggaattttaatttcaagttcttcttcccaatatcttaaaacatgtgattcaacattgagcatctttgatgcgtccgaaataatatatcttttttcccccatatactcctccttaaaaatcgaattggagcatcgaaaaggagatgctcccttttggaacatctccattataaattcattatatgccttgttcaatatttttaacactgcgaaaaaaacgactttctgtagctttgtcgccaactgtctactacagtcacctacacctgttctgtttccgcattttcgaacttagtatactgtggtaaccatactaattctacttcacctacagggccgttacgctgtttagctacgtttacgatgattctgtttctgtcttctgtctttgtttccttatcgtaaaatcttgacataagcattacaacgtccgcatcctgctcaatagaaccggattcacgaagatccgccataataggcttcttgtcttctcttgtttcagctgcacggttaagctgtgataaggcaataaccggaacgtttaactctcttgcaattccctttaaggttcttgaaatttccgcaatttcctgttcacggcttgacgctctgccgttggttgtcatcaactgaaggtaatccactataacaagctggatatctttctccaacttaaactttctacacttagaacgcatttcgcctatgcttatacccggtgtatcatctatgataatgttggaattaccgataatattggctgattcaactatgtttgcccactcgctgtcacttaagtcaccatttctcattttctgtgaacttaccattgagttctgtgaaataatacggttaataagctgttcgcttgacatttccaaactaaatatggcaacaggtatgttgtgttttactgcaactgtttccgtaatattcaaaacaaaagctgttttacctacagatggtctggctgcaataagtatcatatctgatggctgaagtcctgaaagctggtggtcaagcttagtaaagcctgtttccaaacctgtaatggaacctttagtctgggaagctttctcaatcttttcaaatacattaagaactacctgtcttaccggagtgtaatctccactgcttcctgactgaatcaggtcaaacatcttcttttccgtttcctcaagaattgcctctagtgtttcatttcctgcgtagcatttgccggcaatatcttcattggcacgaattagatttctaagaactgatttttcgtaaacaatttctgcatactgcttaatgttagctgatgtaggaaccatttccaatatatttctgataaaatcaagacttacaacctctgaaggcacccctgtttcctctaacttagactttactgtaacaagatcacaggttttcccttcgttgtaaagttcaatcatagccttaaaaagagagccatattgtttgttataaaaatcatcttctgaaattttttccatagcagttgtaatggcatctgcatccataagcattgagccgattactgcctgttctgcctcattactatggggcattactctttttactactgcctcttccatttggttttctccttgccgacttttattttgcttcaacctttacggccaaagtagccataacatccttgtgtaacttaatgttaacattgtaagttccaagtgatttaatggcatcagggattatgattttcttcttatcaatatccatgtttaactgtttctttgcttctaaagcgatttccttgcttgaaatagaaccgaaaactcttccctctactcctgcctgaatctttacggtaattgatttttcttttatttcttctgctaaagcctttgctgcatcaagtttttcctgtgcaaccttttcgtcattctgcttctgaagttttaaatcattaaggttctttgatgttgcctcaagacctaactttttaggcaaaataaaatttcttgcgtatccgtcatttacatttacaatctcccctttttttccaagagatttaacatcttctaataatataactttcattaaaattctccttcctctatcatcttctcaataatcttctttaacataacgataacctcaccggttgtcttgtttctaacctgtgctccggcaagattcatatgtccgccaccgccgaactgttccataataacctgaacgttgaccttatctattgagcgggcacttatatatacctgatcattgtatggtgtacatacaaatgatgctttaacattttttacatttaataattcattggcagcctgagctccaacaattgtaggcgaagaaacgccctgaggattacatacagacaatgcatattcatccataaagatttctgtattctgaatagccaatgccttagccttgtaatcagaaagctcatctctaaacattcttctaactcttgctatatccgcaccattcttcttaaggtacgctgccgcctcaaaggttctgacacctgtacggttaataaagttgttagtatcaaccataatgccaccatataaagcctctgcgtcaagctttgtaagcttaactgtttcattaatatactgaataatttcaactaccatttcacatgttgatgatgatgataattcaacatatgaaagctgagcattgtcaatgcaatctgttgtctgtctatggtggtcaaatacaattatacactgggctcttcttacaagctcaggatattctgtatatgaggctctgttacagtcaactataataagggcgtcattcttagtcatttcagaaactgcttccggtcctgtaataaacatatcttcatcatataagtctgagttcttaaattcatcaactaaaggaactacactgccacttacatctccaagtacaatgtgcgtcttctttccgatagtctttccaactctgtataagcctattgcggcaccaaaggaatcattatcccctatatgatgtcccataatataaagattatcttttgtttcaatcaaatctctaaacgctgtggcttttactcttgatttaacttttgtgttcttttctactgatttggtctttccaccgtaataataaaccttactaccgtcttttaacactgcctggtcaccgccacgtccaagcgccatgtcaatggctgttgtggacaaatcatagttctgtaccagactgtttcctcccataccaataccgatactgattgttacaggaaggctgtttcctatattaactgtttttacttcgtcaagaattgcaaacttgttagtctgcatcttgcttatatattttgttttgaaaactacaaaatacttgtcattttcaagctttctgacgattccgtcatattgagaaaaataaacattaatctttctgtctattaaagctaccaaaagggttcttcgtgtgttttcaacactttgtaccacttcgtcatagttatcaatataaatatttgccgttacaagtcgttcttccttagtctctttttccagcttgctgattaatgtttcatctcttaaataaatggaaattaactgaccgctattttcttccaaaagattaagggcgctgtcttcaaaatcatttttcagctcaaacttggttaatgttaccgcaaataatttgtctttataactaagcttaacgtgattaggtttctcgtcatcaaaaaccaaatattccggcttaatgccttcaaaaatattcataatgttcttatttaaaacactcttttcaaataaggtatcaaactggttgttagtccatagtatctttccgttttcgtcaataaggccatatggcacatccatttccttaatcatctgtcgttgaaccagactgtaagcacttccgaagtctataagtctcttagttacgttggaattatacttaatagctatgcttagcattaaaataatgtaaacaaatgtggcaagactcattactgcgcctgctcttacatcaatggcatatgtaatcacattaatcattatccaaaatccaataaaatacaacggtccctttaaatattttcctacctgagtctgtaattttttctttcttttatttcccatataatactccattccgcttttcttaaaacggtataaacagctatgcctatttcatctcttccctcttttttgtttatgactaccatacatttctcacttatttatagtgctcattacccctaagtatatcattattctaacaatatttaaagttaaacttatgcttacgtgttagttttgtctaacttcttttttctttacttttactccgttttcccttacacttactttggatttatattatgttatttatactatattaatggaacggagattattatgtttagagtttggggacgtacttttaaaagtaataaaatgttacaaagcactactattgaattggatattcctgacgagacaagaactcataaggtttttatggctcttgaacagatttgtgaggaatttgatttaagcaatccaatatggcttgattcaaatattaacgagtttaaacgtattgcgcgaacaagattttatgcagacagttttgtggaatcaatagatttcgactatcttgacttctatgttattgaagaggattaatcttttcactaagcttattaagtataggtttatatccgcagttggattttaaattaatagatttttcctattaataaaaaagacctgtcgcaccaagtttaaagtgcaacaggtcttttgactttttaagtctctttgaacgcgctttttagaaaattatttctatactatttaaaatttctacactgtaatcttatcaattagcaacccattaagtagtccattattttctttgaatcttctaattcatgagctacaatttccatttcaggaatcttagctgctgaagagaaaattgttgacaatgaaactaactgacataactttgattttaagtttaatctgtctccatcatctgttattaattcaactcttcctgtacaactgtcaattacctttaaaaattcttcagggttttcaatatttttaatcttcatagtatctctccttgtctttttattccattactcttctgttacattactattacattaataatctaccatttataaatagcaaattacttctgtttctgtttttcctcgatgtctttaatcatatcgattctaacctgatgacgaccaccttcatattctgcattaagccattcatctactatcatttttgcaagttctatgccaataactcttgcgccaaatgcaataatgttagtgttgttatgctgcttagataatcttgcgctatatggctcgctacatacgcaggctctaattccgttaaccttgttagctgaaagtgaaattcctacacctgttccacaaattaaaacaccacaatctacttcaccgttaacaatggcattggctactgcctcgccatatacagggtaattacatctctcagaagaatttgtaccgaaatctacaactttatgtcctttttcttcaagatatgccttgatttcattcttcatttcaactgctacatgatcatttccaattccaattttcatattgttcacctctgtcttttgtactataattctattcagcaataatatattctgctgtagcttcaactacatctgtcactttgtcacaaattaaagttgcctgttctaagtcaagcaccttacataaagtattttttcctgatttactgctatctgccaaaatatatgccttacctgcgttcttgcagacaatacgtttcttttcagcttctaacaaatcaggtgtattaaaccctgcttcttttgaaaaaccggatattcctacaaaagctttgtcaaaatagtaactctttaaaaagttgtttgttgtaattcctctaattgaagcagtagtaatattgatttcaccacctgctataatacacttaatattaggagattgcaactctgaacatattaatgcatttgttgttacaactgttatgtttttgtcttttaaatatttaaccatatctaaggctgtacttcctgaatcgatataaatcgaatcaccgtcatttacaagacttgctgcaaccttagcaattccgtccttctctttgacattcttacttttctttgaaagaacaggaacttcatagctgcctctttttaaacaagctccgccacctcttagtaatgttatctctccctctttctccatggtcttcaaatctcttctgaccgtcgattcagagacaccccctaaagatttacaaaactcatccaaagatacaacctcattcttctcaagcaattctgctatttgtaatcttctctcataaggtatcatatcttttcctcctgcgtatttgtaatcaattctcaaagagaattgattgcctgtatatgtaacgataaaaacgttacagttatacctatataatatcctttaatggttaaaaatgtcaataataatcggggtttattccacgtcctccaaagttggcattgaaggctgtgctcccattcggcaaactgtaattgcactacacttagttgcaaacttacaagcctcaatcaggctctttccttcaattattgaatgacttactgctccgatatatgaatctcctgctcctgttgtttcaatcgcatctactttcattgccggaataaattcgattgttccattttcgtaagccactgctccatcttttccaagtgtgaaaataacattattattgtatttttctgccattttcttaatttctgtttttgccttttcaactgaatcgattttttcgtgacagtaaaattctgcctcgacttcatttactacaagaatgtctaccttacttaaacattcttcaggtaattctattgcaggtgctgcgtttaatacaactgtacatcctgcttcttttgccttatcaattgcataagcaataatttctaccggaatctcgttctgtagaatacatacacctgattctttaagaataggcattgcattgtctacatcttcctttgtaacctcaaagtttgcacctcttacgatgcatgcataaacgcttccgtcttcaactgcgtttataactcccattccactacttccgggtacttttctaatataatcaacatttacaccatactcttttgctgtgttaaccaaaaagtctgctgatgcatctgttccaacacatcctaccatataagttggagtttttaattttgctgcctgaactgcctgattagcaccttttccgccggcactaaatgtcgctccgttggctgttaatgtttcacctttaaaaggtaatcttggaatttttaagatgacatcatagtttaaacttccgataactgtgattttcttattcatccttattttcctcctactcaaaatttattttgtttcctattattaaaaagaataaaggcgcaaagtttatttttccctgcgcctttattataattcaattcatattgaaaatatattagtgccgcaatgtttattaattttttgcggtttattttttagttttcagctttcttatgtcttgaaataaatcctgcaacgtcctgctgaatgaattcgaagtatgaagctacgatgataataataccagttacaacgaactgccagaatgagtcaacgttgataactaccatacctacttttaatactgctaacattaatgcaccgatgaatgttccaagtgctgtacctttaccacctgccattcttgttccaccgatagctgctgctgcgattgcgtttgtttcatatccgctacctgctgttgcttctgctgaacctaagcttgctaacataatcatacctgcaattgctgagcaaacaccacagaagatgtatgcaatgtattttgtcttaactacgttaacacctgataacttagctgcttcttcgtttccacctactgcatataagtaatcaccacttctcatctttgataaaagaatgtgtgctactaagaatacaactaccataactataatgtagtatctgattcctccaactaattctccgttgaagatgtttctgtatgagtccggaacgtttgttacaggtacaccacctgttactacataagcaagacctctgtataaactcattgtacctaatgttgcgataaatggctgtaacttcatcttattaattaagaatccgttaaatgcaccaagaactgcaccaactacaagtcctactaaaattccaaggaatggattcattccatagtttactgtacatgaagcaactataatacctgtaattgcgtatgtacaacctactgaaaggtcgataccacctgtgatgattgtaaacatcatacctactgcaagtacaccgtttaataccatctgctgtaaaatagttacaaagttgttataatttaaaaagttactgtttagtactgtaaagacaactgccatagccaaggttgccagcaatactacaaactcacgtttatatttatcccatatatttttcattttgattacctccaattgctaaatcaagaattgaatcttctacaaagtcaaccttatttgttaactcagctgttattcttccttcactcataattatcattctgtcgcttatacccatggcttcaggtaattctgatgaaactacgataatactctttccatcttctactaactgttccataagtctgtaaatttctgccttagcacctacgtcaacaccttttgtaggttcatcgaagataattatatctacatctgtagacatccatcttgccaaaataactttctgctggttaccacctgacatgttgcttgtcatataatcaacacgtcttggatgtacgtccatttcttcgaagtaaacttctgcgtttttaatcttcttctttgtgtctgtaaatggacctgtcatatatttctctaagcttgatattgctatattttcatagttattagaaagattcataaatccctgtgtttttctgtcttcaggtaataaaccgatgccggcttttaaggcttttgttgtattccagccattctttacttctttacctttaagaataatctttcctgatgttctctgatctgcaccaatcagtgttctcatgacttcagttcttcctgctccaactaatccgaagaatcctaagatttcgcctttgtgaagttcaaaacttacgtcattataattttcattacataaatgttctacttttaatactacttcatctgtcattggactaggtttaagtcttgatgccactgctgcaacatttcgaccaaccattgcgtgaatcagttcatctcttgtagtacttgcaatgtccattgtctggatatattctccatctcgaagaattgttgctctgtcacaaatctggaaaatttcttccaatctatgacttacatataatattgttacgccctgttttttaagttttcttactacttcaaacaaagcttctgtttcttttgttgtaagtgaagctgttggctcgtcaagagatataattgttgaatgatgatataatgctcttgcaattgctaacatctgcatttcacctgctgttaatgttgcaaccaaatctgatgatttaaagttacagtttaagtcttctaatattacgtctacatctttattcatttttttgaaatcaataaagattccttttttaggttcatatcccattgttacgttctgtccaacggtaagatcttttactaccaatgtttcctgatgaaccttagatattttgccatttacaatagcatcatttgtgtctttaaagcttacctttttaccatgaagtcttacctctccttcatattcaggataaactccatgcaaaatattcaatagtgttgatttccctgcaccattttcaccaagcaatgcatgaacttcaccttcttctactgaaaaagagatatctttaaggacgtgtactcccggaaagcgtttgttaatcttaacaaattcaacagccttcgccataatcgttcctcctttatatatgtgggagaaagttttacctttctcccactttacaaatcaaatcttctaaattattgtgtctaaactattctgttacatattttggatctgtccaaccaatgatgtcttttgcgtctttatctacgttagtcttatcgataagagcctgtggagtatgtgttactctaggaatatcctgtccagctaatactcttaatgttacttctgtagcaacctgtgacatatagtaaccaaatgaatcaactgttgcatctaacttaccggctctgattgagtcataagcttcaccgataccatcaacacctactactaagatatctttcttagcttcttcaactgcttctactacacctaaagccatatcatcgttgttacagaagatagcctttaagtctgggttctgctgaatccatgtgcttgctaattctttagctttctgtctatcccagtcagcattctgttctgctactacgttaagtcctgaattgttgtctttgatccatcccttgaatcctgctgttctttcacgagctgcgaaagcttttgccataccgattacgatagctacatcacctttgtcaccaagcttctttgaaacccattcagctgctaattcaccattctggtaagcatccggtcctacgaagtaatctgctgctgcgattaatccatcgtttacgttaattgtaggaatctttttgcctttagcgttatcaactgatgctgttaagtttgaatctgagattgggcttaacattaaagcgttgtaaccctggtttactaagttgtctgtcattgtctgctgtccgatttcatcactttcatctgttgttccgtcaatcttaattgatacgtctacgcctgcatctttaagtaccttttctgactgttcataaccatttttaaagttacgccagaattcgtttgagaatgactttgcgatggcacccatctttaaaccactcttaacttttacttcgtctccgttatctttacggatgtcttcgatagtcttgctgtctttaactgtatcagggttaaattcctctgtagcctgtgtgtcatttgaggctgctgttgttgcgttgtttgagctagatgatgaatttccacatccaactaaaccgattaccattgttgctgcaagggcaactgctaaaaatttctttctcatttgtgtgttctcctttttcttttttattttctctttatttcaacatgtccagaacaaggcgctgtgcctcaactccgtcacgtttagatactacttcagctattctgtccattccgatttcatcaattatttttgaaatcttttcgaatgaattgatgtttgcctgtgtttcaagctttgcgttttctctgattgggaatgtatcgaagaatacaactccctgataattgtacttctttaaatagtagataaactcagctgcgtgagctatatttactgaaccaaatatcattccgctgtccatctgtgaatatccgtcgttcatatgtaatccataaagttttcccatacttgctgcaagtgctagtccgtatgccggggaatctctcttcattaacatatgacagaagtctaatgtacatcctacatttggtctgtctatctctttaataagaagtaatgtcattcctgtgctgtcaaccattgagaagtttcttggttcaaatggtttgtactcgatgctgtatttcatgtctggtgcataatctgctaattctctgaaagcatctatcatttggttccatgcttcttcatagtcaacttggaacgcataatcaaaaccgtcattttctaaccataatgttatgtatgttccaccaagttctctacaaatatctgtagcttccttacaatatctgatggctctttctctaagttccggatcaggatttgttaagtctccgtttgtgaaatcatttctccaacgaactgccaatccgttaacttttaaatcacccatggcctttttgatttcttctaaatcatatcctgcaaaatgttccgggtagttaaactctaaatgtgtaatgccgtccatctcgtgatatgccttaattgcatcaaatacgttctggccttttaatataaaagaattaaatcttcctgcgtaattcatatttccttcctttctttgttatttcttttatcttttgttttttcaagttttgtcatttgttttcatctgatagcataattgtagtactctttccattttctgtcaactattttcaacatttttcacggttttcacaatttagacatatttcttttgtgcatattgtacagtttttgttgttgaaaacgtttcatttgttgtcactttttgctttgtgttatttttgccttttccggtttttttgatttttctaacaataatgttatttttcgagtatgtaaattgtattttttgtgtaatatgtatgctgattgttgggtatttgagataaaattataaataattctttatttttcattttctgtcatttgttttcacttgatatgagagatttggggtggattacttcaagactattcgggatttgtactatatatgggccgaactctaagtctgtaactattcaagccaaaagaaaaatacctcacggttttcattttctcaaaccgtgaggtattttggtataatctaaggttgtcctattttttcaaaaaatgttctctattggggtattcttctctataggcttccagcgctgctgtctgaaggatttcaaattctttatccattctgaacatatgaggtgttaggaatgcaatgttgcttatttgttcagctatcttttttgcaatgccctcatcagataactgtcccagtccaaaaactgccgaagtgaagcctctacctcctcgacttacctgaataaattttttaaatgtattctttagctcatttttaagaatgccacgttgctcctctgacagaatttcatagttgtcaatgcacaaattattaataatcttgcacaactgttttcttttcgctccacctacatcagtggaaccactttctgatatgtatttcatttccataagatagcctatgaataagtcttttttaggctttctttttccatatcttgctgtccataagcattctcgtagttctttattattgtctgaatctatatttttttgaaaaatttctaatcttttctcaggttccatttcttcataaaactcttctccaaaaagttctttttttaactcgtttttagacttttcatttgtctctttcttagattcttctttaaactctttgttaaacctttcattccacatatattgacccgcctttattttatgaatttgtctatgctgcttttttcaacttttttgtattgagacacataatattttcccagctgtaaattatgatttttcatactattgccctgataaatatctacaactaatcgtgaaatttctaatgcctgatcttctttgtcattgtataccgttccctgcatttcgccattctttattgctgttaaagcatcatccaaaccgtcaattccaaaaataatcggccactgcttcttgtcatattttgattttttatatgcctccaatgctcctaatgccatttcatcattgttggaaattatcatttctatcttatcgccatattgttcaattaattggtttgttctgttttctgcctgtcctctattccagtctgcaaactgataacttaatttttccagttttatacctttgcctattatggtttttacggaacagtccgttctgcttatggcatcctgatgccccgcttcaccttccaataatacatattgaatttttccatcataatttttatcaacttttttattcttttttatatattttgctgctatctgtccctgcattttacctgactgttctgcattacagcctacataataaagtttatcccattgcttcaaatcctctttaaccggttccctgttaaagaaaataacgggtatgttattctgtcttgccatttttataatcttagaaggctctgttctatctactaaatttatacacattatatcgcatcctgcatcaatcatctcttcaacagcttcattttgatccctttggtcattgtctccatttctttcggagatcattatcttcatatccttcgtttccatagtttttaagttcccttttagctgttcttttaacgcatttataaaaggatcatcctgtgtataagtcactatgcctactctaagtatgctcttcttctcttctttattactttgacaaccgcaaatattgcagactagaattattcctaaaatcaaacctacaacaattttctttcttttattcatatgaatacaaaaacctttcaatatcagtagtaaataaatcttttttataaactattttgtgttccacattagtacttttcatcacataaaaagtatggtttagtctttcagttatctccttaacacttttatatcccatttcatatccgtcaggaattatcacacattccacttttccataatccacaaggacaagggactcaacattagttccaacaccatatattttcgcaccattatacgaatcctctctggcgttttcacccaaatcatctagtgaatagttatctaacgctactattgcatcaactttactcctgcgatttacaattttaacaatatctttattttctatgccattatatttccacgcaactttcatgccactatcttttattgcatcttcaaaccctttatatctgtcagctgtttcttctttttctttctgtcccagtacaatgcctattttctttatagattttccaaccatttcttttccaagactatagccgattttgtaattatcaggctttattacagggtattcagattttttattttctcccatataaacatcttcagttactaatataaatggcttgtctccacaaatagtcttcatttctgtttttgttttgcttcccggagccggacttattataaaagcatcaactccattttctatttgctcattaattaattctttttgatcatctatgttgttgatttcatcagcattacatataatcaaatgaatattattgactttggctgattcttttaatccctttatgaaagaattccaatttttatcacctgaattttgtacaattactgcaactttcttttctgtctcattttgatcaaacattttgaaagtgaaaaaaagtgctaaaacacataatataatttctgtagcaagaaagattactttattctttttcatttttgcccttcctttctacacttttctcttccattttactttgattttcactattaaatggtattgccggtatatgtattgtaacttttgttccctcatctgcttcactttcgacttttaatccatactcttcaccaaacataagctgtattctattatgaacatttattacgcctacacctgaaccatgttttggaactttactgttatctgtaagaatattttccactacttcttctctcatacccattccattatcttctatagatatgtatatatcctcttcaatctttcttcctgtaacagttatcattccgccttcatcagcatccatatcgcctacaccataataaattgcattctctaatatgggttgtattaccagttttacaatacagtaatcattaatttcttcatcaatgtggaattttattccaaatcgttctttgtatcttaccatttgaatgctcatataacttttactgtgttgtatttcatctgcaattcttattattgtttttccttttgataagcttattctaagtaacttagcaagctccgaaatcatcaatactgcatctgcgtttctgtttgcttccaccatccaggtaattgattctaatgtattatataagaagtgtggatttatctgactttgcaatgctgctaattcactttttcttctttgagtctgttgcttaataatctcgtccatcaattcttcaatctgttcatatgatttctgaactgaatatcccagatgtcttatctctgaagaacctccaacataaatgtcttttttgccacctgcttcataagccttaacggattcatctaactctctaataggctttgaaattctctttgaaataaatctatttacaacaagaagcatcatcagcaatattataatggttattacaatataatatctaaactggttcatgctcataatttgcgtgctttccggcacaacacccacaactttccaacctgtatatgccatattacttataacataatttgcttttcttccatttaatttaagttcatatattccgtcttcatatgaagcaagttccctgttgctttcggctaacttgtttctgtcaatttcaacctttcttggatgataaattatatctccattaccatcacacaaataataatatacaccgttggaattaccattaattctttcaaacgtttcttcaataattgaatatttcatatctactaataatattccacttattggttcttctccatcatttatgtcaactgaacggctaagagaaataacccaattatacttgtatgttccatccataaatatattttgcaaatgaggttttgaaaaatgaatgttctctatttctttctttgcattataaaaccaatcctgttttttaatttctacgttctttttctctgaagaaattggttctgatgccataagttttccttcattgttgtacaaaaccaggctttgtattttgtcagaatttatttcgtaaagaaggctaaactggttattaaattcctgactcgaaacgtcgtattgttgaataatgttatagttcgctgcatttgaaatctgtcttatattgtacaaatcggaattcattttttctactacgctgtctactatgccctcagtgcttgatatatttgtttctttaactgacagcttaaatctgttataaattaacaagcccataactacagtaactgcaattgtaagcatagttaaaacagtcattattactgactgtatatcaagacctataaattcccctttgtgaaaccattttcttcttcctctattaagatttttcccgcctgttttacttttatttttcaatattccatccctgcatatatttatgattttaattttgcatttcgatatttagatggtgaaattccaaatttctttttgaatacataactaaaatagtttgcgtccatatatccaaccatttcaccaatcttgtagcttttctcatttgtatctaaaattaactttgctgctatatccattctataatctgttaaataagatacaaaagaaattcctgtttccttcttaaatatagaagaaaagtatgaattagacactcccattattgagcaaaccttatccaaggataaatcttcttccatatatctgtttgcaacgatattttttgcgtcatttatcagtcttcgtgatttactgtttcggacactctttaattgttttcccatttctgtggaaacttgcacaatccatttttttagtgtgctttcatccatttttggcaccttttcataagggttgctcatttcgcccagaaaatcgttaaagtcaataaaattattttcgcaaaatctgtagaatgctcctaccatttccattgtatataacttatattggctaaccgtattggaattaccatgtattctgtcaacttccctgtttgttgcagcctctatttcctgttcgtttcccagataaatggccttaaacaattcatgcatctttgtttcttctgactgtaatcccatattttgtttgtttgatgtgatttcatcaatatttatggctctctttgttccatataatactctgtatgatacggcttcccttgccccatcatacgaattattaatatttgatatgttatcacataccatacctattcctgcagttactactgctccaattactctgttaacccacttacagaatttatcacaaacatcagtaagttctactgtctcttcttttgatttcaattctataataagaactgtatttcctaaatatataaattccctacacttgaattttcccactattcttgcttttatctctctctcaaccgacatagataataataatggcgacatttcttccggaacattattttctgaagtgtgaaaaactgcacaacaaaaatacggtccgtttaaatctatcttgtatgcctgcaaaaatttctcatattcactttcgttaactcttccctctattaacgaaacaaaaaagttagtctgaataattggcaaaacatcatcgaaataattttcaagcttttgaacatttaacttttcttctctttctttatccaatgaatttttaacacgcttaaggcactctgacaattccacagcgttaattggtttaagcatatattcatctatttcaagatgcactgcttcttttgcataatcaaattcatcaaatcccgtaaaaataattatatgaacatttctgtattcatcgtttaatcttctcgacagttccagaccatccatataaggcatttttatgtcagttataacaatgtcaggttgtaacttttctactaattctaatgcttttacaccatttgttgcactgcctacaatctgcaaacctaattgttcccataatattcggctttttattgcatcaattacttcttcttcgtcatccaccaaaataactttgtaattttccatattagttttttctatatcagtattattttttatttccatatttctcccacctgtttttttattataacaaactatgaattgcttttaaaccaatttagactaaaagccgttccattaatcatatagataattagaacgacttttagctttatcattaagaaatattttctaatatttattttttctgtacatatttaaggcagtcaagagttactgctgcaaggatgataataccttcaaaaataaactggaggtttgtatcgattccaaggattgtaagtgaataagtaagagaagtgaaaataagaacacctgttactacacctgaaatcttaccaataccacctgtaaatgatacaccaccaactacgcaggctgcgattgcatccatatcccatccttgtccatatgctgcactacctgaaccaatcattctgttacattcaagccatgaaccaaatccataaagaatacctgcaagaatgaatgctcccatagttactttgaatactgagattcctgatactgctgctgcttcaggatttccacctacagcaaacagattttttccaaaagttgttttattccagataaaccatacaattgcaatggcaactattgcccaaagtataattgttgggaaaccacctatttgaggaatgaaaatattaggtattgcctggtcaattgcaccgaatgaaacaccttttgttgcatatgtaactaaaccaaagataataagcatgttagccattgttgaaataaatggatgcatcttaaatcttgccataaaaaatcctgctatcatagcaaagaatgttgtaagtacaatgcagacaactaatgccaaaattgctctgtttacaggacccatacttgaaaagtcaaatatgtggccaaatactccacctgtattaataccgttatgcattattatggtcgacgctaccatacccataccaaccatacgtcctacggaaaggtccgttcctgttaaaaggattaatcctgcaaccccaagggcgaggaacattctaggggaagcctgttgcagaatgttaagtatgtttgtgtatgtaagcaactgtgtattttttactattggagttactgcacataatccaataaatattagaacaataacaatatacaagccattcttgtaaagaaactgtgctaaattaaatgaatacttatagttttctatactctgtgctctcttttgtgcaaatgtatattttgacattcgcaacaagtcgattaaatgatacttatgtaaaaacgcatcatgttttctgtctttgatttcctgacattttgattcatgtgccatcttcgcatcatataatttattcttgtaaacatatttttcatctttaatctcatccggatcggataatttacttaactgtgctgtatgttcttcttttaatactgcacaaattctctcatactctttcttttcagcctctttttcagcttcacaacatttaaccaccttattgtagtactggctgttataattctttgaaagataatcttcagcttctgcaattaatttgtttactttgtctttattacgactttcaactgcgtttgcctcttctaatacttttttatcgttttcgataatttttgtcttttcttcttttgatagatttttgctttcttttacaactgcaatatggttctttaagcttctaactttgtctgtaccatctaatcttaaagcatctatctgttcctgtatttttcctatatattcatctatgggctctcgaagttttaactcctcttcagccgaaagaataaatcctttctctgccatatcttatgctcctctcttttttacaaatacttagcactaagtcttaataattcttcctgatctgtttctttagtgttaactattcctgccaaatgtccattagacataacgcctattctattagttatacctaaaatttccggcatttcagatgaaacaactataattgtttttccctgttttgccatgtttataatcaattcatatatttcgtatttggctccaacatcaatacctcttgttggatcatccatcataaagatattaggtgaacgttcaagccatcttccaaatattgctttctgctgattaccacctgaaaggcttgaaatcatatcgtccggtcccatacatttagtacgcataacttttatttcatttgccgttgcacgaaccatttcatctttggataatgctataccttttttgtagtgattcatatttgcaatagtagtattaaatgtaatgtctccctttaagaataatccattggcctttctttcttctgttataagtgcaaagccatgatccattgcatcctttgttgatgtaaaattcattatttttccatcataaattacatttcctgctgctcttgtacgcattccaaatattgtttcaagtaattccgttcttcctgcacctacaagtccatataatccgaagatttctccttttcttatgtcaaatgatatattctgaagtttaggtgcgtatttagtagacaaattttccactgagaaaataacttctcccggcttattatctacaggtggaaatctgttatcaagtgaacgtccaaccattgctgaaataagttcattcatatctgtgtctttgctgtcttttgtcataacaagacttccatctcgtaaaactgaaacctgatcacaaatttcgaatatttcatccattttgtgtgatatatatattaatgagattccctgttctttcaactgtctcatcatcttaaataacttttcaacttccggtgctgttagtgatgatgtaggttcatcaagtacaattacttttgaattgtatgatatagcttttgctatttcacacatctgtctttgtgatacagacattttcttcattggctgagtcatattaactgtaattccaagttttctgaataagtctgaagcttcttttttcattcttccttcatcaactacgcccattgagttcttaggatatcttcctaaaaacaaattatctacaacacttctctcaaggcactggttaagttcctgatgtaccattgccacaccattttccagtgcttctttaggacctgaaaagtttacttcttttccatctaatattatcgttccttcgtccttttgataagttccgaagagacatttcatcattgtcgattttccggctccgttttcacccataagtcccatgatagaccccggtttaacatttaaactaatatgttttaaaaccttatttcggccaaatgatttgctcattccattaatcgacaagatgtattcattcttatctcctgccatatttatacttcctcttcttttaataagggggctttaaagcccccttctacaaccagtttaatctttaattagaattctattttgaaagaattgatgtatatgaagctgcattatctgttttaaccatgttaattgcaaatgcatcatattcgctagggttacctaaacggtttgtaatatttgattctgtctgaccatcaccaccgatgtaatctactttaaggttaagaagatcatcatacttttgaagtaatggctgatatgttgagctaaggaagttatctgatgcattgtaaatgttaagccatactttcttttcaggactcttacttgcatcaagctgttttgaaaccttgtcataaatctttgttgaatctgtaaagtctttataattgtcttctgttacagctacatttaatgcgtaatatgatctttcttcttcgctgtatctgtaatcttcatcctttgtaaggcagtttcctgcatcatctgctgtaccgatacctgtatctacatctacaccatcaagtgcattacgaagaactctaagtgtaaggtatgcctgtacgtctgcgtgctgtgaaattgttccgccgtagccttctgcaattgctgctactgcatcgctgttagcatcatatccaaatgttggaactttgttgtcctttgcccatgcattgaacattgacattcccataccatcgttattagaaacaactacatcaatctgtttaccaaatgaagctgtccatgttccaattgcgttacctgctgttgctgcatcccatgttgctccggctgagtttttcatttcctgagaagcaagttctctgattgtatatgtttttccgttaacttctaattttgcatctttaactacttttgatgttccatcaacgtttgttcctgcaggtgatgaatcaacgcttccgtccttttcaactgctgtgccaagctgtgaacgaacaccacatgtacgtgctattgaatcattatgtccgatatcaccaattgcaagtacatatccgattactccgtctccgtttctatcgatcttgtcaatattctttttgatgtactcaagtaccatctgtccctgaagttctgcaccctggttagcatcaaatcctacataatatgttttgtcattaaatgtaagtgctgtcttatcaagttcacctgttgaactgtttgatggctgacgattgtaccaacataaaggcttatccttattggctacgtctccgcctgaactgcttccgccacttccactacttgaacttcctcctgatgaaccacatcctaccattgaaactccaattgctgccgctaccaacactgttaataattttgattttctcatttaactgttcctcctgttttttaactttttgttttcctgtctcattgactacgttcattatagattttatcttgtacaaaaaaaatagaatatttttagattaaatagcaatttttttctattttttactttttttatggatatttttactaataacgtttttattttttatgtaattttgttgttatttgcttgttttttcttgtataatttgtgtatttttgtatttttatgttaaaagttgtccttattcccatccagccattcatccaccctaaccgaaaataagagccgcactaagcgactcttattttttcattaataaatatcaattattatatattctctatttttctaacattgtttttgcaaatattattgcgccttttactccgttgtctactttatcttctgagtactggatttcaaggctttctgccggatacggttttcttgcatgcacatacaatctttcttccaaataatccttagggaagcctttcatattaattactccaccaccgaaaataatggagtcaggatttagtatattgatttcagcgcatgccacgcaggcaatattgtccacaaaattctttagcaccgtatcattgcttttctttacaaacaaatcattcatgtctacatcaggatagtattcctctttcaactcaaccaacttccaacctgacgcatagcactctgagcagccaaggtttccacagccacattgacttgttccaccgatcattggaatgtgaccaagttctcctgccacaccatctttgcctgccagtggttttccattgataaatattgcgttacctactcctgtgccaatgtaaacaccaatgcctacaccttcatcactaagctttttatcatacttgtcccagtaatataacatatttacgtctttttccaatacaacaggaatgccaagattttcttctaattcttttccaagaaaaagaccatccattccttttatgttaggaacctgaagaatctgctttctgtctgaacttaaagttgcagggattccaattgcaatctgcttaacctgcacattcttgcaatacttatcaagataattctttaaaacttcagtcaaactttctgatatgtttccgtccttaaatgtttccttgcttgaaaccctttcaaaatccacaagctgatcattttcatcagtacgcccgattcttatattagttccgccgatatcaataccaattacacattcattattcataagtcacctctgccttattttatgcacaacaattctgttaaatttctactttgacacttctacaagcttcttaactctttaacaatctctttataagatttttccttgccaaataatgctgatgttccaaggataaatcctttaacaccaaccttgcttaaagtttccactctttcaggtgagcatgcaccatcaagcattacctcgtagccatatttttcttttaattctactagctgtgcaatcttttcatctactgaagagatgtacttctgtcctgagaatcccggattaacactcattaccattacataatccacaaatggtaacaatggcttaattgtttctaccgctgttcccggattaattgcaatgcccggctttacgcccaagtctataattgactgtaatgttcttgttggatgtacatctgattcgggatgaatataaataatgtcaattcccaattttgcaaacttctcaacatagtttccaggattttcaatcatcaaatgtgcatcaacaggtattgttgatgctttgcaaatatactccacatcctgcaatcccattccaaagtttggaacaaactgtccgtccataatatcaatatggaagatatctacccctgcttcaattaaatcattaacttccttctccaagtttctgtaatttgcacacatcattgatggacataataatttttccataatattcttcctttcttctttcatgattcgataatgtaaacgcttacatcttttctaaaatctatgagaaacacatatacgtttcccatttagttgcctcttatgtttcttacttgtttttagtgtaaacgtttacattattattgtcaatatattcttctataatttatcaaataacttattttcctgtttttcttttcactaatttcaccggaaccacaatatggctttcttccggcctttctccgtccattagtttttccaacatttcagctgctttttcagacattaactctatcggctgttccaccgtagctataggtgttgtagcaatctctgataacaggctattatcatagccgaatactttcacctgagaaggcacctttatttttaattcttttaatgcctttaatacacctatggcaataaggtcagttgtggcaaaaactccatcaatctctttgtctttcccgaatagttctatggctttctcgtaagcatccacctccgatacattgtcaagacttactaatcgtggcttaccgcctgtttcttccattgccttacaatagccttcccatctttttatatgtgttgagcctttatccttagggcaaaaacaaattatatttttgcaaccttttttaatcatttcgtttgttgcctgatatccacctgacacgttgtcgctttcaataagaaccatatcctttttggtgtttccatacgccggttccctgtctatgtaaaccgtaggtattgaagtctttttctccttctcggttgtaacggagactatatgaataatcccccctacgtgctgagcctgaagcatattgatgcactggcgttccattttgtaatcctcattggtgttacatattatggttgcatatcctctttcaaaaaaaatagtctgcactttttttgctattttgctaaaaaattcaatggaaatatcaggaacaattattccgattgttgtgaatttctgagttctaaaaccttttgccaaaagattaggtacatagtggttttcttccataacctgcaatattttcttttcagtttcaggtgcaacctttccattccggttaattacccttgaaacagtggcaattgacacccctgctaattttgcaatatcttttatggaaatactttttttactcataactactccttttttggcaaactcttaattctaattgtaaagcacattagcttatttcgcaagaaagaaaaggagacaggaaaaaatcccatctcctaaaaattcttatataactctaatactaaattctttattagaaactgtttaaattacaatatccattaagctaaatagctttcaaactataatttattgttaaactaaatatccttaagattataatctctttaataatgcttctgtcatatcttcgtatcctggcttgccaagtaatgcgaacatattcttcttgtagctttctacaccaggctggttaaatggattaactccaagaatgtaaccacttacgccacatgcaaattcatacatatagaataattcaccaaggtaaaattcgttctgttcaggaacccttaccataaggttaggaacatttccatctgtgtgagcaagaattgtaccgttcatggcactcttgtttacaaaatccatatccttacctgctaagtagttaagtccgtctaaatcttcaggatcttcgtcgataactactgaagctcttgacttttcaatgttgattactgtttcaaacattgttcttgaaccatcctgaatgaactgtcccattgagtgaaggtctgttgtaaggtcaactgctgccgggaaaatacccttctggtcttttccttcactttcgccgtacaactgcttccaccattcaccaaagtaatgaagacttggttcgtagttagctgtaacttcgataagcttaccttttcttaataatatatttctaattgctgcatatttcattgcatcattttcttcgaatgcgttgtttaatgctttctctcttccgcttgctgcgccttccattaacttgtcaatgtcagcaccacttactgcaattggtaataaacctactgctgtaagaactgagaaacgtcctccaacatcatcaggaactacgaagctttcgtatccttctgctgttgcaagtccttttaatgcacccttcttagcatcagttgttgcataaattctctttgcagcttcttcttttccatatttcttttccagtttttctttgaaaactctgaaagcgatagctggttctgttgttgtaccggacttagaaataatgttaactgagaaatctctatctccaactacatcaagtaatccctgtaagtatgaagggctaatgctattacctgcatagtaaatttcaggtgtctttcttacttccttaggcacattgttgtaaaaaccatgtcttaaaaattcaattgcagctcttgctccaagataagaaccaccaatacctataacgataagtacttctgaatcgctctgaatctttgctgctgctttcttgattctgtcaaattcttctttatcataatcaaccggcaaatcaatccatccaaggaaatcattacctgcccctgttctttcaactaaaactttttttgcgttttcggcaatttctttcatgctgttaacttcatcatttgagataaatgattcagcttttgaataatcaaatgtaactttagccatgtctcaattcctccgtttattacaaaactaaattacattataaaatgttgaaacgattttttcaagacttttgccttacattgttgattattgtagaaattcgccaatcacttggttaaggatttgttcatctgattcaaattccttgttattagtactagtttcagattgcttttcttgtacaatattttcatttcccggtttttccatatggccattttctctaaccacaactgaatcttccaaataatcaaccaaaatataggtaagttctgtctgtttttcggatatttttgtgcttcggttaatcatgtcaagaaccattccaaagaaatatccaatcaaaacgtatactatcgcctctatcttactttttcccgtaagataaattccaaaacctgttccaactgccaatgtaacacttaaaataatacacacgtttataatattattaagcttatttaatgaaaatatacctaatttgcatttattcagacttcttgcagcaaaaatcattggattcgccacgtgcccgtttatttcttttatgctgtcatatttcattttaatctgtcttaaagttgcattctttggatttgacatatgctctgcttttctaatcattctgccatatccaaatgccgccagccattttgtaaaaattcccaacaaaaaaatacttcccattacgtatagaaagtatttctcgttaattatcttcggtgcattgttataaaaccattccttcatttcaataaaagtataatctgccatactaaaaaatccccctcacttaaatgtatagtaatccatctgaaaacttattagcattttagcacattttcttttattgcacaccaaaaaccgttcgtcgtaattcgccatttaatttttagattaaattgttttccttacaaaaatagtaaattccatcttccgcaacatgaccgcaaatctgctctgatatggcttttaaatcatcagatgcatttcccattgctataggatgtccaacttgttcaaacatttcaatgtcattattgccgtcaccgaaagccattgcctgagacttgtctatgccatagtattcaagaactttatttacgccaatgccttttccaacgttttttggaataatgtcaatagcacggttccaccaggcagcaattttagcattttctgtatctttcactataatgtggtactcttctttgtagccacccatcattatctgataaacattatcttcctcaaccgttctgtcaaagtcctctgacacgtcaacagtcatctttgctattgcaaaatagtcaaccaagtctttttcactaccattagctataactttctcatcagttgccacagctattggacaattaattcccgctgcatttcttataattgttttaatatcatttgttcttaagggattactatatatctgcttgtttccacaatgacaatatgagccgttaaaattaataatggcatcaaattccacgccctggaattttggtacatccattggtgaacgtcctgttgcaatacaaattataatgcctttttcctgtaatcttcttagtgtttcaagcatcttttccgtaacacatttcttttccatatcgattagtgttccgtctatgtcaaaaaatatgattttagtgttatccatatctgctcctaataatttttaatcatacaatttataagtttaattgaattttctgctgcttttgcttcaaaagtaggataatccatctgtgctccaccgtctgctttgtcagagattgctctaattacaacataaggtgttttatttaaatatgcagtgtgggcgattgaagctccttccatttctgcacagtcaccattaaaggtatctcttaaataaacctttgcttcatgtgttccaataaaccggtcccctgaaactaccttgccttcaaaaattttaacgtcaagccctgcttcctctgcgctgtcctttgcaagtttaataaggttctcatctgccttaaactctgactggtccatatccggaattacccctttggcatatcctaaaggtgtaacgtccatgtcgtgttctaacgcacttgttgaaactacaatgtcgcaaatgttaatatcattgttaagtgagccggcaacacctgtgttaactaaggcacttacgccaaatacacttacaagtatctgtgcacaaatggctgcgttaaccttgccgacaccacattttacaactactacttccttgccggcaagggtgcctttgtaaaagtccattgcggcaatgttcttgatttctacattttctaattctgatttaatgctattgacctctacgtccatagcgcctattattcctagcataatttctccttttctatttcaattgcaaaagctattgattctcttgtcacaggaaaaattttatatacgcaaacaataggcagaaattcgcaattttgcgagcatagcgtaaagcgcaaaacctactgtctgagccgtaggcgagtttaggttttcgctttgcaataggcggcggagcaaaataagaatttcaacgtgtttgcatataaaatttttcctgtgacaagaagttctgttagctttttcaattatagtcgaaacgggtttattatgactagtcataacgaacccgcttgttttttgttattttgtttgattttatgtaaaccaatcgttccacattgttttccaatttttacaacgaactgtttactttatttcttacttattttcttctaagtattgttcaagtgcttttgccaactgatctgggcatgatgttcctctgcctccgcagtcgataccttttaatcttttgattacttcttctacttccattccttctacaagcgctgcaacaccctgtgtgtttcccatgcatcccattgtaaattttgtatttgttactttgccgtctactacgtcaaagtcgattgctcttgagcatgttccttttgttacgtaatgcatttttattcctccagttttctttcgtatatttctgaaacgtcgtctatgtctccctgggctattagctgaccatgttcaaggagaatggctttgttacagagtctttttacctgtgcaaggctgtgtgatacgaataatactgttacgccgtggtcgaacattttctgcatttttcgctcacatttctttctgaacttagcatcacctactgataatacttcatctaatattaggatttcaggttctactactgtagcgattgagaatccaagtcttgctctcatacctgatgaatagttctttattggtacatctataaattctccaagttctgagaactctaagatttcgtcatatttttcttcaagaaattctcttgaaaatccaagtactgaaccgtacaggaatacgttctctcttcctgtgtagttaggatcaaagcctgcgcccaattctatcattggagcaatgtggccgtatctttttactgtacctgtcgttggtttgtacacacctgcgattactttaagaagtgtactttttccggcaccgtttaatccaaggattcctaaacggtcacctttttgcagttcaaaatttatgtttttcaaagcccaaaattcattaaagtgaatcttctgcccttttaatttctttattattaattcttttaagttatctactttttctttacttaagttaaagcggatacttatattttcaactttaagtgcaacttttttattgcccataatcagcctcctttagatgtataggataaatctgtcctgattctttttaaatacaattacacttatgataagtgcaacaacactaaacactgatgaataaatcaacatattgatttccattgaacttgtaaatattgattctcctaacaatacaatgtgtctgaagttttcaataatacaatacagcggattcattctgattactgttctaaccactgagcttccaatattatcaacataatagaatattgctgagcaatacattaacagcataagtaatacgtcccaaaggtattcaatgtctctaaagaatacgcagactgttgaaaggaacattgctgctgctatacacataattaataatacaaaaacaggaattactatttctataatatgccatgtaagtggaattcctcttacaacacctactatcgcaagtactataagtgatagtaagaatataacgtagttataaattacacttgataaaggatatagatattttggtacgtatactttctttatcattgcctgatttgatcttattgatctcattcctatctttgaggcacttgagaaacaactatataaaagtcgtccacaaagaatgtataccggatataattccggtccgtaaactccacctttacttccaagcatagatccgaatacaaatgtaagaactatcattgtaagcaatggttccaacagagtccatattaatcctaaatatgatcttctgtattttaatttaattcctttcttaactaattcaactaaaaggaatctatatctcataaaactgtcgatataattcttcataaaaatctccaatccaatatgtttgccctattaagcttagggccttctctctttaatttgtacttattctaagttcagtcctgtatgtccttaatttaggcgatacattgtttaattatatatatttacaaaaatatgtcaaatacattatgttttgtaacatttttatgtttctgcttattaatcaggttactttatctataaaagattaaaggcaccgactttttttacaaatcatttatttttttctactttacaccgaatactttttcgcatacacgctttgccgcattaccgtcgtctatgcaacagaatctattataaaattcctgatatttatctttgtattcttcattaaccttatcaatatttttaattgcatctattacttcatcgttagtctgaagtattggtcccggaagttctttttcaatatcaagataaaaacctctaagaacgtctctgtatttttcaaggtcatacatatagtacaaaatagggcgtttaagattagcatagtcaaaaaatactgatgaatagtctgtcatacaaatatctgacacaatatatatgtctgttatgtcactgtaattacttacattaataacaaaatcagacattcctgttaaatcaagcttgtctactatccaataatgcattctaagaagaattacatattcatcacctatttcttcttttaagcgtttaaggtccagtgccaattcaaacttgtactcaccggcaccgtaagaattatcatctctccatgttggtgcataaagaagaacttttttattctttggtatgccaagttttgtttttaattcatctgcttttttatctaaatccttatcatacaaaggatcatttgccgggtatcccaattctagaattttgtctttttcatacataaaacagctctgaaacttttctgttgaaaacgggttatctgataataggtagtcccattttcttgactgcttgtaaacaatctgcttatatttagggttagctgagtgtacatcatccatatcaaaaaccagttttttaagtggcgttccatgccatgtttcaagcattatctgactgtctctcttcggatatgcgtgaggttgtctcatattgttaacccaatatttacttcttgtcatgtaataataatattttaatccaaaacgcttaatcttcttacaatttccgtcaattacaagatttttgtcattaacaacccaaatatatttaaatttggaaccgtaattcttctgaaggtaccggtaaatatattttggctgtcctgaatagtttcttccaacaaaactttcaaaaacaatccacttgtctttctgtttcatcttgccaaaaacgtatagattaatggttctatacatatgctttttgcttgtaaacatcattacaagttttctcttaataagtcttatatttgaccatttttttactttttccatattatagtctgtggcatttttaagaattttcttttccacaaaaccatattttgaaatggtcctctttccacattccttaaccatagaagacattaaggcaaaatcaattgattctttatctgctgaattatcatgaaactttctgctaaatacttttacgtaataatcgcaggccattttttcaaagtgatttctaatatcatttttgctctctgataatttcatacaatcaagaaatgattgaacaaaatgagcatccttcctatcatcttccatttgagaaatagatggcagattaatcttgtcattgtgatatctctttacgtaaatactatccttattgcaaccataatttttcacattcataagaactttagtccaaaattccggatcagaataatatttctgctcttcattaaacttaatattattatctgttaagaatttctttttaaacactgtccctaaaactgttatttctgataaattggcgaaatttttaaacttataatcatatatttctgagaaattaaagttatcatcattattaaccttagaatctacttcctgttcgcttccatcgtcgataacatctccctgatccacattaaaagcggccttcttaaaccatgtatgaaaaatgcgaccatatgtaaggtctttattctcatccattgttttcattaatccggttaatgtatcttccataagataatcatcactatcaaggaaatacacatactctccattagcctttaaaagtcccaaatttctggcggcacttactcctgaattatcaccggtttcataaacttttaaattaattgactgtgaaaactcacttatcagttcttcaatattttcttccggatttatgttagctttgtctaaaacaagcactgtttctatgtctttataatcctgctccttaatgctgtcaaaacaatcttttaaatattcttttccttttccaaaagcaataataatgcttaacataccttctccttataaacaaattaaaaaatcaacttttaatttattaatctctataccttaaaaaccctaactacaatactgtgaaaacatgctttgatttcaatattatagttagggctacctgttttcaaactttaaaaaccgttagtttttaaatttttaaaattagttaaatcttttatttaaatactttttctactactctccgggctgcgtgtccgtcatcaacacagcagaatctgttgtagaattcttcatatctgtctttgtattgttctttgattttgtcaatattcttaattgcatcaactacttcatcgttagttaaaagcaatggccccggtaagtccttttccatatcaagataaaatcctctaagtacatctctatacttgtccaaatcgtatgtgtaataaagtacaggacgtttcaggttagcataatcaaagaatactgatgagtagtctgtaataagcatatctgaaataagatacaaatcagtaatatcatcataactgctgccgtcaactgtaaaatcaccatatttacttaaatcaagctgatctactatgaaatagtgaagtcttaataacaatacatattcatccccaaactcttcctgaagtctgttaacatcaagatcaagttcaaaaccatactgtcctgcttcgtagaactggtcatctctccatgttggagcataaagaataactttcttatcctttggaattccaagtttctctttaatctttgctgcctgctcttctctgtcaggtgcatacattgggtcattagcaggatatccgtattccaaaatcttttctttttcaaatctgaaacagctctgaaatctttctgttgagaaaggattgtcggataacaaataatcccatgctcttgtctgtttaaatacaatatccttgtatcttgggttcgctgaatgtacatcatccatatcaaatacaagtctcttaagtggtgttccatgccatgtagctaacataactgtttcctcacgtctcggaatgctaagaggctgtctcatattgttaacccaatatttgcttctattcatatagtaatagtatttcaagctgaaacgcttacatgttttatgtttccccggtatttcaacaccttttctgtcaactacccagatacacttgtacttgtctccgtaagctttctgcaaatatttatatacatatttaggctgtcctgaacagtttcttcccataaagctttcaaaaactacccagttctcttttaatttcatcttattaaatacataaagagtaatagtcttatttctaactcttgggttttcaatcatttttttgatttttctattaaaaagaacacgcatagctttctttttcatcttagcgaaatcgttatgtttcattgatttaaccattgccttttcagcatgtgtaaaatcatcttttaatactttgttattaatatcttttgcaagagttgctaattccgtaaagaattcatttctccatctgtcatcttctgaccaacgcattttcataatgtattctttaacaacaaactttgcaagaatataatataaatggtttataattctctcatttgttcctgctgccttaattgcattcttgtatgcaacaaaataatccggcattgtttcctctctagaaaactgcgaaattgcaggattcttagccttatcattatgatggcgcttaacatatactgattcttcgttgcttttaatattcttagcgttatttaaaagctgaactaaaacttttgtatctgaaaaatatgtctgtttttcattaaatctaatattattgtctgtaaataatgacttcttataaatagctgataaaacagtaatcttgtctaatttacgatatttttcaagcatattcgcgtaaggttcattaaagtcataaattacttttttatcatctgcgccattatcattattgtcgtcatcatcaccctggctgtcattaaatgcctgcttctggaaccatgtatgtttcattcttccataagccatatctgtatcttcatccattacgtccaataataacttaatagaatcgccatacaggtaatcgtcattatcaaggaaatagacatactctcctgttgccttatcaagaccaaggtttcttgcactgctgacaccatgtttatcttcaagataaaacacctttaagttaatcttatccttgaactcttctattaaaggttcgatattatcctctgtgtggtcaactacaagaatagtttcgtaatccttaaattgctgttcggcaatactttccaaacaatcttttaaatataatgtatctttcttatgagttactataatgctaaccattacttatctcccttagcagccatatctttgtggtttaaatctgtcttaatctgtgttgttgaaattccttctgttcttggaagatatacaacttcacagtaatcctttaaaaagtcgaactttccttcccagtcatttcccattacaaatgtgtcaatcttataatcctgaacatcactaatcttctgctcccagttttcttcaggaataacaaggtctacatatctgattgcttcaagaacctgctttctttgttcatatgtgaaataacatttcttctgttttgaattccagttaaactcatctgttgaaagaacaactacaagataatctccaagttcctttgctcttcttagcaaattaatatgtccatagtgaagcatatcaaatgtaccataagtaataactctcttcataatttataccatccttagaattctaaggtgtcacttttaagtgacctttatcctttccttattttatataattattttttacataatcgcattttcaaattcttccacagcttctctgttatactgttttggatcaaaattacatttcggaacttttccttctgaaaaagcccttaacccccccagtatactttcttctgaagaattaatcaaatattgtccgttttccatcagactatccttaactgatgaaaaatctgaaactattataggaagccctacaatacgcgcttctaataataccataggttgtccttcatatatagatggaagtataaaacatttacagtttttcattaaagtaaatggatttataagatttcccgtaagaataaccttgtccttaagattaagtcttgcaatctcgccctcaacctgttcccttaaaggaccttcacctataatataaagcttgctgttaggatattccttaacatattctccaaatgccctgacaagatttccatgattcttctctgtagacaatcttcccattgttacaaagcttgtttcattacttgccggtaatgaaaagttttcataagtacaatcgttatctaagctgtccaaaactctcatatagttaatagtattctttgcatatgagaacttaccttcaatctccggtcttgaaagattcttctcgttaacttccataactgaatgactgcaggaaactaatctgtcccatcttggatacaagttaaagattatgctcatctttctccttaacggtttcttatgacctaactttctgttggcatctgcaatcaaatcattatgctgccatattgccgtttttttattttttatctttggcaatattaatgcaagaattggtgagtaaccacaaaactctacaactgaatcaaagttgcaatcccctaccagtcttctcgcttctctttcaaaatacttttcaggcaacattttttcgtacgaacctttacagttaaaggccatactaaaatacatcttggacaactcttcttttgttgccacattgcctcctgttcttacaagtactcttacattcttattaatctggtttattcttaaaatctgatcctctgctataggctcataaagataagccgtaacgtcaaatctgtcataattcaaattatttaaaagacttaaaaatgaatgggttattccattctgaagtgctcttcccagcgaaataaatattttcttcttattctgaagcggtcttaccactttaatatgattatattcattcttaaaaattgcatttacaattctctctgatacatggccgtcatcatccggacaaaactgctctttggcatttctgtaattgtctgcccaatcttttactgcttcgtaaggatttgcaagcatttcacttagcttgtctaaactgtcagttgcaggtcccggaagtttttcaggttccatgtacaatcctcttgtatctttatattcctctaaatcaggaatataaaacattataggtctgtctgttacaaggaaatcaaaaaatatacttgaataatctgacacaagcacatctgtaacacttaaaacttcattagtatcaagtcttggacttacaagacaaccttttaatttctcatcatccttaatcttatcgaaaacagcctgatgtggttttattaaaacctgccattcattagtatctattacttcacaaaccttattataaagcttttcatattcttctccatctgcctgtggattggaaaaactgttgcccttccatgttggggcatacattataatcttcttattttcatctacattaacacctgaatatctaaggctctttatcacttcatttctatctgcgttaaaaatagtatctgttcttgcctgtccggtttcaataatcttaccttcatatattcctttaagcttataagcttccgtatacatctttgtatgatgttcattaggtgaaagcaaataattagcctgcaagaaatttctttccgtattggcagattcaatatttccgttaggcatatcatatcccataagcttaagtggtattccatgccatgtattaatataatcctgttcaggctttctaataaaacatggtggaaaagtgctattatttataagaactcctgcgctggcaagcattttgtaatactcgtcacttttgaattttacaaacttaacataatcgcatttctcatactttttaaaatttgctgcccactgtttctcatcgtcataaacccagacatgcttagttgatgtaaggactatactcttagttaactgatcaaatattgccttaggtccacaagtcattccttttccataaaatgattcatataaaattatgtttctgtccacatctaatttttcataatattttggataaggattaggcaaaagaaccttcgcaccaattcttgctattttattcttttttaatttctgttttaatgttgaagcattcatacaactctccattatttaataaatgtttctgctattctcttacagcaattgccgtctttataataattaatcttatcatttactgactctcttgcttccttatacaagtcattgcctgaaacgatattttcaataaattcttctatatctgaaaggttcctaatttcaggtcccggcatatattccttagggttgtcaaaaataaaccctcttttgttcttatatttttccatatcttccactgcaaaacctatcggtctgttaagaagcatataatcaaaatatactgatgaataatctgttattaacccatctgcatttcttaataaagtatacacagtcatgtctgacctgttaagctcatcctgagtaataaacttaatgtgggataattccattccctgtgtatctgctgtctgaagtggatgaagctttacaatcatcttaatgttattatccataagataagtatttaaactgttaagttcatctttatttagtatggaaataataaaaccttcatcatattctctgtatgttggaagccaaagtataagcttacctgcgcctccttttatatagtcatccttaattctgtcttttttgaacatttcatcattacggggatttcccataacttcaacccggttctctgtacatccgaaaatatcagccattatcggcttatacataggcgcacttgtaagaacctttgaaaaaaagtcatagtcaatgttctcacaccccttctcaagatgaccgattcgtttaagaggtgtgccgtgccaaagatttataaccgtctgcttttttgacggctttattggatactttccaaaacaataaaaagcatatttagctttcataaaccatttaatgccctgcttattattaatgaaagtaacattctttggagctcttttcacatactgttcccagtcatttatgctaactactattttaaattgttcattataattattttctataagataatcgtaaaaagcttttacattatctctaaatcccagatttgaatagaagaagataagcttctcgtccttcttctttattctatttattatggtaagaggtttaaaaaacactctcaaaattgcctttttcattgtacaatccttttagatttttattttctaagtgccttggaatatattgattttcttagtccgttaggaattatacttacaactatacgcacaaatatccctttcaaaaacgcaccaaaagatataaaaccgatctttcttaaatggttattaaatctgaatatgcacttaatatagcctaatccgccacgtctcttgtacatatcctgacctgccctcatgtacaaaagattttcctgaacattatatcccttatgtcctttcattagcattgcaacccaaagattataatcttcaaaaaatctataatcatcataaaatcctgaatcctcaactgctgactttctatacataacagccggatggttaaacggtgttctcttttttgcaaaagccactatatccttatgactttcaggcacctgtcttgtaagtgttgtgttagacacatcgccgtcaaactctattaaattagagcttacaatgtctgcgtcatgttccttcattgcctttaactgcttttccattcggtcatttctacttatgtcatcgctgtccattctggcaattatctggtttttgcactgtaatattccattgttaagagctatggcaagccctttgttttctgtcattctataaatattgaataagcccggattagctgttacaacctctgtaataacattatccaggccttcatttaaaggaccgtcacagacaataacaaaatcattagtctttactgtctgattaagtatactttctatggctgccctgaaatattcaggtttttccttatgataaactgacatcaacactgaataattttctgtcattctacttcacctttttcttaatacttgcggttttctgctccttctcaacaccttcagtgttctctttaaggaacataatcttaaatgtcatcaaaatcaactgtatatctgtccacactttataatgctgtatatagtacaaatctaacttcaacttatcgtaaggagttgtattatattttccatatacctgagcgtaccctgtcaatcctgccttaacctttaatcggaatctgaattcaggaatttcttcttcatactgtgttgcaatctcaggtctttcaggtcttggacctacaactgacatctgtcccataagaatgttaaatacctgtggcaactcatctaaatgagtagctcttaaaactttaccaatcttagtaattctgtcatcatccttagctgcaagtcgtgcaccatctgtttcactgtccactttcatacttctaaactttagaatcctaaacgtctttccattctgtgtaagtctttcctgtgtataaaaaataggtcctctgtcccaaatcatatctgcaattgctactattaatgtaacaatcactgttggaatacataggataagagaaataataatatcaataactctcttaataaacgcttcttcccattttaaacctctaactcttgttacaagaagaggtgagtcaaacatagtgttctgtcctgctccaatcagaataatatctgaaagtttaggtgtaacatatgctctcttatcatacatatagcagtatttcacaatgttatttctctttccacttggtatgtcacaaaccaaaactgcctgatgttttctaattaactttctaactttatcaacaggttcatcacaatgaactgcttctgttatcatatacttgtcctgacgcgtcttaatcttcttaacaaggttatcaggatctctgtcactataaataagtaacatatcccttggtggataaagccatctgtatacctttattgccaaaccacaccaaataagacagcacaaaatattatcgaaacccattccgataattgctgccggactaaccatcttaagtgataacaacgaaatctgtaaataaataataaagtttgtaaataataatgcaagtatctgtgaaaaaactaaattcgaatactgcaaacttcccaacttaaatgctccgtatacattacaaaatattgtaaacattaatccatatacaaaaagcattactatatggcccttaaagaagaactctcttgtcattccctgactataatgggtattccaaaaataccagaatatataagtctgtgctacaattactattgctaataataatagcacgattattcttctaaacgctctagattctctcatatcgtctcctacttacttataggcttaatctcataattattttgatttaggcaaaccgtccttagcctagaatttaacacaattttaccaaagccactaatatttgtcaattaatgctactttttagccttatttagcctattcaaattgtccaaatttcacaatttaatcacacttttaatactattataataccttgtatactttgttttttcataattatgtagtatacttactgttagtatgcatatttagtatatgtacataaaataattttacacgaatttaaaatcaaaattacaaggaggtacttatgagtagaaaaatgatgtccgatttagataacaaaaccggttattacggatactcttctgaattgggaaatgtttccggaaaggataaaaagaaaaaggaaaataaaggtggctctgttttaggcgtcatcttagcattaatacagcttgttttgtcagggcttcttgtttatcaggtagtttctgccaatattttaagcacaacttatcttgctgttttagttattgtattggttgttctttttgcaattgcccttttaacacagaagggtggccgtccagcccgtacttcaggtaaaatattgtccgttataatttcaataatacttggcatacttttattttacatgggacaatttttaggattccttaataactacagcgacggtaaaaaagtttctgaggaacctttcgttgttttcgtatcagccagtgatgaatttggtacatacaatccgaaggaaaactaccgttcagatacaaatattcttgcggttgtaaatcctaaaacttctacagtacttatgatttcaacaccaagagattactacgtaccaattattgcaaagagcgttgctcctgattcatacgacaaacttactcacgccggaaaatacggaacaggtattgcctacgatcagaatggttctgaacttacttcaagtggttggaactgggctcaggaagtaacatggggcgttggtaacactgcaattatggatacattaaaaacactttacaatatacctgtttcaagcaagaactatcattatgtacagcttaactttacaggttttgccaaacttgtagatgctcttggtggcattacagtagatgttgacaagtcatttagcacaaaaacatacgcttcatatgatgaagacaacggtgaacgtaaaacatacaagtacaaaaagggtaaacaggaaatgaatggtaacgaagcacttacatttgttcgtgaaagacattcattcggcgatggtgacttacagcgtaaccgtaatcaggttaaagtattaaaagcattatcatcaaaagtactttcaacatcaatgattacaaacacagactcaatccttagtgctgttggagaaagctttaaaacagacatgaacattggctcccttgtaaaactccagacacagcttatgggcaaaagtgagttttcaaaaacaggatggcaaatcgtatcctacagtgtaacaggacagagtgcatcacagaaattaacatggaacggtctgttcaaatcagtaatgctccaggatgaacaatctgaaagcaacgcaactgaattgatgaaacttgctttagatggcacagattacacaacccttgaaagcaaggctaaagaatatcaggcttcagataataaataatttatttatggattgttgcaaacactactaaaatctcgcaaaaagttataccgcaaacacgttgattttatcattttgctccgccgcttattgtatgtcgaaaagtgaaactcgcctacggctcaaacagtcacttttacgacatactctatgctcgcaaaatttcaaaaatctgcctattgtttgcttgcataactttttgcgagattttcaaaaattgtttgcaatcaatccgaataaattatcttgtgtcttacttagtgatataacatatgtaaaagagaggtattaaaatgaaaaaaatagtattaaccggtggtggaactgccggtcacgtaacaccaaacattgctttagttcctaaacttaaagaatccggttttgaaattaaatatattggtacatacaacggaatggagaaacagcttgttgaagatgccggtcttgactatatcggtatttcttcaggtaagcttcgccgttattttagctggaagaatttttctgatcctttccgtgttttaaaaggatattttgaagctaagaagtttatgaagaaatataagcctgatgttgttttttcaaagggtggtttcgtaactgtacctgttgtttatgcagcaagtaagtataagattcctgttattatccacgaatcagatatgactccgggacttgctaataagcttgcaattaagaagtctacaaaggtatgtcataacttccctgaaactgctgcatatcttggttctaaggcagtacatacaggttcacctatccgtaaggaattatttgaaggtaataagattacagctcttgatatgtgtggtttctctgctaacaaacctgtaattatggtaacaggcggaagtcttggtgctgaaaatgttaataagcttgtaagaaaggctttacctgaattgttaaagaacttccaggttgcccatctatgcggcaagggcaaggttgacgaaagccttaaagatatagaaggttatgctcagtttgaatatatcagcgacgaaatgaaagatttctttgctatggctgatttgattatttcaagagccggtgcaaactcaatctgtgaaattgctgcattaaataaacctaacattcttattccattatctgcaagagcaagccgtggcgaccagatacttaatgctaagtcctacaagaaacagggctttagtgaagttatagatgaagacacagctactgctgaggacttggttaacacagtaagctcagtttatgagaatcgcagtaaatacattgacgcaatgaaaaaatctgccggaacaggcggagttgatatgattgttgatttgattaatagtcttgtgaaataattagatatacaaaaatttcatattatataaaagaagactgtttatatgacattctatcttaatctattaaaacagcatatagactggttatcaatatttcaacaaagaaacggaactatatcaaatattttgacatagttccgtttttttactacatatttctttttaataccgaatagttttctaaattttcaaaccattcctataaaatcttctgaaccttttctgcgatagcattaagcttatcaacatcctgagttcccggtgtccacttaatattagcatcatccttgctatatcttggaataacatgaatatgaagatggaaaacagactgacctgctatttctccattgttctgcaaaatattaataccttcacaacctgttgcttccttaagtgcagttgcaaccttcttagctacgatgtgagcgtgagccaaaagttcatcgtcaatctcaaaaacattagctgcatgactcttaggaataaccaatgcatgacctactgttgcagggcctgcatcaaaaataaccttaaccttatcatcttcaaacaatgtaattgaaggaatttcacctccagcaattttacaaaaaatacaatcgctcataaaacttacctcctaaatccaattctttttattggataatagcaaattcatatttagatagttgcaaatcaatattttgtatttaccatcgttgagcagaactttataccgcaaacacgttgattttattattttgctccgccgtttattgtaagtccaaaaatcaaaactcgcctacggctcagacagctgatttttggcttacactatgctcgcaaaatttcaaaaatctgcctattgtttgcttgcataaatttctgctccccgatggataaaatattaatatgttagctttgcaactatccataaaaattgtaatttgctattatccttataaatgtagcggtttgtttccaggtctatatattgctaatgcaataacaactcctgtaactgctccgcccagatgtgccatccaatctacgccttcctgcatgttgccgaagaccattagtataaataacaagattagtcgtggtgcagatacctgtcccagttgttttctgcttttgaatatcattaccagtaggacaccgaagatgccaaaaattgctcctgaagctccggcacttatagagtactctcctgttatcatttcgattcctgatgagattatgcctcctgctatgccacatataaagtatgttataaggtattttactcttccgaagttttcttctatctgatatccaaggatataaagcattaccatgttgtttatcaggtgttctgcgccaaaatgcataaacatacttgttagtattctgtaccattgtccgttttcgaaaatatccggtgcatatgatgctccatgagcatacatatactcaccactttccgttgacccaaaaaattccatcactagaaagactaccacatttattgcaacaagcactgctgttacatatgggattttcctctgctccggttcgttcatatatgaattattgtagttatttatctgtccgttattatcgtaactgttcatatatttcctttcattataggattttcctattgattaaaataattactgtttggcattctttctatatttaatattactattcataatccatttgcataatgcatcaggccattttgttccacatatgaatgtgactactattccaattgcaacaataaataaccaccatttgttaggatacttgtaaggcaaatatttgtacaaactgcttgccatataaatatagataaaaacatagtggaatacatatacacttaagcttctctgacctatctttgacaaaataaatcttcttttcggcataatgcttaggaacataaatactataaagaatgaaataacatacactcctaatctaatcagcggaccatatgccattccatattccaaacggtaatatccacttcttcctgttaacaaaaatcttagccaaaagattttgtcaattcctacacaacatattacaaaataagtaatcaacgaaataattgccattacttttatttttttattttccaaccatttcgttatgtcttctattgaaataacatatcctaaatagaaaaatggataaaaattaacaattctcatccagcagaaaatatctgtattctcaactgtatagcctaaaatcattgcaataactacagataagacaaacccataaaccggtttaaagcgttttgtataaaatgttattatatacataaaaaacattgccaatgcgaaccatgcaactcccgattcaacaaaccaatttatagaagtatatttcccgtaaattatcatttgtacaatccaatttactattttaataaatatgtaaattaatatgtaaggtgcaactttgtcgattcttctgtcttctactgttttctttgaaaacaagcctgctataaggaagaatgccggcatatgaaatgtgtatacataaaaaaacagtgaattagctactgggtttcctaaataattttcaaaaaaatggcatataactacaagtgtaatcagaatccatcttgcgttatcccattttgctattctacccgctccttttttttgttccatcttacttatccttctcttttaaatcttctgttcgttcactaattatgtaacgtggtctgtgttttacttccatatatatctttccaatatattctccaagaacacccatacatattaactgaacaccgctaacaaaacatataacagctattgtacttgtccatcctgttactgttgtgccaacgaatttctgtataatagaaactataataaaaatgaaacttaccaatgccacaataaagccaaagcttgtaatcattcgtattggtttaatgcttaaacttgtaattccatcaaatgcaagtgccagcatcttctttaacggataatgactttcccctgcaattctttcatttctttcataatatacgcttgtgctcttaaaacctacaagtggaaacattcctctaaggaaaagattaacttccttaaaattagcaaactcattaagaactctactactaacaagtctgtaatctgcatggttaaacacaacctctgctcccattatatttaaaactttatagaagccttcagcagtggctcttttaaagaaagtatctgtatctctcttagaacgcacaccatacacgatttcgcttccttctaaatattcatcaaccatttcattcattgcattaatatcatcctgaccatcacagtcaatagatatagtaatgtcacacttgtcttttgcttccatcaaacctgcaagaactgcattctgatgtcctctgtttctactctgtgtaattccgatgaaatgttcatcttctaatgccagctttttaataatctcccatgttgaatccttactgccgtcattaacaaacattactctacttgaatcactaatcttttcttttgaaattaattccttaagtttgtttaaaaataagtcttttgtaataggtaaaacctcttcttcattataacaaggtataactatgtataatattggtttcatattgtccctcctcttcatacctgttcattataacattttatttgtttcttgcaattatctgcagtaaattattgattttccccgatttttaaggaaatagttacaacttttattttttgtgttatacttgtcgaagttaaattaagtagaggagatttttaatggaaactattaaacaactttttattaaatataaagaaatcattatgtaccttattatgggtggtggaaccactgttgttaactgggtagtttacagtcttatggttatgttttgccatccgggcaacaatttaacagggccccttcatatttcagcaagcactattgatgtttttgttgccaatgtggtttcatgggttttagctgtaacttttgcttacataacaaacaagcttttcgtatttgaaagttattcatggaatcctaagtttgttcttaaggaattaagcttattcctgtctgcgagaatcgcaacaggtttaatcgaaatcttcggtgttcctttccttgtaagccacggatttaatcaggcaatcttcggattggaaggtagcgtgtgcaagattacaatgtcattccttgttgtattacttaactatgtattcagcaagcttgttattttcaaaaaagataaaacagaagcttaatattaatactaagtccgtcggtgcattgcataatcgttttccggtggattttttttgcaatttatttgtttttcaatatacaatttttttacaaaatttacttaatttttttactgtttggaactatcagcaacaaagtttatgttgctttttttcgaataatacaatagaattgttatttgagaatgaaaatattaaaatgaggtgaaaaaaaatgagcaaaaattcggtaacaaaaaaattaattacaactcttgctttgctgacatgtctatgtggcattggtacattaagcgtacatgcagctccaaaagctgtatcttttaacaacaatagcaaaaagataacaatgtttactacacagcgcaagcagcttaaaatcaagttatcaggcaagtacaaaaagagcgatgtagtttattcttcatcaaacaaaaaggtagccactgtaaataagaaaggggttgtcaaggctcttaaaaaaggtaacattacaatatatgcccagattaaaggtacttcaaaaaaggctaaatgcaaggttaaagtttttaaaaatgtaaaatcaatcaaagttgttggcaggaagaaacattattacataggtcagcagtatcagttaaattacaagactacacctaagaaaacattggaagaaataacttgggacagttctaacgatgatgttgccacaatctctaaagatggtttacttacaataaaggaaaaaggtaaagtcaaaatcactgtttactccaaagaaacaaaggttaaaaagacttataaaattaaaactgaggaagttccacagattagttttaagaatggcaataaagcaacagttaaatacggaaacaattatcagattgttcttcagtacacaaatcacgacattgaaaaaatacagtataaatctgaagatcaatctatagcaacagttgatgccaatggtcttgtaacaacaaagagaccgggtgaagtttacattactgcaactccttcaaaaaggaaagaaacattaagaatgctcttagttgtagaaaataaaacaggcttctttgaaaattcattattatatgacaacattgatactagcggatgtaacaagcttatgattgttgcccatcctgatgacgaaacattatggggtggtgctcatttaaaatcaggtaactggtttgttgtatgtcttacaaatcatttcacagatgttagaaagaatgaatttaagtctgtaatggaaaaagcaggcattaagggaattattttagattatcctgaccttgttagagatgctaataagaaatgggttaaatatgattgggattctgtaaaggacggtgttgctgctgatgtaactaaacttattaagagtaagaattgggatttgattgcaacacatagtcctgccggagaaacaggtcatatccatcacaaaaacacagaccaggctgtaacaaacgcatgtataagcactggtaattatgataaattatggtactttggcaaatgctactggacaataccttccggtcttaagagaattacagatgaagaattaacattcaagcaatctttagttgacttatacaagaatgaaacaaaacctatcaatacatattgggctcagatgattccttatgaaaactgggttaaggcaacagattatgttgcaggaaaataataaataaattataagaaattcttaattagcagagctgcattggcaaacgtcaatgcagctctgtttttgtgctaaatatgttggctccacgaaaccaatccaaattctaaaatatattatacgcaaccactttctattttgccgaatatataacccactgttggtttttatctccggtatactgttcaattgaaagagtctttttcttcttgtcatatgttaatgccagattgtattcatcatatatttcataagtattgtcttttacctttttaacaatccaacgctgaaatattgaacggtccgttgcacttagtcctactgaagttccaggatcaattttgccttccagtattccaagtgattgttcagatatttcgttgctgttcttaccacaaagacttataagtgaacagtcaactacaaacttatctgaatattttttatcattacctattaatcctgccagtgttactgatgaatcatttgcaggtattatagtataatatccatcatccaagtcatcaacctgatggctcatatatgactcatatctttccttatcgccatttagctttattgtttcatttacaactttattatttgaaatgcctattactattacaactaaagcaatgacaaccacaggaataattgttcctctcttttctttagcctctttttcgccaaggcttatgttgcatactcttctaagcaataactgatagcctctaagcatatatggaatcataagataagcataaattattgtatactgaccttttgcttcccaaacaaaatggaataggaatcctcctataaatgtaattgcaaaaatcaacttataagcatccagttttcggaaatcgaatattaagaataatattattccaagccacaaaaatacaataaaataattacatattgtagtaactgcacgattggctgaatgtccgtccaccattagattcttcaccgaatctgtccatgttggattggaaagtcgtcctctatccaagtttgttatgtaaaaacattcaaatgttccctcattccactgagacgctgtttttttgctaaagaatgacaatgtgtactctttatctttttttaattcgcctactctttcagagatgttttgggaaatggcttcttttgtttttggaatatcatattcattgtctgcaaaaaccttagcattatacccgttccaccatcccggagccttgtaactttcctgcaatcccatagctacccaagctgtatttggagttccctcatctactttctttcctgtaagatgataaatagttgacgaaattgaagtaactacaacaacataaaaaacaattccccacactaaagagattactgatttcaaactcttttttactattgcatcaaataataataacagacaagttgcaacaatcataatcagatagtttgacttaaatccatatcctattgaaagaagtgaaatacctacaagtccgttaacaatatttctctttttgaaatatttaatcaaaagaaatattcctgcaactgaagccgcaagtccatataatgttccataaacaaatgttacataacaattcaactggaagaatcccaaaagcaaaatatatgaataacgtgccagtttcttatcattaaataaaaggtaaatggttttgcttaaaaagaatgaacttaatataagcatcggtatgtttaaatattggaaaaccatctgattatctgtgccaaacattttcaatccaagtgccacaaacaaaacaaaaccgttctgattaggaaatctatagcaatatgctcctttatcccacatatcaggtacattgttaagcaagtcattggctgcgttcaaaataagttcctggtcatccattgccggaatgcctgttttgtacacaaacataatcattaaaatcgtataaactaccgttactattccaaggaaaatataatttggagtaactattgaaatagaatacttctgcagaataatctttacgattatggcaattaaaattggaatcagcactataaggactgtactccaaaatggtttttcaataaaaaaagatgattcacaaaaatctaaaaacgttgatccaaaaaagctctgtaagaaaataaatcctaagaataacatagaaataattacgattatatatttaataaatatttgcaaaacatctgttgccttgtttaatatggcatttttgtaaattgttgtagttttatctttcatctttctccctctcgtaaaaatatttacaaaaagtatagtcggtattaccaactatactttcttctggctttttaatttctgtcttatgcatttaaatgctgcatcttctccctcattggcagttataataagtagcttttcaatttcatcactggtttttggatgaataattctacttgattttcttctgacaaaatattctaacggatcagtctgtttgtatttgtcaccgttatatattttgcttgctgccagtctgtcacagtacatttccgctacataattataaggcatttcaacaggttcgttcttatgacttttcatattgtaatcaacccaatattcaaaatgatgtctgttacgtcccttatgatgtaaccatgccttagaatagcccttgtctattctttccccttcattgggacttctgtctcccatgtaatattttactccagggataaactcagttggagtatattttgacaggtcgtgtctaagtccctgccacaatattcccgcctttgcacaatgggcaataaccttatgtctatggcgtgttattgttgaaaaatgtcctgttaatttttgaaaaaaattcataatgcttactctttcctgttactatattctattcaaaaatttcagatatcttggctgatggattttcaccgcaatcatatgagaaatattcgcaaaacttttcgttctctgaagtaaattctgaaaattttgtcatatcaatgtcttcaacgtttttaatgtataaatttgaaaactttctcttcatatatttttcaaactcacagttagtatattttaggcaataaataggtttctgtctaactgcaaaatatgttgcatacaatccactatttgttactaaacaatcagcaaatgataatacttctcttgtatcaaatgttctattggaatatacaaactggtttctgtgttcgtaacctatatgagtcatattctccaacaacttcccactgttagtaaaaataatccagtcatcatctaagttatcaaaaatcttattccagttaacttctgcatatggattttcctcatcttcatccaactctccggttaataatattgccaaaatctttttgccttttaacattggataatgtttacaatacttatcataatgttttttcttaaattcttcctgattcaatctccacgagtatggcatacacaccttatcaattatttctgacttcggtgtattatagcattttttcaaaagctctttttcaaaaggtgaacctacaataatatgtgtaaaattcttatacgtattctttttcttaaatgctcccttgtcatattcattaattgccttaaactggtaatcataaggtgttgctataagaaccctctttccttccggtgcattcttaggtaattttcctgcaattgaaccgtcaacacatattatgtcagtattatttttgcaatactcctttcttatgcttatgtttcctttttttacaagggaattttttgcattttcatttgcaaccgcatccttaaattcaactttctcatcatttactctgaaaaagtcctttactactaacatatcaagggttatccctctattttttgaacttacaaaagatatcttttttcccatttattttctccccacatatgaatttattaaacctgccaaacgttcacaactatgtccgtcacaacctgacatatattttttaataaatgtatcgtacttttctgttaactttgtattttcggaatcttgcaaaaactcttctaattgttcctggttttcatatacttcacccggaaggtcatccggataattcaaataaaatcctctatcatatatggccaaatcataacagaagaatccaataggcttctttaataacgcatactcaaaaataactgaagaataatctgttattaacatatctgaaacaaacataaaatcgtttgttgagaaatctcttacaaccttaatattgtcgtatttcttaggcacaatatcattcttcattaccggatgaggacaaataataaactgctggttaggcaacagtttttctgataatctgtcaaaatcaatcttcggattaaactgacttcttccctggccttcatctctaaatgtaggtgcgtatataataacaaattttccctttaattcaggatatgccttatatattgcctctctcttctgttctataagtttcttatcaaaaaattcatctgttctaggtacgcctaaagccttaaccttctttaagtcaatgtcaaaagcgtctgcataaataggtcgcacttctgcaccacttactgacacaagattgtactgggcatgagttgctaagtctgtcctaatttccaaatttgttcctctctgtccaaacttcttaaatgctccacaggcatgccacaactgtataactctctgttcaggctttaaatcaaaatatcttaaatattttacataatcatctgttacaataactttacttgtacaaatcaatttgacagcttttaatatctgtaacggattatgtggtaactgcttagcaaaaatcactttatcaccctttacataaggatataaagccttggcatttccttcaagctctccgttctttctaacactgataaacaatgttctgtttatcacttcctttgtcttgtatctttctattgcaaacttaattacattgttaacaaaagttttttctttaaaattagaaatgtcctgtaacttaactaatgcttctcccggattcattgctaaatcctcactatttaagtcaacctgtgcatcttcaaaatatttttttatatattctgtacttccgtcatgttcaatgaaagaaataaactctctttcttttccatcaaaatgaactatgccatcattaaagaatgtatagcaaccctttttatagaaatcttcaatatgttcctttattcctttttcatccgttattatttcatggacaaaatgcacatcaaagaacttgtttgccaatgtataatccatgcaaagattatcattatatccaacttcattcataactgattcctgagctattctgtttaaataaacaggctgtggctcattgaaattagtatgataaataagttctattaaaaagtccttatgagtctttataaatctcttaaacacatatttgaatgtgttatttgaatataaaatcttactatcacaaaaagttatatatctggtcttagttgtctcaagtgcttttctaaacaactcttcttcagactgcgcctctatgaaaatcatatttttctggaagcagtcattgtcctcaactattttcttcatactttcaggtaaaacaatatttaccccaacaagattctggttagccagactgtctaagcacttaataaactgttcttcatcattttctttgccatataatactgctgtaaaatgtgcattttccttcatttcttcctcatctgtaataatattatataaagaaatatcagggttttcgtcggctaccaaagatgcattctgtaaatctaagatttctattttttctaagatttcgtctttaattttttcaattatgctttttttcaaagaccagaattttgaataaaactgcttaatgagaatatttaactctttataaataattctatttaaatactctgttaattccttatcttctgctcttacctgattaatggatttgtatttaggaaaatcccttaatatactatctcttgcagcctgcagaataagtctgtgagcttcaatataatcttccaccttagaatctgatatattctgtgttgccgcattagtgtcaccaatcattcttctgtaatgggtaactaccatttccaatccggtgattttagtgacatgataaacataattcattgaaaaaacgccgtcttcagaataagatattggtggcaatcttaaattatatttttctattatatctcttctaaacaatttgtttgttaaagagaatgtttttaaaatgtctgtatcatatttatctattttctctaattcaagtaagctgttcaactcttttacttctgtagtcttatactggtcaaacatatcatatccggcaattaccaactctgccttattattttcagcagcctcatacatcttctctaaggcttccaattctaatatatcatcagcatcatagaaataaacatacttaccctgtgccacgtttaatccatcatttcttgcagctgacaccccgccgttttctttacttattactgtaaaattaggatattctttctcatattcctttaatatatccagtgttccatctttagagccatcatttattgtaatgatttcatagtcatccaatgtctgattaactacactctgcaacgtttccaccaaatatttttctgcattataagctgcaataattactgaaattttcatttattttccccttcattattttgctatttttaatatttatgttccaccactttaatctttaggtcctgtgaaatattgtaaaataacttatatctgtattcccatatttcctcactaggtgatggtgcgtgaagatatccctcataaggaagtctctgaatagtaacttctgattttccttcactttccgcttttcttactttatcaagtcttgctctatcagctttataaatcggtgcatatactgcaaactgcattcccataacaattacaagggctgcaatttccatttttgtcaggataccatatatatcctcatttatattaaccagattacatacttctgcaataaaccatattgttaaaacaaatgttgcaaagaaacatcttggtccaattggtgttaccataagtaatggtcctgacacacacgctatgcatcccaatataaaagacaatctgtactttacatatttatccttaaaaaggcttaaaacaagtacaagtaatgaaatccagaaaataacattaaatacgccgtcaagatactttccatatttccaattgtaaatccattctgtatcaactcttgttacaattccatataccaatgttcccataaccaatgttaacgaaatacatgaaacaatctttgccatgttactttccagcttgtcatggtattgaataaaagctattaatacaacaattgccattacaacacacaaaacaatattatcaaacatcatttcttttccaattacatcaaagtaattagttataattctctccaatgttccgcctttacttgctccgacagttctgtaaccatcgcttccgcttccaatagatgagtaaacagaattagaaaacattgttgctgttcctgcaattgttcccacgaaatatgccacgtgagacaattctatttttctgttttttataaaattaaatgcaataatatatactgccattataactgcaagtattgttacgtgttctacaataagtgttgtcaaaaatcctaatataagcattggaattgcccatacattagaatgcttctttccatcttctatgaataaatttcttacaaacaatccgtacaaaagaataagaacaatggatgtagtataatttgaaaatccggctgtccaaacaatactctgtcttataactgccttaggtgcagtaaaaataagtattgtaaccaaagtagccatctgccacttaccttcatttgtttttgtaatcatccagacaattaatgtaatacatgctgacattacaattgtctttaaaatatttgatcttgtaagtgcaagtacaattaaattgccgaaataacgtccgctataattatcgaaccatgtgtttaatctttctattcctatgctgcttccccatgcccagtcatcacctgtgtatggatacaaaaagcataatgcacatagtacaacaaaaagtagtccccattgccattttttaactttgttcatcctcccaaaatcatacatttaaatatgtatgtttcctttctgtatttttctattttcttcctgtgttacatttacacattacttttaagtttaccataaaaatatacaaacttcaattaatgcccattatcataaatcttgtatgtaacttatatgcaaatcttacaacataacttgcatttattctctataaagtataaaatattactttaggattatcataataaaatagataatatcaaacttttcagtttatttcgatattattacattacaaaaggagtagagatatgagtttactttcagtggttatccctgcatacaatgagggggcaatgattcacaagactgcagaagtagtttcatctcttttgtcggaaaacaatattgagtatgaaattatttttgtaaatgacggttcaaaagatacaacatgggaagaaatagttaatgcttcagctaataataagaatattaagggtgtatgtttttcccgtaactttggaaaggaaggcgcagtatttgcaggtcttgaacatgcaagcggtgattgttgtgtagttatggattgtgatctgcaacatccaccaaaaacaattttggaaatgtataagctttggacagaaggtttcgaagttgtggaaggtgttaaggcttcacgtggaaaagaaagctttatacataagatgtttgtaaagactttttacaatattataagtggttccacaggaattgatatgtcccgtgcatcagactttaaattactggaccgtaaggtagttgattcattccttgcacttcctgaaagacacgtattcttccgtgcactttcatcatgggtaggatataaaacagcttacgttgaatttgatgttcaggaaagagaacttggcgagtccaaatggtctttcaaatcacttgttaagtatgccattaacaatattacttctttctcagctgctccaatgcagctagtaacaggatgtggaataatattcttcatctttgcagtaatatttggtgtatattcaatagtaaaatatttacttggatattctttggaaggatttacaaccgtaatacttctaatgcttatcattggtggaatattaatgttcagccttggaattatcggatattatatttctaaaatatatgaagaaatccagttacgtccaagatacattgtatctgaaacaactaatggcttagaaatcaaaaaagataaataaacataacaaaaactcccaacaaacaggttgtatagaacatctaccgttcaaaccttttattgggagttttatttattgttttctcaattttttatttttaattttctctcttgtcataaatataccatctgccgatgtcataatcagaaccggtataaatgccacaagatatctggaattgcattcccaaattgacaggaataaaataattccaaacaacgctatccttaaaacaagcattttctgctgttcattagttcttcttattgcaaagattcccgataacaatattccgacaataagtacaatataatatagccatgaataaattaaacctatccaatggtcactgccatggaaagtaaacactctttgccatattccattctcgtctacaggaaatctgccggcataatcatcacctgccaaacaactgtctccccaggttcttttaagttttgtataacatatatgctctatcaaacctgctttgcctttttcccttacacgctttttaatctcttttatgtctgctttatttttttcttcgtatgtaggaaaactttttgtatatgaaacgtcctcttcacaatatcctccggtttctcctaatgccatcataacccaatgggtaagtggaaattcatttgcatcttccacttcttcactaatttcaaactgacttgaaatcactttatttgatgcacttacaactgccacaactccaaccattgttattacaataaacattacaaacttctttatttgcttagcatctttaagatttaagaacaattcgcaaatcatagccataaaaagtatgaatattgtcactttaattttgtaagaaattccagcaacaattccaattaaaatggtataagctatatttgcccttccgtctgttttattatatttaatatagaaatacaacataagaattgctaatagcattcctgatgtatcagtatatgcaaacattgcatacaaatacaatggaaggcaacatacagttatgattccaacaacaaaagccttcttttcattccatacaagctttgctgttttgtgaataaaaaatattgttaactgaacaaatacgcaacttacaacaattgatactgttttaaatgtttcaatggttgctgatgcataaaacattcttacaatcttaaataatataactaaaaaagctaaccagaacttattattaggatatcttgccacatcctgctcatatagcaattgattatgaaatactacattagttgcattcttaatcaatccaccccagtcccaggataggttaacttccagtgcaaatgccatatacaccattaaaattgctgaaagtacctgaattactgcccatgtaactttaagattaattctatcaagccatgggtattgtttactcattgcaaaggcaataagcacaaaaacaggaacagataataatgatgcaatatatgagcctgtaatcatattccctactacaagtacacttatcatgtaaaacaccacaacaaatgccacgttaaatatttttccaagtttattcatcttaattctcctgtttatcttctgaattaacttcaactttattaagcagaatatctgcatcgtttgtgtgtattccaaactgaatttctttccattcttccggaattctaactacaaaacctgcattcttataatttctcattaattcatctaaaatatacagttgttttttacacttgtagcggtctgtttttattttttcatctccgttttgtacaaaaatataatcatccttcttcatggcatataaaggagtgctgaatcttccacgcagcattccttcatatccgggcttgtccataattccaataactcttacattacgttctgataatcttgctaattgtttttctccatattggaaaaccatatcattatccgtaattgtcttcttagctctgattttctttttgtactttaatgacaattccatttctattacaggaagtgctgtgttcattgaacaaataacttcatcacttaccttttgcaatacattacttaacctgtctttaaacggctgcatttctttctctggaaccatttccattacaacttctctgttaccttccaataagaataatcttaaatggtaagcaactacatactgaatgtatggaacaactttaaactttcttaacaggctgcatttcataagacgcttatatccgtcttccaaaaaagtagtatatctttctttttttctccacgccttatcaacaagcgatgattcgttttccatctttctgtaataataaatggcacccttaaccagaccatatttgcccagctttaaaataaccttgtttattgccatcgcatcttcccaaaagtccatattaacgtcaaacttaagtgaacgtaacgccttgtcttttaagaacacgccaccaatatagtattgaggataattaaaatcctcttttatgtttacaacttctctttcttcaaatctccaattggatttatgttcatcatttcttgctccaaaatgatatatttctgaggttacaagctgtatgtccttatgattttcaaagaaattccatactgtttccaaagctttgttatccaaataatcatcagaatcaacaaaccctacaattacatttttctcgtgtttacacatctttattccgtagtttctcactgccgaaacgccctgattttcttcaaaatgtgtaacaataaaattatccggatattgttctttgtatttattgcataattctaaagaaccgtcactgcttgaatcatctattaaatgtattaccacattgtccttaaatgataatgtttggtttattatactgtctaccgctttttcaagatatttttctgcgttataaacaggcattattattttaaacataaacctttccccctatcattttttatttatcccacatcataattgtttttccgaaagctttctgaatgtccatttcaaatgccttcttcatatcttctattgttcttaccggaactactgctcctacaatattagataagtaatttattatttcaggattagacttgtaaagtgcaactgtcttttcaaagtctgccacaccacttctgctgcttccaaaaattctaagtcccttttcaagtaccattcttgtattaataggtacaggatactctgatactccaagaattgatattgttccttcaggattaatataatcaataatctgattaatagccttacctgaacctgccccaccaacacactcaaacgcatggtcaatcttaacatcttcaggaatgtgctctactgtaaatgttgcatctgcaaaagtaaaatcctgtaacttatcagggttaactccaaaaatatataacttagtttcagggaacatagtcttaaaaaacactgctgttatatatccaaggtttccgtcaccccagattccaacaacatttcttctcttgtgagcaatcttatcaaatcttccaattgcatgaacactaacactaactatctcagtaaatgctgcaactgttctgtcgatatcctgtggcaatctaacaagtctatctggagtgatttcaacatattcctgcataaagccgtcaaatccgcttgctctaaacttgctcgatcttaaataattctctgctattatgtcatcttcttcaacaggtgtgtttggcaccataacaaccaaatcgcctgttttaaaattgcctgaaggatctcttactacttctccgattgcttcatgtataagggccataggtaatttctttcttaaaatttccgcatctcttaatccctgataataacgctggtctgcattacatattgataaatatgttggtcgtacaatgaccttgttattatttaagtctatgtcactatacttaatttcaaatcttctgggtgctactaactggtatactgtatttatcataattatttaacctccgacaaacttccacgagtattatttctcgcttattaatgtttcagccacacgtaaatcatatggataagtaatttttgtgttagaaacttccccttctaccaaatgaactttttcaccctttataacaaaaatctttgctgcgtccgtaagaattgttttttcttcttcgcttaaaccttcatataatgattttaattttttaatcttaaatgactgtggtgtctgtccctgatacattttacttctgtcaggaatttctgatataatttcgttatccatactctttacaattgtatctgttgcaggaactacagtatcgcatgcaccatattcctgagcatatttaatattttcttcaataattctatgtgttacaaatggtcttactgaatcatgtgtaacaataacagaatcatcgtctattgtatagtgttcttcaatgtatgcaattgcattcataatagtttcatttcttgtggaaccaccactgattacaactatcttgtcattctcgccaatatatttcttaattaagttttctgtgtgattaacccactggttaggacacaaaacaataatcttttcgaatttatcatttacataaaatttttctaatgtatgaatgataataggctttcctgcaatgttaagatactgttttggcttctctacatttcccattctgctaccaattccacctgctaaaactgctccaaatatcataatcttgttctccttacatactgtataaaatttctttatataaacttcattaagtataacatattttctttcttttacaaagttttagtgtttttatcattctttgctcaattgttctaaaatatgcttaatatacatttccacaatatcaatatccgacacctgatatagcattcttgccccaactgcatcttcgatttcgttaaaaaccgccttgccattgtggaaagtaaaatctattcctgcatagtccagtggcaacttatctactattctctccaccattgctttttcttcattattaagagtgtattcctgaacctttccccctaaactatagttacttttaaagctttccgttgaagttctaagaactgccttaataattttatttcctattatgtataccctaacatcacgaccaagatcagaacagcactgctgcacaacatattcctgaccgttcattaccttaatagcctgttcttcttccttgctgttatttacaagaaatacctgacttccgccatgaccactgcaactttttattacataaggatattcaaatcctttattttctattttgctctctattatttcatttccatatttaactgccaaaaaaggaaccacatctttcaaaaactcatacgtgattcctttattattagctattcttgtaactgaactgctgttaaagactctcactcctttttgttccaagagttctcccataatgtgatttctacttctgttaattgcaaaatcaaccttattacatttcacgtattgctccatgttttcaagttcttccacaattacaagcttaatctctataaaatgttctttaaacttgtccttatacatttgaatataatatttatttttttcaacatctacagccgaatatattagccaccctatcatacctaatctccatctttttaatagtatgcataattgtcatctgctaacaatcatgcatcgggctatattttaaaactcttcatatataaatgttggtgctgccgaatcctttgacagaatgaaatatagccacaacaccataaatataccataaaaaagaaaaattttccctataaacattgctttttcgctatttcgaaggttgtttataaaaatcataaattttttcattaaacgttaccagtcctttcaatgccagatgactttcgtcttcaaagtaatatttttcatattctccgtcagtcatgtctgcaagctgtacatcatactcttttgctatttttctgattttattataaattgcatttcgctttttcttaggccatctgatatagtcattatacaaaccgttaaaaggctgaagaaccaccataacctgtagattttcctctttgcagatttgaagcaggcaagccaaatcctttccttcaacggagttttctgtgtaagtaggtttccatcttatgttttgatctacaagttttttgtattttttattataaacattatcaagcatacccatttggttttttgatgttttctttatgccctttttctcggctttcttatagtattttttccatttaatctttttgtttgtaataccgtctgctttttcgtcactacttttacccagcatacctgacttccatgcattaaagaaaagcttaatatccgctttgtcttccaccagccttgtgtgaatactttttctaaaaatatcccacggattcttactgttatccctataccatcttacatcatcctttattctattacacattgtaggattgttttttgtaaggtcaatggctctgcttataacataatccttagtgctatcgctaatgtctttattttttagaaactcaataaaattgctttccgaataagttgctccaaatgcgtcctctttaacaccggtatttttaaaccactgtggcgacacacttatgacaatctttcttccctttaatgtttctcctatacttccaactgcaatggcatgatacaaactctgatagccaccttttcctataaaaacaggcttcatatcagtattctgaaaaatagtattgccgtgaaatcctgagttctggcaatgcttcagttcagaagagccaaatactgcaattgaatttttatcctttagcaaattattcaagcccttattacttgaaaatttagacggatcaatccatgttccatactttacactatactttggcatttctttagtagctacaaatttaactgctgtaaccgtaaccgcaaacataagaaatgctataagtattgcttttatgtttttcatctgatttattacccctgttttttgcttttaactaattccaaaatcttgttaaccgtattaatgtcatctctaacaacttctgaaggtgaaataataactcctgtttcctcttcaattcttgtcaaaagttctgcaaaccctaatgaatccaaaatatcttcttcaaaaaggtccatgtctctttcttctctaataatatcatcctcacaaatttcttctaataaatctaaaatcttctcttccatttttagtatctccttttcatttacgcatttaattatttattttggttacattatctcaccattatgcaagcaccggcgagataatgccttttgcactacaatcttatatgatatgtcctgagaatatcagaaaaccaaacattacaaaattcattgttattgcccatgatacaattttataccatctttttttcttatttttcttatagaatttggacttcttctggtatatttcagttaacgctagcaacacaccgtgatacagaccatacaccagatactgtattgcaagtccgtgccagattcccattacaaacatattgataatgaaaccaactgatgctgttgtaagtcgtgtcttaaaccttttcttcttcattgaggacattataaatctggtaaagataaaatccctaaaccattctgataacgatatgtgccatcttgcccagaagtctttcatatcagtgctgataaaaggtttgttaaagttttccggaacttttatgccaagcatgtatccggttccaatcgccataagactgtatcctgcaaagtcaaagaacatatatattccatatgcataagaatatgccaaaacctgcaatactgtttttgccattacaagactcataactttataagcaaggtttgcaagaacaaatttatacaacaacccccatgccatcttttcaatccccgttccgaaaagttctaagtattcacttctcttataagccttccctgaatcagccataaatcttcggcttctgtctatcggtccacaactgaaagtcgggaagaatattagaaactctgcaaaatcagaaggacttatgctctcaataaccccgtcgtacatttcaataataatctgtaccactctaaaggttaaatatgatattcctataaactggaaccatcccatatttttaaatgtttcaagttcgcacagcttacagaatattaatggtgttattgaaaataaaacaaaaagcctgtatatccataattgccttcccttagtccttctaagccattcatatatttttacaattgcaagctctattgcaaaatatgcaaggaaatatacaattttaacaggttcaccacctaaaacaagaactataactaatatggaaactgttatgttgtaccatttaagaggcttttccaaaataccaagtataagagcacctgccaaaaccaatataagtaccgtaaaaaaatattctcctgaaaaaaagctcattacaacaatcctcctaaatattttcggtctgcctttccattgctattcataggaatgttatcaacatattttatctttttaggcaccatatacgccggaagtatttccttaagttccgtctttatttgtctgctaaattccaaatcagacttttcacctttatcacctgtcacaaaagctgtaagacttttcacctttccgtctttcatatttggtaaaacaaccgcgtgacttatttgcggaagccttagcatattattttcaatatcctccacttcaatgcggtagccgtgaagtttaacctgtaagtcaattcgtccgttatagaaaagttgcccctcttttagatatcctgcatctcctgtatggtatgctctgtattttattccattacgttcacactgaaagaatgccttctttgttaaatcatctcttttataatatccggtacttaccgtgtcaccgattataataatttcaccctgttgtccttcttctaatatttcaccctgctcaccgtgaatttcaataattgttccttttttctcgtgtccaacaggcaatgacttgccctgactcattatgttttcaagtagttcaggtgtaatctcaacatctgttactgcaactgtagactctgttggtccatatgtattaataaccttagctttcggaaatctctggtgaagctttgaaactgttgccgttgtaagtacctcaccgcaaaaaagaaatacttccaaattaggaattaactctcctgaaaactttctgtctgacaaacacatatctgcaaaagacggtgttgatacccacacattaatgtctgactgtttaaagtgttcaaacatagcattgtaatcttcctgcatcttcttcgtcattgtatgaagtgttccaccacaggcaagacttgtatacaaatccatcaccgacaaatcaaaagaaaatggtgcctgattgacaaaattctttccttccttgtcctgctttgaacttcccaaatcaactgaccaatccaaataattgtttaaacagtcaaaagtaatctttactcctttcggctttcccgtgcttcctgacgtaaacagaatatagtatatatcttccggtttagtagcccattccggacaatattcttcctgttcctcttctattatctttttaatgctgtcaagatttttcacattatagccatcaaaatccatatcgccttctactttaaaaatcacttcaggattaacacactctgccgtatccataactcttgtatccggtatggatatgtcctgtggacaataagcccttcctgacttaacgcacgctaaaaagcacacaatcatatatggattcttatgcccatatacaacaataggaaccttgttgctactaaggttcctattaatccacgcagcaagcctgttagaatattcctccaactgtttataagttagaacactatctccacttttaatagcaatcctagattcactggttgctgcataatatttaatattttctaatatattcatactcttacccctttatcttgtcattaactgtattgaatgtctgattgtgatacaatattgtcgttttttctttcctacacatcatatcatcatatatttttattttcaatacaattttcaacaattaactttttctttaccctatctttagaatttctttcgtttttcataaagcttttcgtaatttgtcatcagattatatgcctgacagatattttctgtgttatctaaactttattaagtatatactccataatttcatctgccacatttactcccgtgcagtcatatatgttcttaaaatgtgcattagaattaacttcgcacaatacaggttcaccctgctttccaaacataatgtccactccggcaaaatcaagctttaactctctgcagaccttaagtgccatttcacactgttcctctgtaggcgtgtatttcttcatctttccgccatttgtaatgttggcgcggaagtcatcttcgttaacacgttccattgcagtaactatcttgtctcccacaatatggattcgcacatccctgccttttgaactttcaatgtactcctgcattataaaatcacaatgacctatagcttttattttttcaacagcttcataataattattaacaaggtaaacctgttcaccgaaagagcctttgttctccttaattaccattggatatccaaggctgccttcaatttgaagcacaaatgtataatctttgtattccttatcgaaagtcattggtgccatataagttgcaggcatcttaatatccgtgttctttaatttaataaaagtaagtgctttatcatcacatgtttctattgcctctgcactgttaaacactttgaaaccttctgcctctaaagtttttgcaagcttaacatccttatcccaaaataacacaaaatcaggcttctgcttccaattcgtgctgcctgaactaattttcaatactgaatcaacctggtcgtttggaagctttcttaacttgcaatctctcttttctgctgcttcaattaaccagttatatatttcatcaaacttttcactttccaaatatccgtttactattaaccaacctgtcttcataattcctccatataacgtaaagaacggttaaggcccccttgccattaaccgttccggactgaaaaatatgttagtatacttgtgagtcttaggagagactcatcttttaattaaaattaaaagatttaagtattaggtactacgtctacattataacaaataatattcagttattcaatattcattttttattatccgaaactaaatgttttttgtgtaaattgcacacattaaagtgatgttggataagatgcaattgctccgttttccagtacactttttgcgcaataaccattagatttctttaagtattcttctaatttatcttctgtcaaatcagcaatgctgtctgttgtaacaccgtcttctgccaactgatataataatgaaccaataaaggcatctccggcacctgttgtgtctattgcattaaccttttctgccggtgcacttgcacttacactcttagtatatgcctctgccccttcagaacctttagtataaataactaatttaactctgcctgtaaataactgtggcaaagcatcttcaatgctatcttttcctgtaataaattcaagttcctcatcagaaatcttaacaatatctgccttcggaataaattcattaattctctttctaagtaaatcaatgtcatcccaaagtgccaatcttacgttagggtcaaaactaataattgctccactgtttgcagcatattcaatcgctttctcatgagcatccttcattggaaaatctccaattgacactgaacaaaaatgtaatgcgaaagcatccttaaaccaatcttcttttattgtttcaggcttaagaagcatatctgcacctggttttctgtagaaagaaaactctctgttaccatcatcttttaacgcaacaaaagctaatgaagtattggcatcattaattcttgaaacatattcacatccaatgccataatattcaaattcatcaacaattttgtcaccaaaaggatcattacctaactgagttattaacttagactctcctccaagtttagtaaatgctccacaaacattggcaggtgctccacctacagccggcttaaaagattccacctgtttaattggaactcctgtattccggggaataaaatctattaacgcttctccaatagctaaaagtttcttcatgtttacatcccttcctgttttttcttttgtataattcaatacgatgataccacattttttactttttgtaactttattgtctttatattagctgttatttgtgataaaattgtttcaacacaaatatggaggttttttatgagcgagagaaaaaacaagactcccggcactgctaaagataacaatgctttatacattcttatttttaccgtggtggtagttataggcattgctgttttcattttcagcaaaaacaatagttcaaaaaatgacactaacaacgccggtgctgttgcaaataacaatgcgggcacaaccgctttaagcgtagttgaaacaaatggctcattagacggagaaattggcgaaaacgaaacaattgataattatgtaaacttctttggagattcttctaagaaagctactgccaaagattcaatctttggtaaaaacattaaccaggttaaaaagtttgaatcaaaacgtagcataacactggacaatccaagcgaagcttcagcagattcaagtgacaagggtgatacatacacttacctaacttacaagttcaacggtgaaaaatccccagcagtccttggaattcctgttaacacggattctaacgcgtgtatgcttgtatacgtatttaagaataaagaattaacagaaataagagttcagtatggcgaagtggggatggaccagtacaacaacatgatcaacacgcttacaaacacatacggacaggcttcattctcaagaagctggtctgacggttcaaaagaatcatggtggaaatcaaaggcatacacacttgatgccgtgtgccagaaagatgccataacactttattataaagttaattagtaaacgaaaacaataaaaggactgtcgcttttgtaaatttatcaccaatgcgacaatccttttttgttttattccacaaatatatctttcatatttttattacttggcttactcttaaaattaaccactatcttttttaaatcttcacctttttgccatctgctaaacaaatcaatcttcatttcgtatccacgcataatttcttcaatacgattttcactaatattagaatccaattcatataattctctgataaattcagccgatggtaatttatcaacatctactaaacttctatcttttactaatcctaaaagcttaagttctgtattttgaaaactttctgttgcaattttaagcatatctttattattcgcaggtacgctatcatttacaaataaagatttaccgctgtcatatataggtgcaggttttacaaattccaaagtattggcatcccttagcactgatatattagccaaatgtctatctcgtcctgatattataaagtcagtcataatttgatattccaaaaaaggtcgaagaacagattcatccagtccatacattccgcacactttaataaaatgctcgtatgaattaatattttgaggttgtttttttgatactacaacatcgtatgcactaataagttcaagactttctgacgtaaaaagttctgaaaaacaaccatactgatattcctgaccatgtatttcgattaatttatatggagtataattatcaaactgctgcaattcatgcatctttgttgcaaaaacctcattaaaactttcagcagaaaaataatctctgttcccctttatcattcctctttttccattacgaatagtccaacattttcctaaagttccctgcaaagaactattaggtgtataatgtggaacaatatgcgaatctctttgagtttctcctgcaatattaatatcatcatgaaattcatttacaaacagatttacatctttccatttaaggtctgaatccactggagaaatccaataataatctgttaatgacaatcccaaattcttcaccaaaaaatcttccggacttaacaaacctttcttttccagcattgtctttatatgtccctgttcaataggaactgctctacgtttccaccactcctttagccaattagtactaccttctgtgtgcaatggtgccaattcttcattttttgaattaagtttgtaatttactattgaaccatcctcagtcaaatttattattgcaataggttcatcttttcttttaaaaatgtaaggattcatatgcagcctccaattccaacttgcttaactcttcatccaatttccattgagcaagtatatcaatatataatgtggattcatgttttacaggcataacttctctagtatattttttcccagattggcaaaaaactatataaaatgatttctgtcttataagcacatcgccatatacattatatctctctgaaaaaactttttttctatatatacataaattatataattcgtccatttcaacatccaatgcatctgctatacttttaagctgtcctgcacgtatgttttcaacaggcaatttcaaattaaccaaatcatttaatgtgctatagggcacatcactttttttagaaagcttatacactgatatgttatttttctgcaaatattctttaagcataacctgtcacctcattgttttctatagaaattaatataccgtaattgcggtatattatcaatataaaaataataagttaatacttattgataactaatgttgtttactcaatatctattaacttattactttacatatatatttgcgagaacgtttcgcccccaattaatttctctttttctttgcaatatccaatgtacataaaatagttggtatatttagcactataaaatctcctaacaaatctattgcaaacaagcttttatgtgtagatacttttttatcattgctaaaatcattctcagcacttatagaagaatcgctttcaaatccactttcttctattgcaacaggctgtatttcatctgctgcatattcattttctttttgaacaatctgaaaaatacttatgccgataatgacacttaactctcactactctaatgagtcacatacagctcgattacgctttgcttcatctcgctgatgcgacattcgtcgcatcaaataaaaaaagaatatgctgtagtgaaagcaagctttccttacagcatattctttttttatttatatgtgactcattgtttacgcacaaagaaaaagtaccaccccaggcaatttaatgtccgaaacggtacccgcaagtgcgcctccaggggctcgaaccctgcacaccctgattaagagtcaggtgctctaccaaatgagctagaggcgcttgttttgtttttgtctcttcgtcagcgacaaggattattatagtactacttgtagaaaaatgcaaccacttttttaatttttttttaattttttgtaatatttatttttgtatggtattttccccccattttataagggttcccggcgtttttttattttattttttttgcttttattatgactcttttcttattataatacgcttttttcagttttaattttattatttgcatatttacccttgtttatactttgttttgtaattatactatctttatgacttttattttagggggttcttatttatgcagacgaagaatcagtttaaagcagatagcaggtattttactatttctatttatactattttgactgtacttgttatttgtattattgccagagcagtttttttctgggactctactctctcagttattaataatctgcttgctactatgtcaccttttttgattggtattttgattgcctttcttattaaccctttggttagttggatgcatcataccgttttcgaaaagtggctttatgtgaagaacaatgttttggctcatttacttgccattactttttcttatgttttggttattgtttttttggttgtgggtattatttatattgttcccgaaattatcgatagcctgactcagttgctggacaagcttcctgaatggggagatgcccttattagttatattaatactattgcagctaaacatcctgaacttcagttggattatctgattaaatctattagtaatgccgattctaccattcaggaatttttaggtgagtttatttcaaaattaactactactattgttgtaaccggtgttagtattattaagtttgtttttaatttcatcgttgccattatcgtttctatttatcttttgattgataagaaaatgcagtctcgtggaattaaacgtactatttatgctatttttgacgaagaacgtgctgacaaaatttgcgctgttatcaagcgttcaattcatattttcagtaatttctttgacggaaagatgattgactctttgattattggtgcactgacttttgtaagtatgatgattattagcctctttggcgttcctggattttctaactgtgctttgctggttggaattgttgtgggaattactaatatgattccttacttcggtccgttccttggcggtattccaagtattttgcttttgtgcatttattctttgaacagcgctcttatttttgctattttgattattatcattcaacagcttgacggtaaccttatcggacctaagattctaggcaactctacaggactccgacctttgtggattatctttgccattacacttggtggctggattgccggcataccgggaatgcttcttggtgttccatgcgtagccgttattgcaggtttgcttgaagattgggttaacgaacgactggaagctaagaatattgacatgcctattgtaaagaatgaaaaagttcgtgaggcaaaggaagaaataaaagaaaaagaagaaagtaaataattataccttataaagataccctgttttggcagggtatctttcattttatcttgatgctatcagcttatgaattggatttcccattgctgagaatttactttcatattctgtcattacatttccttttaccatttcttcatcattatgaaggtcccatgtgaatttatctaagttccagcctgcttccggtacctgttccaatgagaactggaatagaaggtcgttgtctgttttaaattctacaattccatctttctttagtatgccatcatatctttcaaagaactgctttgatgtaagtcttctcttggcatgtctgtccttaggccatggatcggagaagtttaagtatattctgtctacttcgtctttttcaaaaacatcctgaatgtattctgcttccattcggatgaaacgtaagttatttatttctatgtcttcgcacttttcaatagctctgattaatacacttgaatatttttctattcctacatagttgatatcaggattttccattgcaagctgtgttataaacttgccttttcccattccgatttcaattctaatagggttgttatttccaaattcttcgttccatttcccctttaattcctttggttcatttattgctaacgggctgtctgcaatggcttctcttgagcccggtacatttcgtaatctcattatttgcgtctccttttttaatggtaattttttgtttattctggctatttttttaatcatttaaaattttactttttaatggagtttttttcaagtttttgttgcaatttttctcaaaagtgctaaagtgaattcataggtattttgaggttcttataagttcctcaaagattcgtttttcttttgttcctcgatattttttatcggggattttttgtttttttaaatatgtgtgtcccaaggtcgttatccccattgttcaggcacagatggaataataccctttgacactgtaataatataataataacaaggaggtttgtatgagtcaggacattaacagcattattaagcaactagccgaaattgattctgcttctgctaagattttacaaaagactcaggatgagaaagctcagtatgccgaaatgattaaacaacaaaagagagcttttgatgaagatcttcagaaaaagaacgattacgaagtaagtcaattccaactagcattagatgccgagaacgagaatgctttaaaacaatgccgtatagactgtgacaatgacattgaacagcttaatcgtatttataatgaaaactctgctaaatgggttgatgatatatttaatgaaataataaaggagtgattttatgctgaaaggcaatctggttgcttacagtggcatgactacaaagattagagccatgaagaataaattactttctcctgagcaatatgaagaaatcactcactttacaactgttgcagaattaattagttttctacagaccacccctgcatacggagaagtacttgccagtatggaccctgcacttgcacaccgtggtgaagttgaaagcagaatgacattctcaacttatagtgatttttctaagatatatcattttgcaggaaatagtcagaagaaatatttggaatactactttatgaaatatgagatttctattttgaaagcatgtatgagaaatattatggatagccgttctaatgctaatcctgttttaactgacaagcactttaagcgacacacaaagattaatattgataagctggtattgtctaataccattgaagagttcgttgacaatctttcaggtactttatacgagaaacctttaagagaagttcttaaattagacaatcccgttttatttgattttgaaatgaatctggatttgttcttcttttcatatatttggaatcatccggattattttgttccaaaaggagaacgaccatattttaagaagtcttttggacctcacattgacttgcttaatatgttatggatttatcgatgcaggaattattatgttttatctgatgcacagatttattcatttctgattccggttaattattatctggacaaaaacgaaattaagcgcatggttgaagccgaaaacaacacagtcctatatgaaataataagcaacagctattatggcaagacttatggtttcgattctaccaagaatatggaggctcaatttagtgatattttagatgctattaatatgaaggattttaaagatgctccatattcactggctgctattaatgcctacttccatttgaaaaatatggaagttgcccgcgttgtaacagcacttgaatgtattcgatacggatacaaaccggaagccatctcccaatatattaatcaaaagagaggtgttctgtaatgattgaaaaaatgagtttcgtaacattagcagggcctaaaactgagattgattatcttgttgatcattatcttagtaaacacgacattcaccttgaaaatgctctttcagaactaagttctgcggaacagtttactacttttacggaagagaatccttttaaggctatgttaaccaaaagccgtgaattaatgttacttgtaaagaatcctgagaaggctaccatttccaagattaacgtaaacaaggctcagaaatttatcgacaaaattgacgagcaaatcgatgatattcgtactgaagtagctaatcttgaaaagcagatggatgccttaaatcaggattatgcagttcttgctccttttaaaacgttaaattattcattaaaaggaatttatgacatggaattttttaagtacagattcggaaaaattccaaggtcggaattcgataagtttgaatcttacttagatcctgacatggatgaaatatttttaacttgtcttgtggagtcagaatatgtgtacggtgtattttttgcaccaatagataaatttaatgaagttgcaaaggattttagaaatattcattttgatgaaattcctattccaaaacaatacaagggatttcctaacgatgaatgtttaaacattgcaaagaacaaagctgagttagatgaaaaaataaaatccaaaaatgctgaaatttccacagttgtggaaactaaccgtgacaaacttgtttcagcctgcagaagaattgagattgctttcagtaattttgatgttcgaaagttagctgccgtaacaagggattccggtgtaacatttcaggttttatgtggttggatgactactaaggaagccaagaaacttcttaaggagacagatgacgatcctaacgttgtttgtattgttagcgatgaggttgacgaccataaatccataccgcctacaaagcttaaaaataaccgttttataagaccttttgagttatttgtaaaaatgtacggtttacctgcatataacgaaattgaccctactttattccttacaattacctatgctttcatatttggtattatgtttggagatttaggtcagggcttatgcttacttattggtggtcttattgtttacaaaactaaaaaaatggatcttgccggaataatttgtgccgcaggagttttttcctgtattttcggtgctttatttggaagcttctttggatttgaatttgagtcgtttataagtcctcttaattcaatgattaccttgcctttccttggcagtattaatattgttttggttgcagcatttttatttggctcttttgtaattgtttctacaatgattataaatattgccaatgccattaagcaaaagaatttaggcaaggctctttttggaccaaacgccgttaccggacttgtattttacgcaagtattattgccgttattattttatatatgacaggcaaacctttacctggaactattttggcagtaataatgtttggtattcctcttattcttattttccttgaggaaccacttaaaaaccttgtttcaaagaagcagcctttaatagaagattcaaaaggcatttttgctgcaactgcattttttgaattatttgactatttaataacttatttatccaacgctctttctttcctgcgtattggtgtttttgccataagccatgcagctatgatgcaggttgttatgacacttgcgggtgctgagaatggtggttcagccaatattgttgttgtcattattggaaatattatcgtaatggcaatggaaggtttagttgttggaattcaggttcttcgtcttgaatattacgaaatgtttggtcgtttctatgaaggatcaggacgtgaatttgtaccttatagaaaaaaatataaaaaataaactttaatttttttaaaacgaggaggattttattatgtttattagtattttatttacagttgctttattacttacaattattttacctgttatcggatattttgtaggtgaacggactaaaggtcgttttaagagaacagttattggaaatgttgtagcattctttggtgttttccttttaggaactgtatttatctttacaagtacagctaatgctgctgttgctgatactgcaacaatttcaagtggtttaggtcttattgctgcaggtcttgcaataggtctttcatgtattggtagtggttatgccgttgcaagttctgccagtgctgctcttggtgcattaagtgaagactcaagcgttttcggtaaagcacttattttcgtagctcttgcagaaggtattgctctttggggattcatagttgcattccttattttaacacacgttgcataatctattttaagcaggattttattatgaaaatgtatttaataagcgacaatattgatactcttaccggcatgcgacttgcaggtgtggaaggtgaagttgttcatggtcgtcgcgaagcaaaacaggcagttgaaaaaattcttgaagacaaggatttaggaattttacttttaactgaaaagctaagttttgaaattcctgaacttgtagatgatattaaacttaacaggaagcaacctcttcttgtagagattcctgaccgccacggctcaggacgtcaaccaaatttcattactaattacattaatgaagcaattggcataaaaatatagaaaggatgtgagacttatgactatagaagaaaaaatggaccactttagaagcctttctcttgaaagcgccagttcaaaaagtgctgaatctctcagtagttacaagcagtccttggacgatgacttagaacttcacaaggaaactgcatctcaattggctgaagaatcaaagaaagctctaatgaatcaggttagagctaattctaagaagaaactttcttccgaacaaatgaaaattaaaaaagaacttactcaaaaacaatcagctattaaaattgaagtttttgatagagttcgtgaaaaattacttgaatatagaaaaactaacgattacttagtgtatcttgaaaatcagattaaaaatataatgagcgaatattctgatgtagatattactatatacattgatcctaatgattcatctttgcttgatgaattaaaaagcaagactggaggaaatattgaaatttacaataaagaatttttaggtggaacacgtaccattgttcctgaaaaaaacattcttattgacaattcttttaaaacacgacttgctgaccaacaggatttatttgcaataacattgtaggaggcactaaattggaaaaaacaggtaagatttatggaattaacggacctgttatctatattaaaggaaaaacagactttaaaatgggtgaaatggtttatgttagttctgaaaggttagttggtgaagtaattagccttacttccgaaatgactaccatacaggtttatgaagaaaccagtggacttaaaccgggtgaacttgtttatggtacagatagtgccatatttgtaactttagcccctggaattttaaataatatatttgatggtatagaaagacctttaagtgagatacaaaagcagtcaggtgcttttatttcaagaggtgtaaatgttaattcacttgatattaataagaaatggaatgtgcatattaccgtttctgaaggtgattacatctcaggcggtacaattattgccgaaactcaggaaacaagagccataatgcataaatccatggttccgcctacagtgtcaggtactgtaattaagactgctcctgatggcgaatataccattaacgatacaatcgtaacaatcaagaaggatgacggttcaactatgaacctttcattaacacagaaatggccaatccgacagccacgtccaattactaaaagatttggagccacacagcctttggttacaggtcagagaattatggatactctctttcctcttgcaaaaggcggtactgctgcaattcccggtggatttggtacaggaaaaacaatgaaccagcaccagattgcaaaatgggcagacgctgacattattatttatattggctgtggtgaacgtggaaatgaaatgacacaggttttggatgaattttcagaacttattgacccaaaatcaggcaatcctcttatggatagaacaacacttattgccaacacaagtaatatgcctgttgcagcccgtgaggcaagtatttacacaggtattactttggcagaatattatagagatatgggctatcacgtagccatcatggcagattctacttcaagatgggctgaagctcttcgtgaattatccggtcgtctggaagaaatgcctgcggaagaaggcttcccggcttatcttgccagcagactttcagctttttacgaaagagccggatatatggagaatttaaatggtacagaaggttccatatcaattatcggtgcagtttcacctcagggtggtgacttttctgaaccggttactcagaatactaaacgtttcgtccgttgcttctggggacttgataaatcattagcttatgcaagacatttccctgccattcactggcttacaagttacagtgaatacgtagatgaacttgccaactggtacaacactaacgtaggtcctgattttatttcatgcagaactcagattcttgccattttaaatcaggaaagttcattaatggaaatcgtaaaacttatcggtagcgatgttttgcctgacgaccagaaattaacccttgaaatagccagagttattcgtctgggatttttgcagcagaacgcattccacagtgaggatacctgcgttcctttaaaaaaacagcttcttatgatgcagactattttgtatttacaggaaaaagcaggcaaacttatctcaatgggcatgcctatgtctgttcttaaaaaacataatatttttgaaaaaataatttcaattaaatatgatgttcctaacaataagctaagtatgtttgacgattataaattagcaattgacaacttctataataaagttatggaagaaaacgcttaaggaggtgctatttatggcaattgaatatttaggattaagcgaaatcaacggacctttgatagcccttgaaggcattaaagatgcagcctttgatgaaattgttgaattttcaattaacgatggcgccgaaaagcgtctcggtcgtattattgaaatatatgaagacaaagcaattattcaggtttttgagggttctgaaggtatgtcccttacaaatacccatactaagttaacaggtcatcccatggaggtagctttgtctcctgaaatacttggacgtacttttaatggtattggaaaacctattgacggacttgctcctattgttggtgaaaaaagagacgttaacggcaagcctcttaatccggtaagtcgtgaatatccacgaaactatattagaacaggtatttctgcaattgacggacttacaacacttatccgtggtcagaaattacctatcttctccggaaatggacttccacacgaccaattggctgctcaattggttaaccagtcttctcttggagatgacacagacgaaaaatttgctgttgtttttgcagcaatgggtgttaaaaatgacgttgctgatttcttcaaacgatcatttgaagaatcaggtgctttggaacatacggtaatgttccttaacatggctaatgatcctgttgtagaacgtcttataacacctaaagttgcacttactgtagctgaataccttgcttatgaaaaagatatgcatattcttgttattttaactgatatgacaacatatgcagaagccatgagagaagtttcttcttctaaaggtgaaattccttcaagaaaaggttatccgggctatttgtacagtgaacttgcaacaatttatgaacgtgccggtattgtaaaaggatcaaaaggttccgtgacacagattcctattcttacaatgcctaatgatgatattactcatcctattcctgacttaacaggatatatcactgaaggacaaattaccttggaccgtaatttaaatggtcagggcatatatcctccaattaatgttttaccttctctttcacgtcttatgaaagacggtatcggtgaaggctttacaagagaggatcatcaggatgtagctaaccaattattctctgcttatgcaaaagtaggtgacgcaagagcattagcttccgtaatcggtgaagatgaactttcatctacagacaagaaatatcttgaatttggtaaggcttttgagaaagaatttgttggtcagggtcttggtgttaacagaaatatttttgaaactttgaatttaggttggaaacttcttcacattcttccaaaagaggaacttgaccgaattgatacaaaaatacttgataaatattatgattcaatggcgtagtttttataaatattatcagaaacgtaggaggtttatatgaatttaaatactgttcctacaaaaggaaacctaatgtctgccaaaagttcccttgctcttgcaagacagggttatgaacttatggacaaaaaacgaaatattttggtccgtgaaattatggatttaaataatcaggctaaagccattcagtcagagattgatgaaacttttaagtctgcatatattgctttggaaaaggcaaacattgaattgggtataaaaaatgttgagacttttgcatttaacgttacccctgaaaatgatataagaataaagacaagaagtattatgggtacagaaattcctcttgtaaaatataaagaagaaaaacgtaatcctgtttattctttctttggcactactgaatcacttgatcaggctaaggcaagctttgaaaaggttaaagatttgacaattaagctttcaatgattgaaaattcagcttaccgccttgcttacaatattaagaaaacacagaaacgtgctaatgctttaaagaacataaccataccaaattatgaagctcttgtaaaaactattgaaaatgctttggaagaaaaagaaagagaagaatttacaagattaaaggttataaaatccagagttagctaagtacatttattataactttacaaaatgtttctcacatcttattatatttataagcagtactattattgtggtactgcttatatttttgtttattcaaaatatgatatttttaaattattaagtttattatattgatttttatctattttttttgtaaaattatctgtaatgattttagtagtatattttactaaattagattatataaaatttaattataaataaacttatattaaaattacaatggaattatatataagatcagaaagggatcaaatgaaaaaaattatatctaaaatacttatagctattttgctaataagttcctgtattggaactataaatgtagcacctgtaactgtaaacgcagcaacaaagactaactggcctaaaggtccttcaatctatggtcagacaggcgttttaatcgaagcttcaacgggtactgttttatatgataagaaatgtaataagaagatgtaccctgcaagtattacaaagattatgactgctttgcttacaattgagaattgtaagatggatgaaacggtaacattttctgacgcaactattcacagcttacaatatggagatgccaatatggggtgttctgtaggtgaaaaaatgactgtaaaggattgtctttatgctttaatgttacagtcagccaacgaagttgccacagcgcttggtgaacacattgcaggatctactaagaagtttgctgaaatgatgaacaaaagagctaaggaagccggtgcccttaacactcattttgccaacgctaacggtttacatgatccaaaccattatataacagcttatgacatggcaatgattacaagagcagcttctaagtattctgtatttaatgatattgttaatacaactacatataccattaagcacaataacaaacgtaaaaccgacgccactgcaatccagcgtcacaagatggtttggcctacaagcggttactactatgatggtattatcggtggaaaaacaggttttacagaccagtcaggaacaacacttgttacatatgcaaaacgaaacggtatgactcttatagctgttgttttgcactctaacggcactaatgtatacaaggatactaaggaattattagattatggttttaataattttggtttacaaaatgtttctaacaatgacaaaagatttgattctgacaataaggttactttacagtcacctttctgtaacacaacagattcgatatatatagataaaacatcaaacattgttttacctaaaacagctaaattttcacaattaacatctgatgtaaaatttaactacactaaagattcatttgctaccattacctacaagtatggcgacaaatccgttggtactgcaaaagtagtttattcatctgattcaggcaagactgactcaactgtaaccgtggcatcaacaacagcttcacagcagactacaactgcggcaaataatacaggcaacaataaaaatagcaaaactgcagtggcaaagaacaattcaggcaaagattcttcaaataaggaatcttcaaccacagtttctaataaaaactctaagaagtcttcatttaaacttccgggattttttgttcctttggtggttgttatcatcattattgtagttgttattttagttcttattctgactaacagacgtcttaatcagataagagcatctaagagaaatagaagatattaaattttttcaatgtattatcaggaggtacttttatgaattgggttgcacctattaaagatcaggaaacattaaaaaatttcggtgaaacattaaagaaggttgattacaagtactatattatgttcgaattaggtgttggaacaggactccagctccaggacattcttgcattcaagaacaaagatgtaaccggaaagaaagaaatcgaagttactattggaacaaggaatatgaagaatgtatttacagttcctgaagaattacagcagattattaatgagtatactaagggtaaagatcctgaagcatatcttattcttggacatagttcatcaaacaaacctgtatcaagagaacaggcctacagagtacttagaagtgcaggacacaagattggtttaaattcaatcggtgctcagactatgagaaaaacgtatgcatggaactattacaaagaaacaggagatatttatcatcttcagaaacttttcaaccatgcttctccatctattacatatagatttatcggagagaagccaaacattgaagttttcttaaagaaaatgacaccacaggaaaatgaacgtagccgttacttactttacttaaatgacaacggtaaaaagaaacttaacaagattattgatactttaacaggtattagagataactttgatagtcctgcaaacaatgacgctttctacggaaaggttgattgtcttttacaggaattagaagcattaatggaaaactaccaaaatacaaaatagaaattatcaacacacggttggtttttaatatattttattaacataatttaaaaagagctgctaatcaacaatgatttgcagctcttttaatttaatcgtcatcttcgtcttcccattcttctatgacgatttccctatttaaatatttctgtcttctctctcgtctcttctctcttattgactcttgtttttcatagatactgtcggcccccgccttatctgtagacttcataatcttgatagcataaaaactatcttcttcacatttttttatctttattttgcccctaacatatccatgttccttacattctccaagacaataatatgtttttccacaatcggaaaaccagtcaaggtgcttctttaacggcttatcacacttgttacataacattagtcttacgtctttgtctgcaaacaattcgtccttagtcaaaaactcacgggtaacaagtttagtatattcatcaaatctaacgaatatttcttcttctttaattctaggggaataaaatgtgtcaattgataaacgatctttatatttatcgtagtccatagattgtaaaattctggctgtataataagcatcgcttaaagccctgtggaactcatgctcttcctgaatgtttaaatactcaacagcactggtcaaatttcttttcatatgtccgtcatcatatcttaagctgaacattttctgtaaatcaacatagaataacggaaaatccaatactctttccagattataatgtttcatattcttctgcaattcagtcaaatccattgacccccatgtacagaaaatataatcatcaccgcaccattccagaaaatctcttattacttttctgaaatcttttccatcatttaactcttcttcagtgaaatgggtaatttcctgaatcttatagtgaagtttcttgaaaactctaggctttatgacctgttgaaaagaatccacaatggtctttctatcatcacttaccctaacagctccaatttctattatttcaaaagttaaatccgtatgacaatgactttttccgtaaggattctgattccactccaaatccattacaatataatccatcatttttctccaatattaaattacatgcatagcatgctaacgcacctgactggatttgaaccagcgacctaccgcttaggaggcggttgctctatcctgctgagccacagatgcaaatgtttacagaaaagtaagccctacattgtaaggctttactcttccgtaaatctttatgttctataattattattttgcttcaatcttttcaagtccacccatatatggtcttaaaacttcaggaattacgatgcttccatcagcctgctgatagttttcaagaatagctgctgttgttctacctgcagcaacaccactaccatttaatgtgtgtacaaattcagctttgtcgcctgcattatctttgtacttaatgttagcacgtcttgcctggaatgtttcaaagttactacaacttgaaatttcaacatatctaccataacttggcatccaaacttcaatatcgtatttcattgctgctgtaaatccaagatcaccaatacaaatcttaacaactctgtaaggaagtcctaacatctgaagaacatcttcagcatctcttgtaagcttttctaattcatcataagatgtttcaggcttacagaacttaactaattctaccttattgaactgatgctgtctgataagacctcttgtatctctacctgctgaacctgcttctgcacggaaacaagctgtgtatgcacaatgcataataggaagttttgatccatctaaaatctggtttctgtacatattagttacaggaacttctgctgttggaactaagaaatattccttaccatcaccctgaaccttatatgcatcttcttcaaacttaggtaactgacctgttcctgtcatactttcacggctaaccataaatggtgggaatacttctgtatatccgtgctttgtagtatgagtatcaaggaaaaagttaacgattgctctttcaagctttgcacctaaatctctatatactgtaaatcttgaaccactaatctttgctgctgtttcaggatcaaggattcctaaatctgcaccaaggtcccaatgtgcctttggttcaaaatcaaacttagtaggttctccaaactttcttatttcaacattatcttcatccgtcatcccctgaggaactgttggattaggaatattaggaagtgtaagcatataattatttaaatcttcttctgccttgcttaattctccgtttaaagccttaactttttctgaaatttctttcatttcagccataattggagctacatcttttccttctttcttatactgtggaataagcttagatgttgcattctgttcagcctttaatgcttcaacttcacctaaaagatttcttctcttttcatctaaatctttaaataagcttaaatcaaattcttcatttcttgtagaaagtgctttttcaacttcttcaaaattatttcttagtaatttaatatctaacattatttttctacctatcccgaatattattagcacaaaatcatactttcatattcaggctcagatacttcgggcattaagcatctgaatttcatcctttcatattttttattaaaccctttttatcttatcttcagtatatagattataaccctaacaccttatttttgcaaggattgtggcaaacattatccacttatggtatacttatgttaacaattataataatttaacctttttagtaatatacttgggaggaatgatacagatgaatactaatattaatgaaaatgttattaacacccgaagaaataatcgcatcataaagcacaatgatgctgtttataaagtatttaacgaaggatattctaaggaagatgttttcgccgaggctttttttacttcaaagattgaagggttaaaggtcggtgctccatcaattgagcaggttactaccattaacggtcaatgggcttttatgtatcctgacatttatggtgaatcactttacactcttatgatgaataatcctgacaaattagatgaatatatggataagtttattaaaattcagactaatattcatagtaagaaatgcccttatcttccaattcagaaacagaaattaactgattatattaattctgcacatttggatagatacttaaagcttgatcttcttgatatgcttaacagttcacctaaacataagaaattatgtcacggcaatcttacaccacataacatcatcataaaagatgacaatatttatgtaactgattggaaccatgcatcacagggtaatgccagtgctgatgttgcccgtacatatttatggatgcttattaacatgcctgattatgcagaaaactaccttgaacgattctgtaatgaaacaaatacaagttcaaagtatgttcataattggattccaattgttgccgcagcaagatgtgcaaaaaacattcctgaagaagtaaaagttctcaacggattaatttcagtaatggaatactaaataaaataataaaagcaagagctaccgaattattggtagtgtaccgacccccaaaagttagacctaaaaatctaacgattggaggtcggtatttttatggcaaaatacagttatgaattcaaaaagcaggttgttgacgcatatcttagcggtgaaggtggctatgaatacttagccaaacgatatggtgtaccttcctggtcaaacattaagaaatgggttcggaattatgaaactcatggtgacaaaggacttatgcgttcgcgaaaacaagataaatactcttttgaaaagaagctttctgttgtagaattatatttagcaagtgaactctcatatcaggagctggctcttcgtgaaggaatatataatccctctcaaatctgtaagtgggtaaaggatttccgaatcgccggtcctgacgcattgagaccacataagaaaggtcgcaggaaaacattgggtacatcaaacaaaaagttaaatattgaacaagatacaactacagttccggttgataccagtactgaacatgtaaaagaacttgaagatgaaattcttaagcttagaatagagaatgcatatttaaaagaagtgaggaggctgcgtttagaggaggaagctcttctgaaaaaacagcgagaatcgtccacagcctccggggagaattcaaattaaaagacattctcgcagttgttggttttccaaaggcaacatatatgtattgacaaaaaagatttgatagagaaaatccagatatagaattagaagaaaagattcatgaaatacataaatgtaacaaagattatggctaccgtcgcatgtgtggtgaactccgtaatcaaggccatatcgtgaacaagaagaaggttcaacgcattatgcagaaatataatcttcaggtgatgtcatttacgaggaagagtcgtaaatatagttcttacaagggtagaattggaacggttgctcctaatagaatcaaaagaagatttaatacacacatacctcaccaaaagattacaactgatacaacagagtttaaatactatgaagtagattctaaaggtaaaatgacaatgcataagctatatttggatccattcatggacatgttcaatggtgaaataataagttatggaatagataaacgtccttcagcagcaaatgtgatgaatgcactaaatgaagccattgaggtaacttctgactgcccatttcgaaggacctttcactcagatcaaggatgggcatatcagatgaaagcttattcacatagacttagagaagagaaaatatttcaaagcatgtcacgaaaaggtaattgccttgataattcagtcatggaaaatttctttggcctgcttaaacaagaaatataccatggaactgtttattacagttatgaagaattgaaaactgaaattgaaaaatatataagatattacaatgaaaaaagaattaaagaaaaactaggatggttgagtcctgtccaatacagactcagcctcttggttgcataaaaaatgcgtaacagatattaaaacctgttacgcaataaaagtctaactttttggggtcacatcatagctccttgctttttcttaatttattagtcttcgtctgaacttattgctttctgcaatgcctgcttttcttcttcaccaagtgttgaataagctgttccgttttctatttcttttatataagtgtaactgctttctctaccatgcattgtgtttaaaataaatccgttattattgtcatctaacaagcataatgcaaagcttaaatttccacccatttctttaaatgcatcatattttacaataccaagtttatgaaatgttgatgtgattccacttaatgccttgtccattttgacttctgcatcctggtaactgctttctaacttttccatctgctggaagttttcttcaatggcatctgcaaggtttgttgcatcttttccttccataaatgcttcatatctcttcattaactttgatattctactgctctgtataatatgtaacataaaaaatactaaaaatagtgctgcaattattcctatataaatgtaatctttcattttcttactccttttcacctgtttatacttattacaatgttattttaaagtgttgttttctaatcactttcaaaagtttaacataatattgttacatttttatgtattcaataataatttacattaaattattgattttgtatactatcaaataattccaaaagtcgttcaagctcatcctgagagtaatattctatctcaattttaccttttccgccttttttatgatttatgttaacctttgttcccataatttcctttaatttatctgataatttttcataaacaacatcatttgttgatggaattggaagttttgcctgttttggattcaaaacagctttcactaatttttctgtttctcttacgcttaactttctttccactattgcctttgctgtctcaacctgaacttcttctttttcaattgaaagcaaagctctagcatgtcccattgacagttcttcgtttataagcatagtttgaacctgttcagctagttttaatagtctcatagagtttgtaaccgctgttcttgacttagaaactctgtcagccacttcttcctgttttaaattatattcatcaataagactcttgtaagccaatgcttcttctatcggattaaggtcacgtctctgaatattttcaattaaagctatttccatgacttcctgtggagaatattcctttataattacaggaacttcctttaattttgccatttttgctgcacgccatctgcgttcacctgcaattatttcataataatcatcctttttttgtacaacaataggttgaattaaaccatactgcttaattgaatcagccaattcttccaatgcttccttgtcaaaattttttcttggctgttctctgttaggttctatgtctgataatttaagaaaagtttctgctggaacctttacttccttaactacctcttttacaacttctttaattataggcttgctttctttttcagttttactctgttttgtattatttccttccggaataagtaaatctaatcctctgccaagcccttttttcttagctgccatactgcctccaatctttttacaattatatattactatcttattttttaaattagtttacataagtaatattatgtaaactaatttgtatatttttttgttagatatttgctttttttgcattaatttctttaaaattttacttttattaacataaataactgtaaatttcaaaaaaattgttatttattaacattattttcagtttttttgttaataaagataattttctacttttaaattttaatacttttacttgcatttttttatcttaattatttttttcaatgacttcctgtgccaaatttttgtatgcaattgcacctgctgactttccatcatacatatgaattggtattccatagcttggtgcctctgctaatctaacatttcttggaattaatgtcttataaatatgtaaatggatattttctttaacattttcaacaacttctgttgataagtttgttcttgaatcatacattgtgaatacaataccatctatttcaagatttttatttaatctatcctgaattaagttaattgtatgaattaactgtgataatccttccaatgcataatattcacactgaattggtacaattacggaatctgcagctaccatggcattaactgttaacacatttagtgatggtggacagtctataataatgtattcatacaaatctttaattgtatctaatatatttttcaaaatatattctctattttcaacgccaattaggtcaatttcagcaccggaaaggttaacatttgatggtattacatttaaattatcaactgcactgtctgttaaacactctgaaaatgtacattctccaataaaaagctcataaacagtgttttcaagcgtctgtttcataattccaacaccacttgttgcatttccctgtggatctatatctactaataatacttttttacctgcatctgctaaacatgaagataaattaattgctgttgttgtttttcctacaccacctttttggttggctattgctattatttttcccattttttaaaccaaatctaaaataaattagactacaaacaaaaaagtgaaagtactgtttgctttaatccttccttgcttattctttcacttttgaatagaatttccccgtttttatattttaccacaataatagctagatttctatatgatatagtctaatgtttcacgtgaaacattactttttttcgtatgtatttacacattttgcagtttattatatttcatctttgtatacattattatttataatagattttcagtgcatatttgaatgtttcacgtgaaacatttcttataattaacttttatcttataatacattagaaaaactcgtaattttttattatatattgcaaatattctaaataatttcacaatatattatgatgtttcacgtgaaacatcataatatcaaaacaaattcgattaattgtatgttttaactattattttaagttttttcataaatatataaacaatactttttaatattagacttttctcttatttatacatcttattcacatatttaggcatcaaaaaaggatgtttcacgtgaaacatccttttttgattactttttaagttttttgtattcttccaaagctttgtttatcttgttaagttctttttttagttcttttacattatctttcaataatgtattttgttcttttattgaatttgactgttcttttagactagaagcttctttttgtttataaaattcttcttttctaacttttacagagaaaatattggctgcttcatcgtctatatattcaagttctttaatttttttggtgttttcttccaaaacattgctattatgttctatttttaaatttattttttctatttgttttaaaacaatatcttttctttcaattaaatacttttcaatcatttttttctccatttgttgtctacttataatggttctttagaaggtgttcctgcctttcttggatatttttttcccgtattatttgttttattaactactacaaaagttctatccatatctgagcaaggcaaatgtactgttttttcttctacaactactccgccaagtatttttattgcacttttagcattttgtatttcttctgagcttatagaagacttataacttataaattttccattctttgctataaaaggaatacaatattcacttaacgttgaaagatttgcaactgctcttgatacacacaggtcatattgttcacgaaattcttcttttcttgctatgtcctcggctcttccatgaacagtttcaatactttcaagccctaattcatcaataacattatttaaaaactttaatcttttatttaatgagtctaataatgttatttgtaagtgtggaaacattatttttattggaatacctggaaaacctgcccctgttccaacatctatcattttttttgactgatttatatcaaagatattaacaactaacaaactatctataaaatgtttgattataacttcatcatattctgttattgatgttaaattcataactttatttgtttcaattaacatttcataatatttatcaaacttttcaatctgttcttcagttatagtcagtcctaattcacttaatcctttaactaataaattttctttatccataaagctcctattattggtttacataattttagtttacataatttaagtaaatactcaatgacaattatatactcaaattattgttatctttatttactatctattacttatttattatttactatctattacttatttattatctattatttaatatctgttattttttgttacatattgttttaattatttttatgttgttccatataaataagcaatactgatatatctgccggtgaaacccctgatattctggaagcctgacctatattaataggtctataaaattcaagcttctgtacagcttcttttcttaagctatttacctttgtataatcaaaaccttcaggtatttttttgttttctatctttttaaagttttcaacctgcttcttctgtcttgaaatataaccactatatttaatatttatgttaacctgttcgataacatcataattaagtggctgtctttccttatcaagtggttcaatcttgtcataatccagttcaggacgcctaatcaactcagccagtgttgttgcagtctttaatgtagtacttccaaggctttctaacactgattgaacctctttatttgctccaactttataattttcaagacgttctatctctttttcaatcattttttctttttcgcacacataattatagcgctcctgaggcactaatcctacctcgtaacctatttttgttagtctaaggtcagcgttatcttgtctgagaagcaatctatattcggctcttgatgtcatcattctatatggttcatgactttccttagttacaagatcatcaataagcactccaatgtatgcctgtgaacggtctaaaacaattgattccttattctgaacatatcttgctgcatttattccagcaataattccctgagctgcagcttcttcataacctgaacttccgttaaactgtcctgcactgaacaatcctttaatctttttaaactccaagttaggcaaaagctgtccgtattcaatacaatcatattcaattgcataagcattacgtactatttttacattttcaagtccgggaactgttttatacattgcatactgaacatcttcaggtaatgatgatgacattccaccaagatacatttcatttgtaaacaaaccttccggctctataaatacctgatgacggttcttatctgcaaacttaaccaccttatcttcaatagaaggacaatatcttggtcctgttccttcaatcattcctgaaaataatggtgatctgttaatattttctctgattatttcatgtgttttctcattagtataagttaaccaacatgaaatctggtctttctgcacacttttaggatcagttgaaaaagaaaaaggtactactctttcgtcaccaaactgttcttccatcttagaaaaatcaattgatcttttatctactcttgcaggtgttcctgttttaaatcttctaacctttattccgttttctattaaagatgctgttaaattattagcagccataagtccgttagggcctgtatactggcaaacatctccgtaaatacatttagcttttagataaactcctgtggcaaggacaacagattttgcataatatgttgcacctgaaacagtttccacaccttttataacgccatcttcaaccaaaagttttgcaacttccgcttgtcttattgtaagattttcagtgttttctaatgttttacgcatttcacgtgtataatcctgcttgtcagcctgagcacgcaaagaatgaactgccggacctttagatttgttaagcatttttgactgaataaatgttttatcaatattttttcccatttctccgcctaaagcatctaattctcttactaaatgtccctttgatgtaccaccaatgttaggattacatggcattaacgcaatgctatccacacttacagtaaaaactattgtatttaatcctaaacgtgctgaagcaagtgctgcttcacaacctgcatgtcctgctccaactattactacatcgtaattttcaactaaattagccatctctgcctcctaaaagccactaagtaaattatttacccatacagaattttgaaaaaatctcattaacaagatcatcttcaacactttcaccaattattaaacctaaatctgtataagcatccattaaatctatcgaataaaagtcctcaggcattcctgcatcaacagaatttttaacctgttttaaactttccaatgcattttccaacgcttctttatgtcttgcgtttgttatataaacctgatcgttatatgttaccttacctgaatagaacatatttcttatttcttcttcaagctggtccattccttctccattttttgcagaaaaaagaattacatctctgttagaatctttctttaactcatcaatatttataacagtatccatgtcagacttattaacaagaattattgcctgcttgtcatttattaactttattatctctctatcattatcatcaagctctcttgaaccgtcaacaacgtatataataaggtctccttctttagctatctctttagccttattaacaccaatccgctcaaccaaatcttctgtatctctgattcctgcagtatctataatcttaagacttaaaccattaaagttaatattttcctctaatgtatctcttgttgtcccctcaatatccgtaacaattgctctgtcttctcctaacattaagttaagaagtgaagattttcctgcatttggcttacctaaaattacagtttttatgccctctttcataattctgccgttatcaaaagagtttacaagcttgcttatcttattaatattctcattaagcatttctgtgatttcttcgtcataaccgtctaaacttatatgttcaggatcatctaatgctgactcaataaatgcaatatgataaattatatctttcctaatatccttgattgcatccgaaactccacctttaagctgttcaattgagctgttaagtgcaaaatcattctttgaattaatcaaatccattaccgcctcagcctgagacaaatctattcttccatttaagaaagctctctttgtaaattctcccggctctgcagttcttgcaccgtttttcaaaactaaatccaatacttttttaagtattagcatacctccatgacaatcaatttcaactgtatcttctcctgtataagaatgtggatttttcattacaataacaagaacctggtctaatgttttatcaccatccattatatgtccataatgaacagtatgactttcaacatttgctaattttttatttttgttagctggtctgaaaatcttatctaccacttctatcgcttcatcgccacttactcttattattcctattcctgaattacctgctgctgatgaaatagcagctattgtatccgtaattttcatataactccaatctgtttattcttcaaataaacataaaaatccaccttaatatatctaaactagtatagcacacaacatcttttttataaagaaaaaaatcttatttacacggattgttacgtgcttacacaatcctgccaaaaaataagactcagggcattttttccctgagtctttaataagatactttaattatctggcatctttctttaacataactacaacatgtctgtatggttcatcaccttcactctttgttgtacagaacttatcgttctgaagagctgaatgaataattcttctttcataaggattcattggctcaagagctaccggttttttaattctcttaacctttaaagagatattacgtgcaagattttcaagtgtagcttttctacgttctctgtagttttctgtgtcaagtttaactctattaaacttttcactttctttgttgattacaagacttacaagatactgtaatgaatcaagagtctgtcctctctttccaataagtattcccatgtcttctccaataatattaatgttgacaatgttttctttttcattttcaacaattttaatatcaatcttaactgtaagttccattgctgtgaatactttgtttaaaaattctcttgcaatatcttctacagactgatttttcttagccttaataattgcaggtttgctaccgattcctaagaatccatttgaacctttttcaattacttcatattctaattttgcagcctcaataccaaggtcgatacatgcattagttatggcttcatcaacatttttacctttatattctttgaattccataattttgcctcaatctttatttatttttcattacgtttgttaaattcactaaccatattaacctttgatgcaagtgaaccttctttcttgctcattgcttctttagcttttctgattttttcttctttttcagcagcactcatacctgagtttgaagatatattcttagcattaacttttgatgcctcaagaactttttctctataaataccttctttttcttttctcttagctgcctttgctgcagccttatctttgttcttttcgatgatttcatctatgtcttcattcttaagaacaagattaataaatatctgctgtaatatcataaccagcgaacctgccatccagtacaaaccgatacctgctgataaaatccaacacatatatactgacataagtggcatcataatgttcattgctttcattgaacctgccataggattgtcagccatgtttgctgaaccagctgctgagttaatttttgttgttaactgaacactcaataactggaataaacctgccaaaataggaataattaatgcaactactatggttaccattcctgcattaaacattgtgctaggtgacatactaaggtttaatccgaaaaagttgttaaactgttctatttttgatgctactgccttatctgatacattaagaatatcctgtaacttaatgccactctgtaattttatactgctattcccacgagtataacctgacattgcatcaatacaactgtttaaatctgctgttgaaagattctttgcaagcttgtttaaaccgaaaaactctttcatctgacttaaatctaatccataaagaacatttaaatataattctttaacaggcttaacatatgcaggtacattcataattactctgtacaaagcaaataagataggcatctgaataataagctgtaaacaactacctgtaggagatgtaccatacttatcatatacagacttaatttcttcctgcatttccaactgtgactgctgatttttcttgtccttatacttcttctgaatcgcctgaatttcagggttcattgcagcattaagttttgtgaacttctgctgtttaatagtcattggaagcattaacattcttactacaatagtaaaaaggataatacagaaaccaatgttgtatattccaagtgcagcaaaaccatcataaataaattctaagattttacctaaaatccatgcaaatggtcctaaaattccacctgtctgtgttgctaatataaaattttccacttagtcctccttaagggacgggatcataaccacctttgtgaaagtgattacaccttaaaatccttcttattgcaagataagaaccttttaagggcccatatttctgtaaagcttccaacgcatattgtgaacatgtaggtatatatctgcaacagggctgtccctttaaaggtgaaagaaagattctgtaaaactttaccattccaattaaaataaaattcagtgcctttccaaacccttttacaatattattaaaaaccttcattccattcaccaccttttcccagtgaaaatacttctttacaatgaaagcttatctttccaattagttacaataataaataagtgagaataattataattataagtgtaaatataactaattcccataaatatttcagatataaaaactaccacctagttttcatccaaaatattatgaagctttgccaaatgcaataatgcactttcaacttctttgtaagttttgtccttagcagtgttacgtgctattacgactatgtccaaactactattgaacatatttgaatttagtctgtaggcttctcttattaagcgggttaggtgatgtctcactacactatttcctacttttttacttactgaaattcctaatctattaatgcttaaattattttgagcaacatacataactaaatatctgtttgcttttgattttcctttaacgtaaacattttgaaaatcactgttcttctttaatgaatcataatttttcttaatttccattttgccagttctcctattaagtaatcttttacctcatagaatgttacaaaaagaaaaaaaggtcacatttgaatgcgacctaagctgataatttttttcttccttttgctcttctgctagctaaaacttttctaccacctgcagtgctcattctttttctaaatccatgaacttttgatctctgtcttttctttggctgaaatgtcatcttcataataaggcacctccttttctgcttcatagtaaaacatcgttattattataaatgtaagaatatgcgtagtcaagcattaattaaaccatattttaaatatattttcaacttttttgaaaaaatattaattttatccctcttttttgatttacataaaatttttgctgatttacataaagttatcaaccaaatgttaataacatgttaataacttttattttttaatgttattttttagcactttttaactttttcaacttttttttgttaataacatttgatattttttgttgataaatgtcgaatttatgtaaatcaaatctcctaattttttaattttatgtaaacaagtatttttttgtttttttattattttttaatttttttattttttattcataaacttttatgttatgtctttcttcctattaaaaagtatattactaaatatattgaaaatccgccttatttgatgtattatattatttgaatgggcttttataccttttagaatatttaggagggaattatgttagacgatttaaaagaaaaatggcctgaaattctcgattttttcaaacaggaatatgatattgctgatgtttcgttcaaaacttggattttgcccttagaagtggaatcctttgataataacatgattactttggttttcccgggtgaaagtggaaagaccggtcttcagtatattaacaaaaaatatcttgcattacttaagatttctattgaagaaactttgaatcaggaacttgaacttcagattatacttccaaacgagacagtgtctaagattgaagatgagtcatctaagatttcatctgttagtcaggaagatatttctttagaaaatagaatattagatgcaaatcttaataaaaaatatacttttgattcctttgtagtaggatcaaataataatattgctcaggttacgtctttagctgtagctgagtctcccggcgatgtttataacccattgtttatttacggtggtgttggacttggaaagactcatcttattcagtccattggtaactttgtattaaaaaacaacccttcagctaaggttttgtatactactagtgagtcattcactaacgaagttattgatttacttagaaaaaagaaaactaatcaggaagagattattgaatttcgtaagaaatacagaagtgttgatgttttacttatagacgatattcagtttatttccggtagagacagaacacaagaagaaattttcaatattttcaatgatttatttatgaaacataagcagattgttttaacttccgataagaagcctaaagatatggaaggtatcgccgaaagacttattagccgttttgagcagggacttactgttgatattcagaaccctgactatgaaacacgtatggctatcttaaagaagaaggctgaaacttcaggctataacatagatgaaggtgtattgcagtatattgctaaccactttgtttctaacgtcagggaacttgaaggttctcttacacgtgttattacattttcaaagattagtcactctccaattacagttgattttgcatcaggtgtacttcaggagcttgtggcacctaatcaggagaatgccattacatgtgaatacattattaatatagtagcagatcatttccagatatctcctactgatatatgttcaaaaaagaagagtcgtgagtttgcatatccacgtcagatttgtatgtacttatgtagagtatttacagatgaaaaattagaaactattggtgctgccttaaagaaaactaatcacgcaactgttagctatggctatgacaaaatcaaatcagaaatcgaaacagactctaagacaagagatcttatagatgttcttaaaaagaagattaatcctaactagttattaacatttttaatagagttattaacatttggttgataatttagttaataacttacagtttttgtgttaataacttgttgatagtatttgtttttgttaacaatttgtcataatttgatgttaattgtcgaaaactcaaaagttagtaactgacatttttaggttaattatttgcaagttattaacaagttattatttttcgaacttcctttattcacaagggattcgactacttattaacatattaacgttgcttattattattattatctaatatatatatttatttatgcgtacttacgtaccgttatttttacgataaaggagatttataatgaaactagtttgtaaaaaatcagatttgattacaggtattaatattgtaatgaaagctgtatcatcaaaaactacaatgtcaattcttgaatgcattcttattgatgcaactgaaggagtaattaaatttactgctaacgatatggaattgggaatagaaactaaagttgaaggtgaaattattgaagccggtagtattgccattgatgctaagattttttcagaaattgttcgtaaacttcctgataatgatgttgttattgaagttaacgatgaaacaaaggctaatattacctgtgaaaattcaaaatttaatattcttgtaaaatcagcagatgatttttcttatttacctgaaattgaaaagaaagataagattactctttcacagtttgctttaaaggaattaataagacagactattttcactgttaatgatgcagataagaataagattttaacaggtgaattgtttgaagttatgggtaataagcttaaagttgttgctcttgataagtttagaattgccattagaaacatggaattaaaagaggactatggtaactttaaagttttagttcccggtaagtcattaaatgaaattagcaaaatcttaaatggtgatgttgatgatgaggtaaatatttatttcacatctaaccatatcttatttgaatttgatgaaacaaaagttgtttcaagattaattgaatgcagtaattattttgatactgataagatgattagtaatgattataagactaagattactattaacaaaaaagaaatggctaactgtattgacagagcaactcttttaataaaagaaggagacaagaaacctgtattcttaactattaaggatacagaaatggaattgtcaattaatacatttattggttcaatggatgaaagtatccctattgtaagagaaggttctgacatgatgattagctttaatccaaaattccttattgatattttaagagttttagatagtgaagaagtaaacatttatttcactaatcctaaggcaccttgttttatcagagatgatgaaaacagttacatttatgtagtgcttcctgttgtacagtaaaatagtttagagaggagatagtacaaataatattttttgtttgtattaatttggataaaaatggaaataactataaaagatgattttataaaattaggtcaggcattaaaacttgccggtcttgttgactcaggtgtggatgctaagtttgttatccaggatggtcaggttaaagtcaacggagaagttgacacaagacgtggaaaaaaactttatgccggagatacatttgagtttgaaggaacagtggtaactgtaaaataatgattgtaacaaagatagaacttagcaattttagaaattacgattctcttagtttggaattagatgataaaactaatattttatatggcaaaaacgctcagggaaagacaaatgtgttagaggctatttatctttgcagcacaactaaatcacatagaagtagcaaagatgcagaacttataaagtttgaaaataatgaaggtcacataaaactttttattaacaaaaaaggcagagagtatagaatagacattcatttgagaaaaaataagtcaaaaggaatagccataaatggaataccaattaagaaagccagtgagctttttggaatatttaatgtaatatttttttccccggaggatttggatattataaaaaacggaccagctgaaagaagaaggtttgtggatatggagttatgtcaactagataaaatatatgtttataatttaattaattacaataaggttttgggacaaagaaatcagttattaaaagacatatatatgaaaccggaacttgaagatactctggatgtatgggatatgcagcttgcagagtatggaagtaaggttattaagagaagagaacagtttataaaagatattaacaagattataaagccaattcacagaaaacttacagagaacagcgaagaaatagaagttgtttacaaaaagagttgcaatgaagatgagctttataacaaaattatagaaaacagaaagaaagacattaagctgaaaagtacgtcagcaggtccacatagagatgatattttattttttaacaaagatattaatattagaacctatggaagtcagggacagaaaagaactgttgctctgtcacttaagctggcggaaatagagttggtcaagtctttgatcaatgacacacctgtgttattattagatgatgttctgtcagaacttgattcggacagacagaatcacttactaaaaagtttagatgaaattcaaactgtaataacatgtacaggtttagatgaatttattgaaaatcgatttagtataaataaggttttccaggtaacaaaaggcaaaattgaagaaagaactgtttaaaaagcaataaaaaatacaatccgttattgcaaatactgaaaggagttacgaatgggtaacaatactaacgttgaaaatgaatatggagcagatcagatacaggtattggaaggacttgaagctgtaagaaaaagacctggtatgtatataggttcaacttcatcaagaggtcttcatcatttagtatatgaaattgttgacaatgcggtagacgaggcattggcaggatattgtgatactattgatgttcagattaatgaagataattctattacagtaagagatgatggtcgaggaatacctacagacattaatacaaagacaggaaaacctgcagttgaagtagtatttacagtacttcatgccggaggaaaattcggtggtggaggatataaagtatcaggtggacttcacggagtaggtgcttcagttgttaatgcattatctaaatggttagaagttaaggtttgtcgtggtggaaaagttcactatcagaagtatgagtatggtaaggttgtagaaccgctaactgttattggtgattgtaatcctgattttacaggaacagaagtaaaattcttacctgacgacactatatttgaagatacagtttatgattataaaacacttgaaatcagattaagagagacagctttccttacaaaaaatcttaaaatcgtattgagagatgttagagaagaaaagccaatagagaaaacattccactatgaaggtggtataaaggaatttgtaaattacttaaataaaggcaaacaggaattatatgatgatgtaatttattgtgaaggcacagttaataatgtttatgttgaagttgcaatgcagcataatgatgcatatacagaaaacactttaagctttgtaaataacattaacacacctgagggtggtacacaggttgaaggtttcaagagagcaattacaaaaacatttaataactatgcaaaacagaacaagattttaaaagaaaacgaagaaaatctttcaggtgatgactttagagaaggtcttacagccatcattagtgtaaagattgaagatcctcagtttgaagggcagacaaaacagaaacttggaaacagtgaagcaagagctgcagttgaaggtgtaatgagtgaacagttaacttattatcttgaacagaatccggcaattgcaaaaattatttgtgaaaaagctgttttagctaaaagagcaagagatgctgcaagaaaagccagagaagcaacaagaaagactgcattatcagtggcagcccttccgggaaaacttgcagactgttcagataagaaccctgaaaactgtgaaatatttattgtcgaaggtgattcagccggtggctcagctaagaaggcaagaacaagagcaacacaggcaatacttccacttagaggtaagattcttaacgtagaaaaagcacgtattgataagattatggacaatgcggaaatcagaacaatgattacagcttttggtacagggattcaggaagactttgacataacaaaacttagatataacaagattattattatgactgatgccgatgttgacggcgctcatattgatacacttatgcttacattcttctatagatttatgcctgagttaattaaggatggccatgtataccttgcaatgccaccactttatcaggtaacaagaaataagaagaactattatgcatatagtgatgatgagttaaatcagatacttactgaaatcggacgtgataatcagaacaagattcagcgttacaaaggtttaggtgaaatggatgcaagtcagttatgggaaacaacaatggatcctaatacaagaattttaaaacaggtaaaaattgacgaagataaattatcagaaatggatcagacatttacaatacttatgggggatgatgtagagccaagaagagaatttattgaagcaaatgcaaaatttgttaaaaacttagatatataggaggaaaatataagtggacgataagatatttgacaagattcataaagtagacttaaaagaaaccatggaaacctcttatatagattatgccatgagcgtaattgcatcaagagcattacctgatgtaagagatggtttaaagccggttcagcgtagagtactatactcaatggttgaacttaataacggacctgacaagccacacagaaaatgtgcccgtatcgttggtgatacaatgggtaaattccatccacatggtgatagttctatttacggagcattggttaacatggctcaggaatggaatacaagatatcctttagttgatggccatggtaactttggttcagaagacggtgatggtgctgccgcaatgcgttacactgaagcacgtcttagcaaaatatcaatggaaatggttgcagatattaacaaggacactgttgaatttacaccaaactttgatgaaacagaaaaagaaccatcagtacttccatcaagatatcctaaccttttggttaacggaacaagtggtattgccgtaggtatggcaacaaacataccaccacataacttaacagaaacaataaatgcaattgtaaaaataattgacaataaagtagaggaaaacagagacacaaccatagaagaaattatggaaattattaagggacctgattttcctacaggtgctacaatcttaggtagaaaagatattgagcaggcttacagaacaggacgtggaaaaattaaaacacgtgcagtttctgaaattgaaacaatggacaatggaaagagcagaattattgtaactgaacttccatacatggttaacaaagccaagttagtagaaaagattgcaagtcttgtaaaagaaaagaaagttgatggaataacagacttaagagatgagtcagatcaggaaggaacacgtgttgtaattgaagtaagacgtgatgccaatgctaatgttattttaaatcagctttataagcatacacagttacaggattcttttggtgtaattatgttagcattagttgacggagaaccaaaagtattaaatcttcttcagatgttagatgaatatttgaaacatcagaaggatgttgtaacaagaagaacaaagttcgaattaaacaaggcagaagaaagagcacacattattaaaggtttattaattgcccttgataacattgatgaagtaataaaaataatcagaggttcaagaacaactgcagacgcaaagaagaacttaatcgaaagatttggtctttcagatgcacagtcacaggcaattgttgatatgagacttcgtcagttaacaggtttggcaagagaagaccttgaagcagaatacgctgacttaatggcaaagattgattacttaaaatctattcttgcagatgaaaacaaacttcttacagtaataaaagaagaaattgaagttattagagataagtttggcgatgagagaagaacaaagataggaataaatgttggagatttatctgatgaagatttaattcctgaagaagatacagttgtagcaatgactaacttaggttacataaagagaatgactgtagacaacttcaagtcacagaaccgtggcggtaagggaataaagggaatgcagactatagacaaagactttatgaaagatatgtttatggtttcaactcatgactatattcttttcttaactaatacaggaagaatctacaaactgaaatgttatgaaatacctgaagcaggaagaacagcaagaggtatggcaattgtaaacttattgcagttacagcctggcgaaaaaatttctgcaatggtacagatgaaagaatttgaagaagacaagtaccttattatggcaacaaagaaaggtactattaagaaaacacctataatggcatatacaaatattagaaagagtggtattcaggctattactttacgtgaagatgatgagttaatagatgtaactatctcagataacaatgataatattatgcttattacaaagaaaggtcagggaattaagttccgtgaaacagatgtccgtgaaacaggacgttcagcaatgggtgttagaggtattgaattaaatcaggatgatgaagtaatttcaatgcagttagaatcacagggcgaatgtgttcttattgtatcagctaatggtatgggtaaacgtacaccatttacagactttaagttacagaatcgtggcggtaagggtgtaaaatgctataagatatccgataggacaggagaggttgtaggagctaaggcagtaaatgatggaaacgaaattatgatgattacaaacgaaggtattgtaattagaatgttcgttgacgacatctcaattcttggaagagtaacacttggtgttaaattaatgaatacaggtgacaaggatgatatagttgttgcaagtataacaaaagttaaggaaagtgttacagaagcagatgcattagaagcagcaagattatcagaagaaaatgaaacattagacgaaggtagtgaagaactatcagaagattcagattctgaagataattaataattactaaaaggtgactatattgtcgccttttactttataaaaatgccggaaggataaaagtaaaatgagaaacatagattcaagtgaaattacaaaaaacataaaagaaatgtgcatagaagcaaatcattttctagcaccggatatggaaagagtatttaaaaaagcaaaggaaaatgaagagtcaaaattaggatgccagatacttgagcagttagatgaaaatttaaaaatagctgcagaagatatgataccaatttgtcaggatacaggaatggcagtagtttttattgaaataggtcaggacatacatatagaaggcgaaaacttagaagatgcaataaacgaaggtgttcgtcagggatatgttgacggctaccttagaaagtcagtagtaagtgatcctataataagagaaaacacaaaagacaatactccggcagtaatacattatagtatagttccgggcgaaaatataaaaataacagtagctccaaaaggatttggcagtgaaaatatgagtaaggtatttatgttaaaacctgcagatggaatagaaggcgtaaaagatgcagtattaacagcagtaaaagaggccggtcctaacgcatgccctccaatggtagtaggtgttggaataggtggaacatttgaaaaatgtgcaatacttgcaaaaaaagctttggcaagacctgcagacagcaattcagaaattccatatgtaaaagaattagaggaagaacttttaactaaaataaataaattaggaataggaccgggaggcttaggcggaacacagacagcattatccgttaatgtagaaacatatcctacacatatagcaggcttacctgtagcaataaacatctgttgtcatgttaacagacatataagcagaacactataaggagaaccataatgaatagaaacataacagcaccattatcagatgaagtagcaaaagaattaaaaagcggtgattatgtatatataacaggtacaatatatactgcaagagatgcagcccataaaagaatgtgggaagcattagaaaaaggtgaagaacttcctatagaaatgaaaaacaacataatctattatatgggaccatcacctgcaagagaaggaagaccgatcggttcagccggacctacaactgcaagcagaatggataaatatgctccaaagcttcttgacttaggcttaaaaggcatgataggaaaaggaaaaagaagtgaacaggtaaaagaagccatcgtaagaaatggaagcgtatactttgctgcagtaggaggagcaggagcaatattatcaaaagcaattaaaaaaagtgaagtaattgcatatgatgaccttggcacagaagcaataagaaagttatatgtagaagactttcctgcaatagttgtaatagacagccagggaaacaacctatacgaaacagcaataaaagaatatgcaaaacagtaaagtaacaaaagaaaaacaaatatagaaataattgaaaaaaaacaattaaaaatgtatttgacaaataaatgttactatattataataagtaatgcactgcacaagtgcagtaattaaataactgataaataatcaggcaaggagaaatactcaagtggctgaagaggcgcccctgctaagggtgtaggtcgtttgcgcggcgcgagggttcaaatccctctttctccgttaaggactcaaacaatgtttgagtccttttttaataactggaaattccaacggaatttccagttattaaaaatcctccggaggaacacagaggcgcggaaacaaagtttcgtcgtgtataacaaaaacaaattaatagcaagcaattgtataatcatagaaacaaaaaaataaaactaaaaatctgttgacattattctactaaaatggtaaagtatctcttgcactgctcaagtgcaggaaaacaacaaaatataaagttaaaaaacttaaaaaaaaagttgttgacagacaataacggaaatgttattattaatgagttgtcgctgagacaacaaaaaagaattttaaaaagttgttgacagataaagaaaattatgataaattattctggctgtcgaaaaacgacagaaattcttgaaaaagaaaaataaa

SEQ ID NO: 12682 - DNA, 15487 bp, Unknown
  gut microbiota DNA sequence
acatctcttgctttatccaatctaatgtattacatatatcttcactaataccagtattaataagtgtaccggatagaaccagtagaacatatattttaatttctttgtgcccggttttttgttataaaatgctatgggcaacacgcttaacgccccccaccactgcactccaaatccaaacattccaatgttgaatactaagtttgaaattgctcttcctatgtgatgattgttaaacacataaaaacatataataagcattactccaccgtatgaatatgatgtgtggaggaagtatgccattccaaaagctactgccattgttactaattcaagtattgtgttaagtcttccggctcctatgtgttttaatattttgtcagaatatgcaaccctaaacattgatatggactgtaatgcccagattgccatataacctataaataaagtgaagattacgttctgtcttgccatatcaaagaatctgccataaagcatatcataaggaatctctgatactaaggcaaatattccaagcctgattgcatgttttaatctgtctgatgtatggaaaaatccctcaaccaaaacaaaacagaatattgggaagcttatacgcccaatagatctaagtattatatatgtctgatgattgtcctgaaaaaataaaaaacctacgtggtcaataatcattgtaatcatagcaattatttttagggtaaatgtactaatcccccatttatcaagattaataaacactccaagacctttttcttttaattcactcattttctcttgtttccttgtgtttccatttattgcattttcttatttagccattaaaactacaatgcttcttggtggcacctgaagcattctctcaatgccatcactgggttccttaaatcctgaatctgtagcaaaaacaactttccactgtcttttatttcttgcagacggaatgccgaatttaatcatctcccaaaacatattgtaagctatgaataagtctgcttcatcttcttttccatcaatagttgcatattttccgcaatacataacagaaaaatgtctgttaaaatgactaaaatctgcataccatgccttagaaccgtgataagacatatccggcaaaccatatgacttataatccataagccttggctcgctgcttaaatgcaaaatcttatgctgctttctaaactgaataagcttctttgtaaagtcaagaatctcctttgccatggctgttgtattccagttagtccatgatatttcattatcaagacaataagggttgttatttcctttctggctgttacacatttcatctccggcataaatcatgggtactccctgacttagcaatacaagtgaaagagcgtttttaatctgatgctttcttaactcatttattttacgttttcttgtatcgccctcagcgccacaattccaactataattataaactgcaccgtccctgttattttcgccatttgcctgattgtatttcttatcgtaagaaaccgcatcatataatgtaaaagtattgtggttagccacataattaactactgccactgctggcggattagccttaatcttgtaagatatggtatttaacatatcctcatcgcctttaatgaactttcttgccgataccataaaatcatcattaaagtttgccagattcttattttcaacattggcataaaaatccgtatccgtagcaaaattataagtaaaaatctttgttgtagacaaaagattgtccgtctgaatcatcttcataactgctttttcacagttagcgtgaataccgtcaatatgatactccataacccaataatgaagtgcatccaaaataagtgtaggattagttccttcagggaaaaagtattccatagaaacctctattccgtttctatgaagctctcttaccatgtatttgaactcttcaacttcactacccggctttgtggcataagcatatgaagctttcggtgcaaaagcataaccgcttgtatatccccaataattaagcacagggttctcaatgctaaactgtcccttcatagacgttgccacatgtgattccatttcattaaattcatatgccggcattaactctatcatagttattccaagttcctttaaataaggtatcttatctacaattcccaaataagttcccttatgcttagcctttgaacttacatgttttgtaaagccacgtacatgaagtctatatataattgtctcatcataaggtcttctaagtggtgcgtcgttttgccagtcaaattcactgcttacaatgcttcctcttatatcagtaggaacaattccccatttttcttttcctgaaagtgcctttgcataagcatctgtcacaatctttccatcaatagaaaaattataatcatatttcttataatcaagcccttcaatgctcattgcaaaaacatttcctataacctgcgcattttcaaaaggaatacgtgccgcttcattgttttttcctttttcatataaaacaagctcacatttacttcctaatcttgctgtaatggcaaaattaaccgtgttgcctattacagtagcccccatcattaaaggattacctctgtatgcttttattttatttaaatccattgtgtatcctttccagtcattcttaatatgcccatatagacacaattttgacataaattcttatgcccgaactttcgcatagataagtgaattataacatacccttttgattaaagaaacaaaatcaacctacaaaaatagttttattaattttcccacgttatcttttctgtacttttacactacatttattaaacctttattgcttaaaattcccaaaactgttatactaatctgtacgggtgcgatagcccacacaccattattaaataagagaggtaacgaaaaaaatgataagtacaagcaatgtatctttacgatttggtaaaaaggcattatttgaagatgtaaatataaaatttgttccaggtcactgctacggcttaatcggagccaacggtgccggaaaatcaacatttttaaagattcttacaggtgaaatcgaacctacaagcggtgaggttattattacaccgggtgagcgtctttcattcttaaagcaggatcacttccagtatgatgaatgtactgttcttgatactgttattatgggtaatcagagactttacgatattatgaaagagaaagatgccatttatatgaaggaagactttagcgatgaagatggtatccgtgcttcagaattagaaggtgagtttgcagaaatgaacggttgggaagcagaaagtgatgctgctactcttcttaacggtcttggtgttgatactgaatatcattacaaccttatgaaagaccttaacggttcattaaaagtcaaagttttgcttgcacaggcattgtttggtaatcctgacattcttttacttgacgaacctactaaccacttagaccttgatgccattgaatggcttgaagagttcttaatcaattttgacaatacagttattgtagtatcccatgacagatacttccttaacaaagtttgtacacagattgcggacattgattatgctaagattcagttatacgcaggtaactacgacttctggtatgaatcaagtcagttaatcgttaagcagatgaaagaagctaaccgtaagaaagaagaaaagattaaggaattacaggactttatccagcgatttagcgccaatgcttctaaatcaaaacaggctacttcaagaaaacgtgctcttgaaaaaatcgaattagacgaaattcgtccatcaagccgtaaatatccatacatcgactttagacctaaccgtgaaatcggtaatgaggttcttactgtggaacatctttcaaaaactattgacggtgttaaggttttagatgatatatctttcgttgtaggacgtgaagataaaatagcttttgtaggttctaacggccttgcaaaaactacattattccaaattcttgcaggacagatggaaccggatgaaggttcatacaaatggggaattacaacttcacagtcatacttccctaaggataacactaaggactttgacagtgatgatgcaattgttgactggcttacacagtactcagacaacaaagacgcaacttatgttcgtcagttccttggcagaatgttattccccggtgatgcaggtgttaagaaagttcgcgtactttccggtggtgaaaaagttagagttatgctttcaaaacttatgatttcaggtgccaacgttcttattgttgatgaacctactgaccacttagatatggaaagtattacagcacttaacaacggacttattaagttccctggcgtacttttattctcttcaagagatcatcaggttgtacagactacagctaacagaattatggaaatcgttaacggtaagttaattgacaagattactacttacgatgaatatcttgaaaatgatgaaatggcaagaaagagagctgtttacacaactgacggaatggatgcagataactagaatcaaatattttgatttgtttttttgcttagattaatacattttattattaacagttaattttatggagtatctatgagaccacatactattacctatccccctgacggtgttgaaccaattggggttattgaatttgttcacggaatgtgcgaaacacgtaaccgttatgctgctccaatggagcatttcagccgacacggatatatatgtgccattgccgatatgcgtggacacggagaaaacatattaacaaatgatgacttaggctattttggcgaagaaggctacaaaggtcttgtaaacgatgttcaggaatatactatgtatcttaaacgtgaatttcctaatttaccttttatacttctaggccatagtatgggttcattggttgtaagaacatatttaaagaaatattctcaggaagttgatgccgttatacttagcggttctccttctgaaaactcattggctgctgccggtaagtttttagccaagtttcttgcattttttagaggctggcattatagaagcccttttattgaaaatatggttaacggtccatttgagaaacctttccttaaagaaggtatcgttaactcatggctttctaccgacaagtttattgttgaggaatataacaaggatccactatgtggtgttcctttcacactaaatgggtactactgccttttctcattaatggaacaggtttatagtaagcttggctggactaacaagaacaaacaacttcctgttatgtttatgtcaggtggagatgatccctgccgtaaaagtgataaagactttaaaaaagctgttacccactttaaacactgtggttttccaaatactttttcaaagttatatccgggaatgcgacatgaactctttaatgaattaaacaatgaagaagtctactatgatattcttaaattcttagaaataaaagttggtattgaaccactggaagttgatgaggattaattattatctataaaaaaaaagaattgcgtatcctttaagcaaaacacttaaaagcatacgcaattcttttttttattaataatttcccaatattttcatattaagcgcttctgcattaattccgctaagagcatttacaactccaggctgattagccctaccctcaaattcaacatagaatctgtactcccagttcttatccggtacaggtcttgactgaatacgtgtcatgttaaggtcattgtaaataatatgagataacatctgatataaagtacctgatgcgtgaggcatttcaaaactaatacaaatcaaacctgcatctcttcttgccactctctgacggctgataataataaactgtgttgtattagagtcattaaaattaatgcctttatgtaaaatattaagtccataaatatttgctgcattttcgctggcaatacaacctctggacttatctgactgttccgaaatatatcttgcgcttattgcagtattggcaagattaaccttgccccaaccatgttcttcaataaacttgttgctctgcataaatgcctgtggatgtgaataaacatcctttatatcatcaattgtagctcccgaaataccgcaaagacaatgttcgatttttacatcaaatgtgtccacaatgtaattctgaaattctacaagcaaatcatatacatctgttacaattcccgctgaagaattttcaaaaggaagaactgcatagtcagcctttccatctctaacatatttcattgcttctctaaaagttgtaacattaacgtaattaaccttatccccgaaatattctgttgccgcctgctggctgtaagctccgggaattccctgatatactactgttgcatcctctgttggaagcttatctacaatatcaaacccaatatcattgtttacgccttcttcatttaaaagcttatactgcatcttacgactcatagccataatctgctcaaacaattcctctacgccgtgagcataaaaatcgtctgatgctttagtctttaaagtggctattttatcaagctctctttgtctgtcaagaactggcttgcctgttctaagtttatactctgctacatttttgcaaacttccattcttttttcaaacaatctaataatgctatcatctatttcatctatttcttttctgctttctaataaatccttcattgtattccttatgctttcttcagttttttcttattgttcagacatctgtttcatgttacatccaccacaacctgcacatttgttatccggctgtaactcctctaacatctgactaactgttttatttaaaatcggatgtactgcatacggtgctatttgtttaagaggttccaaaacaaaaagtctcttatgcatttccacatgaggaattaataaatccttttcattaactatatcattattatataaaacaatgtctatatccaaagttcttggtccccaatgtatttcacgggttctgtttgcctcagcctcaattctgttaactgtagctaataattctttaggttcatacaatgtttctatttcaacgcaaccatttaaaaaattgtcctgttccacaggtccataaggttcagtttcaataaatttagataccgccaaaactctgcaattttcatcatcataaagactatcaattgcctgattaaggtatccctccttgtctcctatatttgagccaatacttaaataagccttattccactttcttgaaattgaaacagctacatttccaaaaggtaacttaataggtgcattaggcttattaatagtaaaatcaatagccttaatctttggaaactctttcaaaagtcctcttgtggtctgctctgcaacagcttctattaagtcaaatctattttcagtcataaacttatttataaacttgcacgcctttgcataattaactgtgtcctccaaatcatcgcttaatcccggagttctcacatcagtataaaggttagcgtctacataaaacttctgaccgtttattttttcatcttcattgcaaccgtggtatgcaaatatttctaactgtctaatcttaatacaatccatattatttcctttttagataatatttttgttttttaatctttaatagcatttaaacttatgcttttagaatcttctcagccatcatcattgcctgataattctcttttacatcatgaactctaaagattctgcatcctctttcaagtcccataactgttgtggcaactgtgcctgccattctgtcattcttatccacatcgagagttaaaccaataacagactttcttgatgtaccaagaagtacaggataaccaagttccaaaagtttgtccacgtgcttaattattaaaagattctgttcataatcctttgcaaaaccaactcccggatctaatacaatctgagaatccttaactcctgccttgtgagctatctcaacagattcctttaattcattaactacatcattaacaaaatcattataagttataacattcttattatgcataacacaggctgctacacctgtttttgccacaaggtctgccatatctctttcgccatacttaaatccccatacatcattaatcatgtcacatccggctttaactccggcttctgcaactttagtcttatatgtatcaagtgatacagcaatatcaaaattcttcttaattgcttcaattacaggcactacacgacctatttcttcttcgtcactaataagtgtgtaacctggtcttgtagattcgccacctacgtctataatctttgctccatccttaatcatttcttctgtatgctttaatgcagcatctaagttgttaaacttacctccatctgaaaatgaatcaggtgttacatttaaaattcccattattacaggttctttttctaaatcaaaattgtattttccaatattcatatcatactccaatctttctactggccatccctaaaaattgacaagacgtcacttctaagatttctgtcctcttcaaaaactcctgtacttgcaaaagtaaccgtcttgcttcccggcttcttaattcctcttgcagacatacacatatgctctgcctgtgccataacaagtacaccctttgctcccagatacttctccaatgccttagctatctggttagtcatctgctcctgaatctgtaatcttcttgcataaacttctactgttcttgcaagtttactgattcccacaaccttgccatttggaatgtacgcaatatgcacctttccataaaatggcataagatgatgttcacatgttgaataaaaagtaatatccttttcaataacaacattctcattatcacaagtaaatgttttagacaaatgttctttaggactcctattcataccgctacacaattcttcatacattcttgccacacggtccggagtatcctttaggccttctctatccggattttcaccgattccctctaataaaagtctaattccttcttctattttcttcttgtcaaacacgtcaatctctccttccggctttaactgtttgtttaatggttacagattaatcttacaacctgttttagctctcctaaataagacaatgaaccaaacgccaaaatcatatcggccctgttctcttttattgtatctattgattcttccgcagcctgcttcaaactatctgcaacctgtacattatggttatatttcaccaaagtttctgcaagcttgtgcccgtctaaacctcgtgaattgtttggcgttatcgtaataattctttctgccctgtccgcaataatttctgcttccttggaaaaatctttatcagacaacacccccattataaatgttattctcttatttgtaaaatataaatccaaagttttccttagttcaagcactgctcccggattatgagcgccatcaattataattaacggctccttacttatgacttccatacgtcccggccaaactgttttttctatgcctttttttatatttttctcaattgtatttccactattattaatattatttttcataccagtgctattattgttatctgactcatcgcatatatcggtcttttctgttaatgctttatcaagcactaatgctacctcaactgctgtcttagcatttttaatctgatatgtgccaagagcctgaaggttaagaatatattctttattattagatgctttgtatgtaacctttgttgttaaaccatctatttctacattctcagcattttctattccttctgtatttacattataaattcttttttcattgtctaacaagttattgtctttgttatttttaaattcctgttcagtaggaattataagttctgaattcttctgcttgcaaaccttctttattacactctcagcctcccctgtctgtttcgacattacaaccggacagttctctttaattattcctgatttaacttttgttatttcttcaatcgtactgcctaaaaactgggtatggtcaagactaattgtggcaataacactgcaaagaactttttcaaatacattagtggcatcagtttctccgcccattccacattcaattaaagctatatcacagttctgctctttaaaaaacattaacgcctctgctgtttctatttcaaaggatgtaggatgtggcaaaccttcactatacatactgtcacatttttcttttattcttgtaagcaaatcagcagattgttcctctgatatgtattcgtcatttattcttataatctcacgctcattaaaaactgcaggtgaacaatatcttccaaccttatatcctgattccattaaaatattctgaacaaaagtcataatggaaccttttccgttagttcctgcaatgtgaactactttaagttcattttgtggattgcccaatctcttaagtaattcttttatggtattaagtcccagaatacttcccaacttatttacattcttcaaatactctcttgcttcactataattcatttccatatcctcaatcctaatctattaaacagtcaactttaataataaaatctaattatcactttaataatgtaaaagaaaggcctgaacaatttcaagccttccctaaatctcattagtttcaaaaactatactaacgctattaatataaaattaatataaaactcttaatcaagcatattagaataactaagatatttcttcattacatatcctgtatccttgccatatttaatctggcaccacttgccattctctgagatgacctgtactttcttacctgctcctatctgagttataagtttggatttggcacttgccgacttacgcaggttcaaaacatcagtagtatacatatactcttctgccgtagtagtttcctgaacagtagtctgcgccactgttgtaatctgctttgcagtagttgccgaagtttttgccgtcttctttcctgatgaacaggacttagccaaaaccattaccaaaataagcacaactaaaattccaacacccattgctattatagtgtttctcttcttaatctgttgctctctaattaactctgccttgcgtcttctgttttctactatcttctttacttcttcttttcttgtcgcttcattgtttgtccctggcatcctatcacctctttatctataaagatgatttaattatccaaacatacaaatcatctctatacggattatgacctgctttacactcctacagtcctaaatattattcctcgataatttcgtcatattctccgtcttcaacaatactgtcaaacacttctgaaaccatgtcaaattcttcctgtgtttcaatattgtcaagtccaggctctccatcttcgtcttcaaaatatctataaataaatatttctccatcttcttctccattatcatgaagtaatgcaatatagtcctgttcttcaacttcaaaaattgtaagcacttcgcattcaatctccgaatcatcttccaatgtaattgttacaaataattcttcatcttcattgtcaatattattagttcccatcttttcctctttccgctttccgctatttattattggtataccttttttataccaattagtttgctataactttatcaaaacatacgggaaaatgcaataaaatagatacagttcacaaatatttaactttctacagcatctcttccacaaacatggacacttctatggggcatcccagcctttcctccactgcatatacatttaaataatctatggctcttgttatcgccacataaaaaagtctgcgttcttcctcaaagtccctctctcttaatgcctttgacgtagggattattccctgattagcatcaacaataaacacagccttaaattccaatcccttagacccatgcattgtcataatattaatcctgttatttgtgccaccttctccactgctctttttaccaaaattctgaccttcactattttgtgctgaatcaatgctatttatccactgttctaatgtattaaacttgctacactcctgcactaactgttccaattgttttaacaaccctgacattggaatattattttcaatggcatacaggcgcaaatactcctcataacctgcaccctttctaatatatgacaatgctgcctgaggtggtagctttcttatcatctcaatatgaaatagaaaactgtctatgttgtttttactataaattcttctaacagcggaaatattcatattcacgctaagaacaacctgcctgcttatgtatctttgaggcttatttaaaacatatattaaatcttcattgaaatatgtgccgtcaaactttaatgctcctctaacataagacaaaatatcctttgcaaccataccattataaatgttacttctatgctttccactttccacttctatctttctgttttttaaaaaacttgaaatctcctgaatctgactattattcctaacaagaatagccatttcagacagactaatcccctgattttcatattcctttattttggatactacaaactttaattcttccacttgatttcgaaactttcgtatatcaggttgaaaatccttattattattagcgtgagcacacttatctaatctggtcttattattttcaataacacgacctgccacattaattatggactgagtacttctgtaattaacattcaagacaataagttcagcctcgggataataatccttaaactcaatcataatctccggtcttgctccacgaaaaccataaatggactggtcatcatcccccaccacaaaaatattgttaagaggactagccaacagctctattatattcatttggattctgttaatatcctgaaactcatctattaaaatatacttatacagctccctccactgttcaagtattgtatgattctcacataacaacaaataacactctcttagaatatcatcaaaatccatcttgccatccttctttaactccaaattataagcgttataaacctttataaaatcctctttcttgcagcaggacggctcatattcctgagcattaagcatattacctttaatatttccaatatcattaataatgttctgagacaattctgaaatatcattagaagaaataccataccttccaataatctcccttatatagtccgttttctgcctttcagacagaatctccgttgcctcataccgccttgattttctcaaaatcttataaaagacgctatgaaaagtgccaaaggtaaccagttgtcccttccctccattcattaatgtagaaaatctcttctgcatacttatagccgctgccttagtaaaagttacaactaaaatattatctgggcgcacttccgccttctctattaaattcttaattctatgggtaataactgtggtcttaccagaacccggtcctgcaagaaccatggccggaccatccatatggctgattgcctgaatctgtgatttattaaacatatatacaacctttccggttgtttctctccaagtactgaaagtctatcacagtctgactaaagtgtaaacaggtaaatgtgatttcttatgttttcttatttttttcaaagaatactcagattacaagcaaaagcttttctattatccggaggattttattattaaaaaagacctttgatatgctatttatagctttaatcaaaagtctttttaatgtttttaacatttatattattttaaaatcaatctattaacatttcttatagttattaacctgacagttactcgcctaataactatatttcgtattaaaattattttgataataattcaatacctttcttaattctgctaattgattcttcttttccgataacttccataatttcaaaagccccggcaggtgtcatctgctttcctgaaactgcagttctaagtggccataaagcctgaccattcttgcaacccttctttccaatatattcaaatactgtatcgtgaagtccgtcaactgaataatcatctgttgcttcaagaattggaagtaattctgttaacacttctaatgaattttctgaattagttttcatcttcttatgagtgtacatagccacatcatattcaggtaattcttcaaagaaatcaaccatatccataagctctgggaatgtttcaattctagtcttaaccatatcaagaatcttctctaaatccaaatccttagtaataactttcttgatgtatggcatagctttttcatagaatttttcattgtccatagccttaatgtattccccattcatccatttaagcttctgaatgtcaaatactgatgggctcttgtttaccttgtgataatcaaattccttaatcaactcatcaagtgaaaagatttctctattgtcttcagggctccatcctaaaagtgctaaatagttaacaactgcttcaggtaaaaatccctgttcaattaaatcttcatatgaagcgtgacctgaacgcttgcttaacttcttgtgattttcatctgtaatcaaaggtaaatgaacgtatttaggtggttcccaaccaaaagcttcatataatctctgatatttaggtgatgaagaaatatattcattacctcttacaacgtgagtaatctgctgaagatgatcgtcaacaacgttagcaaaattgtatgttggatatccgtctgacttaatcaaaatcatatcgtcaagttctttattttcaacagtaatctcaccatataattcgtcaacaaaagttgtagttccttctgttggcatattaattctaattacataaggcttgcctgcatcaagatttgcctggatttcttcttttgataaatgaagacaatgcttgtcataaactgtaatctcttttccatcttcacctacagaagtcttcaaagattccaatctctccttatcacaaaaacagtaatatgcatctcctgattcaattaacttcttagcatattcaagatataaacctgatgcctgacgctcgctctgcacataaggaccaaatcccttatccttatcaggaccttcatcatgtacaagacctgtttcagccatagttctataaataatatcaactgcgccttcaaccaaacgctctctatctgtatcttctattcttaaaataaaatctccacctgcatgcttagcaattaaaaattcataaagtgcagttcttaaatttcctacatgcattcttcctgttggactaggtgcgaatcttgttctaacttttgtcattttcacttttctcctactatgaaatactatttgagattacatctctaactaatatagtatagtgcaaaaattaaggttgtgcaaggggggtgaaaaatagtattt

SEQ ID NO: 12683 - DNA, 17500 bp, Unknown
  gut microbiota DNA sequence
tgttttagataatctaaatgccgttgcccccagatgcctattgcctgttcttcttcggcgggtacagttaagcacggtatcaaataatccccttgcctttcgtatttgccgcccagttcctcaaataatgattttgccattgtctgttacctccacattcttttttattttgaatgtccgcaaaatccgtcctacatcactttcataataagaaacaatgttatgattatctttttctgaaatcaacgaaaaaactctaatttcattaatgacacggtttaattcttttctaaaataagaattagttttttccctgtcaccacccatagagtttaaaacttcaatatattcgtttttcgatggtattgtaattacttttaatgctcttgttgtatttcctacaatattgcttcgttctactctataaacatctccgaaaccaccagagcctattttttctacaaccctgtaacctaatattgttctgcctaaaatagattccataattgtctcccattttcatctattttttttgattttttaagttctcatattaatggtttttgaccatttgctataataaactttcccgtctattataataaatgttcgtgccctaaacttatactttaatcttttcttcaaagatttctttgaacttgttattcctactgttccttttttaatcttgctttttttgatatttaatgaagtatttatatttcggaattttttatattttcccttaccgtttttcatatatacttctattccgttactttcatctgatattattccccaatatatctgccatgtttttgatgacttctttattttaatcttaggctttaacagcttggggcgcttaactgttactgatgctatgggtgttgacagtgtctcaccatcaacatagcgtgcttcaacataatagtaatacttcttccctatctttacctcttcatcctctacttgtgtttttgtgcaagttcccagattaatatacattccatcatactttgttgaacgatatacattatactttacagcaccaatcatctcttcccaattaagtaacaccttctgttttccaataacctgttttggcaaaatattcgtattattctttttaagtggcttataaaatgtaaagtagtgtttcacgtagtaattattatctatgtacaatgcaatttcatatctgtgattcattttcttaaaaaattcaggtgaaagatcaaccatttgactcatatacgtatcgtaccaatacttactacacttatcacttataactgtagttccatcaatacgtatggaaaatgtgctgttataaatagaatttcctataaaacctaacctgaattgtactccggccttagcccattcacccttaatatcctcttcaaaagtaatacttggatagttttccgttaaatacatgtccccattactatctgcaaattctacttcctgtttatattttacatctgtgtatacagtctctgcattagcatttattggaacaagtattcctaaaaaaattgctgcaaggaaaataagaatacttattttgatttttttactatggccttcaatttttttcatattttttctgttctccttctaatttttttagaaataactgtattattatgtttttaacattctgatcctctatttgatttcttatacttgtaccaatattaacatatacaccgttatacttttccgaacgatatatgttatacctttcagctccaatgatttctccccacttaagtgacactttctgttttccattaatctgctttggagtaacagttgtattctgtttaacaaggggtttataaaaagtaaaaaaatgctttatatgacatatattatttatatatattgcaatttcatatctatgattcattttcataaacattcatcctatttttctatattattttccacaaacaactgcagcattccatagtcttcatcttccaaatctaacgactgcaatgtgtctctaatataatactgtacctcttcctgtatttcctcagaagtttttagtcctgttagctcaacaagaagatttttacactgttcttctatatgtggattgtcggaataagcacttacaagcgccatatgattagtctgatatgtgggatttgccacatcaatattagacaacacataaagaattatacattctatcttgtcctttggacaaagcttctccatattggcataccataacaactggtttatttcaagacaagacatattaagcttaatacctaaagccataaggcgctgtctgttgggaacttcgccccagtttttaagatttgaaatcatcttttcaaatcctttatcaagcttttcattttcaatcaggctgtgataagaacctcctaaattttccgctttaacataggcttcaatataatcaatcagcttataataactgtttaaatattctacttcattctttcttacaaaatccaccagttccttttcattagaaaaaccaataattttcttttccatatccattgtactattaggtgaatctgcaagaaactttcttttattttttgttttcaaaatattaaggaaattggctttaattttctcatattcgtcatatggatttatgctttcgtcctttggataatgggaaataatataaatacaaatggcatcttccaatgacttagaataaagtcttggatacttgccgtatctttgaagtacaaaattaatctcctgtagattatatcttagacccataccaaactttataaaattctctcttgatttaggcatacagttgttttttacccaacctttaattgtattcttgctaaaaccacatttcttgcctagtttttcatatgacagtccattagttaacataacattgttaacgtaatccctccaattagaataatatggactgtatttgttcaaaatctgtttcagttcatctacttcttcacagttaattacctgaaaatacatatctgtagtgtttacatgtttcatcctgtctccgtcctgtatattagttttctttgtgctctgtatatctgttctgtatattagttttctttttgctccattgattggattcttctatatatccttgtcgctgtaggatttcctttatccatagctttcctataccagtattcagcgtcttccatattggctgttccaagttttcctgtctggtataaaatcccaagatttaaacatgccacatcatccccctgctttgccgatttaagcaataattgttcagctttatgtatatctttgtttacaccttttcctttttgataaagataggcaagattgtttagtgctttcgtatttttatgctctgctgcctttttgtaccaatctgctgctttaacataatttttgggaacaccttttcctttgtgatacatatagcctatcacatattgggccttttcgtctcctttttttgcgttttctatatttatttgataaataagtttgttttgttcattcttttttttacaatattcaatcttttccagacattccctattaagttcctcaatactttgttctctcacatctatgtcaatcctggtgcccagtccgttggcaacctgctttacaagccttgaaatctcataagcttcattgttaatcattacctgattcttaatcaaatcaaaaagcaacaacttgccctttccacttccatcaacgcacaactcttcattgttaacaaaaatatttaacttggaaagcctgcttttcaaatactttgcgctcattccaacatcatacataatctcataaaggtaaatcttcttttcttcctcagtcctgttctttaactcatctccaccatccaaaaccaaatcaactaactgattcaccctttccgtcactatgtaaataataattccgtcctcaacactttcctcatacatacttgtgcattgaataagattagagctgttgctgctttctccataaagctgctttaccatatcctttaaatgaagttcatccttctctaaataaataacaaccaatgatttcggcaaaccgtccccatcttcaatcttaaaaacaacaacaccattgttccatgaagactgttcaatcatagttaaattgttatgctttaggtatgtatcaatgctttttgttaatgcgaattgattcatggagactcctttctttgtgtatttttatggtagttctattgtaccatatgtggaagataaagtattgttggaaaaaggatttcccagaatgcaggaaatccttttttctttcttcatttattatttaagacgatttacaaccttatatgcatcatccaaagtggtattaatctcttcttcattttccgacttattaactaagttaactttgcacatattatacaataattaaaaaaatattttattcctccttttaattatctaaatatgaattaatttgttctacatatactattattctatcccatcacttcaacgttatccccctgacttctcaaccacatatcgattcccttgccaaatacttctgctttcacaatgtagtagcctttttcttcttctaatatctgcgctgttggaagtcggtcgagtattgcatcaatatcgtcgcctgtatacttgaattttacgtttctaagtttgccaccgtacataaactgaattcgttttctaaactctccctcttcgaatctgtttctgtatggtataaagaatttctcatctaatattttaagctctcttattcggtcaattctgtatattgttggaaacgaatcatttaaaacttcaaaatcttttttgatttcttcatcactgatgaatgccgttacataaaaatagtattccgaaaacattattgccaccggctttaattttctttctactatttcttttgttcctgctttttcatatttaatatggatgtattgtgattttctgattgcctgtccaatatcccacattgtgtccaaaaagctaaccttatgccttggttcaatataatgaaatctttcattttttattaaatcaagaatttctttctgattatttttagtaacacaattttcaatcagcttattcagaatttctatcatatctgtttttagaagtgctctgctatcaagtaatatcttgcagattgccaacatttgaccattagtcaattccgtcggattctgttgttccagacgaaatcctttcttcgctctatcataaataacattatttataattcctgttcgccctacttctgattccataaaacttcttatatcatcaatgtctctctgaatacttctctcatttactccataattattagcttcctcaaccttgctaacaatttcaccactgactaattttttatatataccaagaactcgttgtatcttatcagtgctttcaagctgcatattcattcctccattttttgtttataagaattatacaaatttgcatagacacatattgtcactctaggcatatacaacaaattttatttataaatctcattgatttttttcaaatattaacctaattcttaaatatgtgttttattctttgagctctgatataattttaccactatggaatggtcgtttttttcacaaactgaccccttgtttttccacaaaaaacagccgcaccactgaagaattgcttcactgaatcggctgtcttttattttagtattttatttttctatctttctttattcatccaaaatttcagatatcttatctatgttatacagaggaatgtttgtcatccaatcctgctgtctgaaatctgacatggatgttctcaccgcatattttgacttatacttatcacagaaagcctttaggctcttagctttcaaattttcccatatcttcggtttgtcccatattttcggtagcgtaccccaaatttcatcatttttcattttttgtggtacgtttttaacttatgtaaacttgttatgtcacatattcttgctttaagctcgctattgtcacatattgacttatccttagattgttatgtaaactaatatgttacttatactagctatgttgcaaaaaatgtaccccaaaaattcaatatttctgaatttttggggtatttctcaatataccaaatattttcttgattttatgtaaaccagtttttctttaaattccaggtttatggcattatgtaaactggtaacttttgtctcaacaaggagttgtattgagattttttatcaaccgattccgcccagtaccgctccggccaccaaagcaataaaagcaagtggtactaaaacatactttccaaggggtacaaaccatgggccaatattcttatttcttcctttgttaactgcgtctacggcgaaatcatttcctgctacccagaagaacattattgctgcaatcattgctcctagcgggcatatatagattgaaactgcatccatccaacctgaaactattccctgaataagtagggcaacaatacagcctacaatggcaattccacctactgccacaggtcgtttaaatccaaatctttcctccaatgttgcaacaggtgcttcgtaaagattgactaaggaactcattcctgcaaatagtacacatatgtagaaaataattccaacaatcttgccacccggcatgccgttaaatacgttaacaaggtagataaacattaatcccggaccacctgaagaaagctctgctcctccaactgccattcccggaataattacaaatgctgcaagaagtgccgctatcgtatcaaatatagccacattttttgctgaacttaccacatcttctgtttcacttaaatatgaaccgtaaataactgttccattgcctgcaattgataatgagaaaaatgcctgtccaaaagcataaatccaaagtcttggattcagcaatcccttaggattaattgtaaaaatatacttgtatccttcgcttgctcccggaagtgtaaaaatataaattccaagtccaagaaacaacgcaaacaataaaggcatcataaacttattggctctttcaatacctccggcaataccaaatgccataatcactgctgtaacaatcaccgcaattacaagccaagtattgtttccgaaagctgaagccgtagttccaaacataccgcctatgacatccatattctttcccattcctgaaagctgacctgatattgcaaggaatacatatttaaaaatccatcctacaacaactgtgtagccaatagccaatgcaagagaaccaattacaggcagtaagcccacaatctctcctgacttcttcttgcctgtgtgcacctcagtacactttccaaaagccttaataggaccgcccttagccgcacgtcccaaagccatctcttcaataagtccagttgaacctatcaaaattacaaacaaaacatagggaatcaaaaaagtcattcctccccagtctgataccatatatgggaatctccaaatattccccatacctacggcagaaccaatacaggcgataacaaacccagttccgctcttaaaaccgtccctcgttttttccattaaataaatatcctttctactcgctatatgaaacctattgtatcatatttacaatgtaatgtcttacattattttagaaatgtatttcgaaatattcttttaaatttttaaatatacttataaaattatttttatatacttgtgatttatgttattattaagttgtatggataagggtcttttttcaggagctacagttaaagtctgcaacaatttctacacagtttttgatggttcacatgcaagacagtatgccggtgttggaatgcagataaaaaaaacaggaacaacaaaagtttcttttaaggtaagatgcggaaagaagatatacaactgcaaaacaacagttaaagttgtaaaatatgctaacccatttaagaaaatcttattagacaatacagacatcacaaaatactataaccataagttttcaagtcaggaaagtagccttggaaaaactatatctttaaaacctaacaagaattggagaatcaaatcttgctacctgtacaaaaacggcaagaaattaaagaaacttaaaggttcttcttatacacttcctgaagatacatcaatgacacttacaatgacaaacaagaaaacaaaagttgtagaaacattaaaattcgactatgccgactttgatgattacgacctagatatctattaaaatttattattacatattacagaaagggtgcctaatatttgcaaggcaccctttctttgaatatctattaatcaaatttctgcttctataaacttacgtgataaataattgtcgggtgccacatttttcagcttccctttagaaaaattatttatttaacactagctaatccaattgctcccctttgctttcaataaccttcttataccaatagaatgacttctttttgcttcgcttgagggttcctttgccctcattgtccttgtcaacatagatgaagccatatctttttttcatttcccctgttgtaaatgatacgcagtcgatacagccccatggtgtgtagcccattaggtccacgccgtcatcaattacagccttctttaattgctctatgtgggcacgaaggtattcaattctataatcgtcatcaattgtgccatcttcgttaacagtatcaatagctccaaatccgttttctactataaatagtggaatttggtatctttcataaagaagattcaatgcatatctaagtcctacagggtctatctgccaaccccaatcacttgacttaacatatggattaggaacacttcccggaaatccgtcaatcccattaccatctgccacatggtctgctttaaccgcattagtcatatagtaacttaaacctacataatccacagtgccttctttaagtatctgtgcatctccttcttccatattaacatgaatgttttttctcttccattccggccagatatatgatggatactcacctcttacgtgaacgtcgccaaacaaatatctgtcatgcattgcctcaactgagtacatcatatcgtcaggattacaggaatatggatataatggaacacaagccatcatacaaccaatcttaaaatcaggattaatcttatgtccttccttaactaccattgcactggcaaccaactcatgatgtacgacctgatacatacattcttccggatgttcttcttttgtgaaaatcactcccgaacaagtatatccaaataatggatactcatagtttttctgattattaatttcattaaaagtcatccaatacttaactttatccttgtatctttccattactgtaagtgaataatgaacaaagaaatcaataacctttctgtttttccaaccaccatattcttttacaagataatatggcatttcaaaatgtgataatgttacaacaggttcgattccatatttaagtaattcatcaaacaaatcatcatagaatttaagaccttcttcattaggttctttttcgtctccatttggaaagattcttgtccatgctatggatgttctaaaacatttaaatcccatttcagcaaacatctttacgtcttccctataatgaccgtaaaaatcaattgcctcatggttaggataattgtatccttcaagcactccgtctgtaatctgtctgtcaacaccgtgtgctcctgctgttaaaacatcaacaacgcttggtccctttccaccaacgttccatgctccttcaacctgatgagccgctacagctcctccccacaaaaaatctttagataacatttaatcctcctaaactgttaagaatgcaatatcctttacagcttccttctttccttctaaaacttcaatattttttgatgtgtcagtaataatgtacattacagtattgtcataaccttcttttttgaggagttcgttgtcaaaatctataagcaaatctccctttttaaccacatctccccgtttaaccttaatgctaaatccctttccattaaggttaactgtatctacaccaatgtgaattaaaatttctgcaccttttccgtctgacataccaactaaatgacctgatggatacaatgcaacaatctttccatcaaatggtgcatggacttctccatttgcagggataattccaacacctttccccattgcttctgatgcaaaagcctggtctttaactttacttattgggaaaacttctccggctacaggtactgcgaattctattgtaggttcattattttcttcaatagctgtgtttccttctaagttttcaaagtcatctgtaggttcatcttcaaaaccaacaatcatagtaagaaccgcaccaagtacaaatgaaactaagattgaaattaaaagtccaataaactgtgttgtatgacctgctttaaagtatgcaggtaatgttgcaatacccggcatattgtaactccatgaaactgtatggaaagcgccaccgattgcaccaccaattgcacctgcaatacatccgcaaatcataggtttctttagacgtaagtttacaccgtaaatagcaggttctgtaataccgaacaatcctgtaatagctgctgatgctgaaacacctttcatttctttattcttagtttttaagaatacaccaagtgttgcacctgcctgtgaaaatactgctgctgactgtaaacctgtaaatgtgtcataacctaagttagcatagttgccaactgttaccggtgttatcccccagtgaacaccgaaaattacaagaatttcccatataccaccaactacaaatcctgcaactataggacttaagttgtacaatgtattataaataccaccaattgctccaccaattgtatttccaataggtccgaaagcaagcaatgtaagtggaaccataattgcaatagtaaacattggtgtaaataagtttctgattacgattggcaaatacttttcaaaaaatctctgaacataagatgcaatccatattgccaaaataatagggattactgatgatgtataacttaaaagctgaactttaattcccaaaaacttaactgtttctcctgcgttaaccattgctatgtaatcaggacaaacaagtgcacatgcaattacaagcgaaataaaagtatctaccttaaacttctttgccgctgttactgcaattaaaacaggtaagaatgtaaatgctgtccatgaaataaagtttaaaattctgtaagttccacctgttgtatctatagcattaagcgcaaccaaaactccaagaataccctgaagaataccacaagctgcaagtgtgtataggaacggtgcaaatattgctgaaataacgtcaatgattctgctaaccactcctgctttcttgtttcctgtgccctctgatgtactgtcatccactgtaactaattccataacatatttgtacgcatctgttacatgatttccgattactacctgaaactgacctcctgcctgaacagtagtaattacacctttgatttttgcaaccttttctttgtctacaattgactcatcttttaaaataaatctaagtcttgtagcacaatgagttacatttgaaatgtttccgtcgccaccaagttcttttacaagatctttggcagtcttctgataatcaattgccattttaaattctcctttttctttgtttttccgtcatgtcttcatcggctaaaagtattttatcataaccatattttatttctacaaatctgcgttttatgtaacatataataaaaaaagaaatatgttacataggcgtaacaccctgtaacatatttcttaacccttaaaatttattttaatttcctgttatatactctttcaaccgctatttaacagttttttcaataataaaattgctatattttatagccttcttcctattgcctcaattaaataaataaccggtatctgcgttgttgtattaatgtgatttcccatatcatggtcagtaacataataagataaactgtagtctgataatttggaaagtgtagaaacactcttattcgtaatacttatgattttacatttgttctttttaaaatcacttgccatttgtacaacctgttccgtttcacctgaaacagataatgctataacaactgcatcactcattccctccattattggaaaataaggatcttctatgtactgactaaatttctttaagttagaaaaatatcttgcaccgtattttccaagaatgcctgaagttccaagtccaataaaaataacctgctttgcatctcttacaacatctgcaatttcatcaagttccttctggtgaatttctgaacttatcttctgaaaatattcctgaatctcctgaatatcctcattaacctgatgtttcttattcttctcttcgtttaagaacatcttaaactttactttaaattcagaatatccgtcaaaaccggcttttctacaaaaccgcataactgttgcagttgatacatgaacttcgtctgccaattctcttacagtcatgtaagttactttctctttgttcttcattaaataatcatacaccagcatttccatatcgtttaatgacttcagaatctcataattaaacatattatacctctttgaagcttaattaattgtttcaactctgatattataccataaacgtggattttattgtttactttttggttttcactgccttaacttttgtccatactgaataaactttcttattcttaccatttatttttttcgtctgataagctcttatgcgtacatagtattttttgtttcctctaagttttttaattattactttggttttctttgcacttacttttaaagtctttgtagcttttttaaaatttttctttgtagaatattgtatttcataaaatactttaccactattcttcatcttgttaaaagttactgttaatcttttggaaccctttgttattttcttaactgatggttttctaagtgtttccttttctgaagctgttgtactgccgataagtattgttccggaagctgttggtttagcatttgtggttgttgtttctctgtcagggttcgttgccccatgagttgtagtttccccatcggacttagttgtcatcggagttgtagtttctctaccggcaggatttgtagttggttgcacacttccgttacctgtttttgaagcctgaaatgtatttccaaaaactcccatatttattctatttccattaggttcaggttcatttgcataatcacttgcaggatttcctgcgttgatacacgggcttgcatctgtatctgttacccattttgaaccgtcccatctgccacctgttgacttaagatgaaagtcgccattgttcaaatctgcaaatataggatctttgaatatacatccttctccatatccataagtatttccatcccaaccatcgttataaatacatgtataagtaatattaaatatatttatatcttcacttacatcaaaacctcttgtattttttgctataatactatcttggataatagggaattttgtcattgatttgcttgctttaattccataataattatttgccagggtaatatttttaagtattatgctatctgtaagattatcatcaatactaaggtctaatccaattccgtaacgttgctgttgaaaattgtaaatcacgcaattagatgcttcaaaaatattttccgatggaattttattaccatatgcagtaatactcattcctgaatatgtgtcatttcctgttccttttataaatacgttttctattaaaatcttgccacaaatataatcataataactgttatatttaacgcttattcctgatgattcatttatgaaatcactattctttatagtcagtacttgtggtattttttcttctgactccattgatttacttactaccgtactacttaacttaacattatcaaatatgcaattttcaaacactgcctttccctctaaataatcagaagaagaattttgttctaaactaattccattagaagatgttgtaagtcccctgtcagatgcagcaacaaatctcacaggatttactttttctccaattgcctctaattccccattatataaaacatttaatgactctattacatttgtactgcctgcattaaatttaacttttgatttgtttccattcttatatccaatattacaatttttaaaatagtactccaacccggacacatttccaaggttacattcctgagttatcatacttccatttaattctacataatttccatattctgatgaataatcgcacctgttttccttataatgtcttgttttatcagcgttaatattagctccaaactgtactttaatgggtgcacatttattcatctttttagattccgtggattggcttccataaaatatgttcccttctattatataattacattgaccatctaaatctaatgcattcttggttaatgctcctccttctttagtataaaatatattatcctttatttctgcatttcctccccaaacaactgatgggctataagactgtgacacattattttcaaatatgttattttctataacacaattagatttttcattatacaaataactatcatactcatcagaagttaccccctcaattcccattgaaagagatttaaaagtagaatttgatatttttatatttgcttcaactttatttccatcgtagtctccataatagacgccggctcctatttcacttgtctgcaaatcaacattcttaactaattccgtactatcaaaattgcaatgatctactactaaattaaacttagtctcttctgttccataagatacatcaataagcccttccgtaaaatctctatattgagctccaccatttataaaattacagtactcaaaagtatctgtaacctccccattatccggaagaaatatctctataccattccatcccacatgagtgtctatgtttttaaatgttattggtttctcctttgtgccttttgcctcaatgcttccatcctcttcaactataaaaattggataaggtctatatactacctctgaattttctattccatctatattacctgttcctgttccaaacaaaattgttgttcccggctcaattattaatttacactttacggttggacgattaaccatattttgtgaacatattacatatgttttatcctttgtccaccttacaacattgcttccatcttcggacacgatgtcatcgcttactattatcaaattatcataattgacactgttgtcttctgctgtaatgttctgtggcattattaacattatcaacgccaggcttaaaattataactacccattttttattcattacatatgcctccaaatttttattatatttcccgttattttcacattcccatttatgtgctgatttgcaaaaataatgtacacttaattttattctttaacagaatttatgttaaagaataaaaaaccgataaggtatgtttagtattacacattcccttaccggttaacaagttgacatatgtctcatatttaattttaggctgtttttactgatataattactcccaactatactatatctaatatttctttaaaattgtttaacttgtatgtagttttgctatactttgatgcttcacctaacccagctgaatcaaaaataattcctttatattttttcattttgtactaactccattcctgttttaagtacacgaagtactctctctgctgcatagcataaatatttctctgcattatccatggcattatttaaagaaataatgttacacacagaagcttccattccgctaactcccatactatacaattgattaatttcttctcctaaacttcctgaaataaccaataccggaacattatatttcttacattttcttgcaattccatagataacctttccacatgctgactggtaatccgtcttaccttctcctgtaataacaatatcagtactatctaatttttcttcaaaattatttaactcaagtaacacatctatgcctgattgcatctttccatttaaaaatccatataaagcggcaccaagtcctcctgcagcacctaacccttcaatttcttctattgaatgtcccaaatattcttccagaatttttctataggaaatcattcctttttccagcttttccaacttttcttctgtaccacctttttgtggtccataaacgtatgttgcacctttttcacctgttagagtattagtcacatcacacatgacaatggtttcgacttcagaaatttcttttatagcaaaggtatcatctatagttgcaattttttcaagattttctcctattcctgacaattcatttccttccgaatccaagaatctataaccaagggctatcattgcacctattcctccatcatttgtagcactcccacctattcctatatagattttagtacaaccgttttcaattgcatgctttatgaaaattccagttccaaaagatgttgtaatcataggatttttttctttttcatcaattaacgttaatcctgaagcctgcgccatttcaataactgcaatattaccttttctaagataatatccatctatttttttacctaaaggattcactgtatcaattactattttgtcatatccattgccactttcaccataaatagcttctaaagttccttctcctccatcagcgattaacattttttcacaaaagctttttggaaaaatttccttaactattgattcaataatattattaacctgattagaagataaacttcctttaaacgaatctgacgctataataaatttcattttgtttctcctttagttctaattttaatatgcaataaccactttattctgataaatatattctttttattagttttttgaatttttctatatagtcttctacacctatcttttcatctaacttagtgtattcttcaaatttatttgatttgattttttctatacaatgtaatgttatattaaatgaaaaaatcatttgatatcataacaaaagttatattattctcttcttatatgtgcatataatcccaactataatgatagttatgtaataaagaatagtacgagcatttttaattttatcagctatcataattctgtatgcctccttcttccatgagattacagcaaacgtagtagtaatgtctatcaaaaggcttttacatattagataaaagcatgtaaaatttcttttacatagcttaattgcggtctatttagcttgtttcttgactactcaggaaaaatatttctaccctcgccccacctgtattttcagaatttgaaagtttaatacc

SEQ ID NO: 12684 - DNA, 841 bp, Unknown
  gut microbiota DNA sequence
agtaagccgccttcgccaccggtgttcctcctaatatctacgcatttcaccgctacactaggaattccgcttacccctccgacactctagcctgacagtttcaaaagcaattccggggttgagccccaggctttcacttctgacttgccatgccgcctacgctccctttacacccagtaaatccggataacgcttgccccatacgtattaccgcggctgctggcacgtatttagccggggcttcttagtcaagtaccgtcattttcttccttgctgatagaagtttacataccgaaatacttcttccttcacgcggcgtcgctgcatcagggtttcccccattgtgcaatattccctactgctgcctcccgtaggagtttgggccgtgtctcagtcccaatgtggccgatcactctctcaagtcggctactgatcgtcgccttggtgggccgttacctcaccaaccagctaatcagacgcgggtccatcttgtaccaccggagtttttcacaccgtaccatgcggtactgtgcgcttatgcggtattagcagtcgtttccaactgttatccccctgtacaaggcaggttacccacgcgttactcacccgtccgccactcagtcacaatggtcttcctcccgaaggattctgtccaaggtgcttcgttcgacttgcatgtattaagcacgccgccagcgttcatcctgagccaggatcaaactctcgttaaaagtgtttgttctgtcagaatgacgttagccattcatccattactgttgttttggaaatcgttagcttcgattactcgaattaacaatgttcgctctgaaaattttatttt

SEQ ID NO: 12685 - DNA, 243 bp, Unknown
  gut microbiota DNA sequence
ctgttgttttggaaatcgttagcttcgattactcgaattaacaatgttcgctctgaaaattttatttttgaattttcagggatggttgctgttcaattatcaatgttcctgtttgctgtctctttgcgacagcttgtttattatatctcacttgcagtcgcttgtcaacaacttttttatttttctttttcaagaatttctgtcgtttttcgacagccagaataatttatcataattttcttt

SEQ ID NO: 12686 - DNA, 7369 bp, Unknown
  gut microbiota DNA sequence
agggttgattttgcagttaaggatttaaagaataaaaatcctaacgatataagaattagatacgagaatgaagtttctaatatcgattataaatattttaatgaatttaaagacagattcgtaaaggctaacagaagccgttacgaatttatagtaaaggaagcagtagattacataaagaattcaacaaaggattatactgcaaaggatatgtttgtttctttttcaggggggaaggactctacagtcacatctgatcttgttatgagagctttaagtgaaccgaagattcttcatattttcggtgacacaactttagaattccccgagactatgaaatacatagaacgatttaaaaaagaacatccacagactcctattgtttcatcaagaaacaaagataaagattttgaggaactttgtgctttggttggcccaccaagcagagttatgagatggtgctgtactatttttaaaacaggtgcaatccagagaaagattaaaactatgtttagaaataagaacaaaattataactttctatggaataagaagaaacgaatcagcaagcagaaacaagtatgagcgtgaaacagaaggctctaaaattacaaagcagataactatttcaccgattattgactggatggattttgatgtgtggctttacatgcttacaacagaaattgattttaattatgcatacagattagggtatgcaagagttggctgctggtgttgtcctaataacagtggttggtcagagtttttgtctaagattcatatgcctgaacagtccaaaagattcagacagtttttggttgactttgcaacaaagattggaaaacctgatccggaagtgtatgtggacgaaggcaagtggaaagcaagacaggggggaaatggcgtagattatgcaaagaagtcggcagtatcatttgaaccttgtgtgctggaagagaatgcttttaattatgaacttcaaagaccaatttcagaccaattgtatgagttgtttaagccttttggatatttaaatttcgatatgggcaataagcgattgggtgaagtttatgtaacaagaaggaacggcaatcctgttttgaaattgcagggcagaattggctctacaactttaaaagttacaataattgacagcaacatagatggggcaaagaatcttaaaacagcagaggataagattaaatgtcagattacaaaatatcagatgtgtatggcatgcagggcgtgcgaaagtatttgcaagcacaatgccatagttataaaagaggacaaagaaggtaatcttgattatagaatactggacaataaatgtgtaagatgtgcagaatgcgttaatcattacacggcaggatgttatatgagaaaggttttggcaataaaaagaaactagttaattatttatgaaacttaagcaggcagataggagaagaaaatggcgattaaacttaaaggacatgaaacatttgcacttcgtgaggggtggcttaataaaggacttgcaaaggtagatgccaatccaaaagttttctctgaaaactatggggcggatgctcttggagtgggaagcaatatggctaaggctattcgctattggcttaaagccggaaagtttatggaagaactacctaaagagggggcaaagcttacagatataggtcagattatttttaaggaagataagtatttagaagatatattttcattatggatattccatattaatctggcaggaaatgagaaacttgcaacaagctggtatgctttttttaacttaattaacattgacgaattttcaaaggaagatttaatgaacattctattagaaaagcttactcctttggcagagaaaaaagccatacctgagcgttcgttgcgagatgatatttccgtacttttaaatatgtacgtaaaagagaagcagcagaattatgatccggaggaaaataagatttcaccatttgcacaattgggtttattaaaaaaagacagaaataattatataaaaacacagcctgacaaggataagttatgtgatgatgcagtgctatacagcctgattaagttttttgaaaaaaaagaagttgactcaataggaatagatgaattgcttaacagtccaatgtcaccgggaagaattttgaacctaaagagaatggctttaaacgaatatttggaccgtttagaaggtcagggttatttgactgttaacagaacagcaggacttgatatggtttatcttaaaaagaaaatcgggcttaaggaagttgtttcgaattattataaaaaacactagaagaagtttttaaaaggctaacgagttattacaggaacaataaagaaaagcgatttgtaagactaataaaacattaaacactgatagaaaggatgcgtatatctggcaatcaggtatatcagagaataaatgaataagtttaaagactttatagaaatagacaagaaatttcaaaattcaataaatttgcagttggacatagataatttatctaaactaaatagctatataccaacccattcttctattttagtgttggatgggtttcttaataatgttttgtcagacagagacaaggcaaatattttaattggaccttatggaaagggaaaatcacaccttttactggttttgttggctttacttaatgacggaaaaggtgacagaactaaaaaaacaattaacaaaatagaaaaagtttcaaaggaaactgctgaaaaaataaagactatacaaagtagtgtaaagccttttcttccggttattatttcaggaacagagaaggatttaaacaaagaatttattatagctttaatggagtcattaagaaaaaataatcttatgaatgtggcacctgaaagcgattatggcaaggctttggaagttatagctaaatggcagaaagactttaaacaggtttatgaaagctttaagcagattgttagagaatatggcagaactgtggaagagtttatgggtgaacttaaggaaatgaaggaagaggctctcaatatttttaaagagatacatcctaaacttactgctggcagtgaatttatgccaatgacagttaataacgccatgactttgtacggggagattaacagagcacttgacagttatggatatggcggaatttatataattttcgatgagttcagtaaatatattgaaggtcatgaaaaggatacttttgcttatgacatgaagattttgcaggatatatgtgagcttgccaataactccaaaaaacagcagattcacattactttcgtggcgcacaaaagcattaaagagtacggcaacgcattgtcttcagatatagttaatgctttcaaaggtgttgagggtagattaaaagaagttagatttgtagtttcagctcagaataattatgagcttattcagcatgtaataaagaagaaagtaagcgactgcaaaccatggtttcaggagcagaataataaagaaataatcggggaatcttacaagattccttgtttttcaggcctatttacagagaaagaatataagaaaatcgtaatggaggggtgttttccaatgctacctcttacagcctatgcacttttaaatattagtgaaaaggttgcacagaatgagagaagtatttttacttttcttgctaatgacgaaaaaggaagtctaattaatatagtagaaaacggtagcgaagaattactgtctgttgatgtagtttatgactattttcaaaatatgtttagggacagcatttctcttactaacatacacaatgaatggcttaaggcagactatgccttaactaaggctgaatcattaaatgaagaaaaaataattaaggcaatggctattcttcatatgattaatagaaatgaggaagttccggttagaaagacggaaatcagattggcaacaggtttaaatatggctgattttgtaagtagccttgaaaaacttgaaagcaaaaatattgtaacctacagaagcaagcttggagtttatgcatttaaaaataacgtaggcgtaaaccttgataatcagatgaacaacatgattgaaaagcagcctttaagccttaactggcaggaagaaattgccacagtgtcagaacttgattatgtacttccaaagaaatacaaccaggaatatacaatgacaagatatttcaagtacgtatatatgacaccggagcagtttctaaatacatctaagtcagaatatttatttgaaacatataaggcagacggtctgattatatgtcttgttatgcttaaagatggggatgttaatcagattaaggaacatttaaaggaactaaatgataacagacttgttgtaatatatcctgacaaaatatttggcttttcagagcagcagaacattagaaaattaaaagctgtggaaaaattgcttaaggataaagattttttagaagaaaataaagttctgcaacaggaacttgaaatatataaggaagatttgatttttgaaataaatgtagaacttgaaaagtcatatttgccggaaaacaacagatgtaaatattttaatacattaaatggtgtgacggagttgtgttttgaaaaccagattagttttaatagatttttaagtgaaatatgcttaagctactacgaacatgcaccaaagattaacaacgaattaattaacagaaaaagtgtatcagcacagattaaaaaggcacgaaatttaattatagatgccattttaaacgaagaagaacttaatagatttgaaaagggtacaagctcggaggcaactatttttagagctactcttatgcatacgggaattttaaaaggggacagttctgaggaggaaggctgtagaagaattattgaagaaatcgatgcttttgtaggtcaatgtgcaggcaagaaggtttcttttcaggtcctttatgacaaattattgggtaaggattttggcacaagaaaaggagtaattcctatttttattgcaaaggaaataattaatctgcaggatacgccgattatttatcttcagaataaggaagtggagatttcaagcagtattttaaacaatattaacgaaagaccacaggagtattatctttttattgaaaaggaaagtattgagaaagaaaaatatctaaaggttttagaagaacttttccttagcgaagagttaagaaaaaaacagaagtcaaaaatgcagcgcttaaacaacattgtggaaagtatgcagagatggtacagatcattggaccagtatactttaacatttacaaaacagctttttgaagaaaatgagcagggctatttggaagaagatgctttcgaaagaatgtgctcttttagaaaagtatttaagggcatagaacttaacccaagagaagttctttttgaaaaaataccaaaggcaatatgccatgacaacagtggtgatgcagtttttgaaaatgtcactttacagatagaagaaattaaaaaatatatggacaacaatcttgtaaatgcaaagaagaaaacagcagttcaggttaagagtatctttggagcaagggctgatgaaagtttaagtgcatgtttaaagaactggtattcaaaacaaagtgaaaagtcaaagtcacatatttacgctgagaatattacaggctttatgacgtacattgaaaagctgactactaacgatgaggatgaaattgtttcaagattgtgcaaaattattacaggaatttatatcaatgattggaaaaacgactcttatgaaagatttgtcgaagagttaacttatgttaaaaacactattcagtctattaaggaaagtgaacagtcaacagagggagaaaataagatttcaattaaaacaggggaaagtacaatcgaaagattctttgaacctgacagtgacgacagcacaagttatttccttcagaatgcaatagaggatgcactggaagaatttggtgatacattggaacttaatcagaaagtttcggtgttggtaagggcactggaagaactgttgagtaaataattgaattgattgaaaagtaatggaacagtaagatttgcgaaagatattaatagaagagacttgccatatgcaaatggaagttactgattataaatggatttatttgagggataagttatggataaggagaataatagtaaaactatatatttagataatgcagcaacaacttttccaaagccggagtctgtttatacggagatggattatgtaaacagaaatcttgcagttaatacgggaagaggctcttatagtctggcaagaaaagcaacggaaataatagaccggacaagagagaaagctttgaaacttgtaaaaggaaaagatgttgcagacattgtgcttacgccatcagccacaattgcaatgaatgtaataattggtggtttggattggagtggtgcagatatttgctatgtttctccttttgaacataatgcagtaatgcgaccattacatttgattagtgaaaaatatggttttgatttaatagaactcccattaaagagagaaacattagaaatagattttgaaaaaatggaatatatgttttccatgaatcctcctacgaaagtttttgcaactcatataagcaacgtaaccgggtatattttgccggttaaagagataactgaaatggcaaaaaaatataacagtcaggttattattgatgcctctcagtcattgggattattagacattaacatgaacaacctaatggcagattttatagcttttgcaggacataagaatctatatggaccatttggcaccagtggatttttcgtaagaaaaggaacaaagattaatccatttattgccggaggaacgggaagtgattcacttaacctaaatatgccaaaaacaatacctgcaatgctggaaccggcaagttctaacatagttgccgtggcaggaatggaggcagcattagatgaaacaattgggcgaataagtgactttgaggcaaaagaaaaagaattaacagaataccttgtaaaaggacttgaaaaaatagaaaacgtaactacatatcttccattggaagattcacatataggaattgtagcctttaacattgaaggctacaaggcagaggatgtgggaacaatattagaccaggattaccacattgcagttagaacaggatatcattgcgcaccacttatacataaacatttgatggatatagaaaagggaggcgtggtaagagccagtgttggaaggtatacaacaagggatgatatagaaaagctgctgaaggcagtggaagaactaagtgaggaaatgtagatttatatactgtaaatag

SEQ ID NO: 12687 - DNA, 64937 bp, Unknown
  gut microbiota DNA sequence
gtcagttatgcttgtttgtttcattaatctttgttgccgtgttttcgtaaccgtatttcaccatgtacacgcacatgacgtcatagtagtttgaaggctcactgttcatcccttcataatccacatatacttttctgccctcatccgcatccttatgttcatccaccaatgtctgtatttcctgattaaattcagatacgtactgcgttgttactgtctgtattgtatctccgctttcaagtggtggaagaaatattgcaaatggtgaattgtatagcactgctatgattgcaaacacaatttctgttgcaaccattaccactatgagtattggaacaaccaacggtgcaagcagggatgccacctgcttaatcatgtatgccatcttgttttttatcaggcttcctgcaagtttaaatatgctgtcgttttgctcatcactgagctttagcttgtccatgaaatatttcatcatcctgcttttttgctctgctctgtaaaatgtattttcaatcttcattccaactgcttcacctgcagccattccaatcaatgtgccttcaggacctgccgctgaaccggcaactgtggtaccggtttttactgtaagttttgtacgttgttcccttattcgtatacatttttatttcattattttaatatttaataaatatttcatagcaatccaatttagttattaacgaagaattaagcaaactcttcttttaaagttggtccattttatccggaccaactttggaccaaattcggtccaacttttgtgatttgttatgatactatgcgataagttgtgtgttctcattggacgcaaaaaaaccctttaaacatagtaacttacctacgcttaaagggttttctcttatcttattattctacctagatttatttcatctgttttgcaacttctgcagcgaagtcttcttctttcttttcaataccttcaccagtttcgaatcttacgaagctcttaagtgcaactgtagcaccaacttcttttgaaacttcagctaagtatgcttttactgtctgctttccgtctgcagccataacgtatgtctgatcaagaagacatacttcttttaactgctttgaaatacgaccttcaactaagccgttgaaaatcttgttagccataattgcttccttcttgctcattgcaattgcagctaatgcagcgattgcttcttttgaaaggaagttgaataaatacttgtcattctgcttttcttctaatacagccttgtcttcagcatttaatgcatctgaagcaaatgcttcagcgaagatatccttctggattggctttggaagtgatgatacatcatttaaagcactgtcaattgtgatttctctcatcttagcaagttcttcatctgagatgtcttctctgctaacgtactgagggctcatagctgcaatctgcatagctactgtcttaattgctgctacaactgtatcgtttgctggagcatcagcgtcaactaatacaccaatctttccaccagcgtggatgtatgaagcaagaactccgtctgattcaatcttcttgaatcttctgatattcatgttttcaccgattactgcgatctgtgaaactaattcgtctttaactgtctttgttgtatcaagtgcccatggttcagccatgaatgcgtctatgtctgctgcatcagaatcaagaatctgatttgcaacgtttgatacgaatgtctggaatttttcgttcttagcaacgaagtctgtttctgagttaacttcaacgattgctgccttgccgtcttttactgctgtaaatacaacaccttctgctgcaattcttcctgatttcttaactgctgtagcttcgcctttttttcttaagatttcgatagctgcttcctgatctccatctgtttctactaaagctttcttacaagccataacaccagcgcctgttaattctcttaattcttttaccattgctgctgtgattgtcataattatatcctcctaaaaactatatcttattcttctgttgcttcttcagctgcatcttcagctaccatttcttcaccctggtttgcttcgataacagcatcagccatcttagaaacgataagttttactgctctgatagcatcatcgttacctgggataacatagtctaattcttctgggtcacagtttgtatctgcaataccgattaatgtaattccaagtgaatgtgcttcctgaacacagattttttccttcttaggatctactacaaagatagcatctgggattctcttcatgtccttgataccgccaaggttcttttcaagcttgtcccattccttcttgatgttaacaacttctttcttaggaagaacatcaaatgttccatcttctgccatcttttcgatgtcttttaatctcttaattcttgactggatagtcttgaagtttgtaagcatacctccaagccatctttcgttaacgtagtacattccacatctttcagcttctgtctgaacagcttcctgagcctgtttctttgtacctacgaaaagaattgtaccgccttctgctgcgatatctgaaactgccttgtaagcttcatctactttacctactgacttctgtaagtcgatgatgtagataccatttctttctgtgtagatgtattctgccatcttagggttccatcttcttgtctgatgtccgaaatgaacacctgcttctaataactgtttcattgaaataacgctcattcttatacctcctggttttttaaaaattaattattgatactgttccggttgttaacccggcatatatcatgccttccatctgcttcaccaaatcagacaaccccgagcgtgggcaccggtctgactctccacagatgtgcttaatgcaactcaaatatcataacacaaaaaaaagcagtatgcaactgctttctttcgtataaattatgttttttataaaattctcattcagactttcacacaatttttccacaacattcttttgctatgctgtcatattgttttttagttagcctgcttttctttcttaagttctgtaacataaccacactgtggatctgcacatgcaagcttgttacctttttcaaccatatagcctccacactgtggacacttttctgcagaaggtttctgccatgacataaaatcacattcagggttatctatacaaccataatatcttctgcccttcttggttttcttaagtaatacatcctttccacactttggacaatgaacgccaatcttttctaagtatggttttgtatttctacattcagggaatcccggacaggcaaggaacttaccatgtgggccgtatttaattaccatacgtcttccacattcttcacagatttcatcagattcttcatctgcaatgtcaatcttctctaagttcttttcagcattttctacctgttcttttaagtcaggatagaagtttctgataactgtcttccattctattgtaccttcttcaactgcatcaagaagtgattccatgttagctgtaaactgtgtgtctacaataacactaaactctgttttcattacattgtttactgcttcacctaactctgtaacataaagatttttcttttctcttgttacataacgtcttgctataattgttgtaatagtcggagcataagtgcttggtcgtccaataccctgttcttccattgcctttacaagtgctgcttccgtaaaatgtgcaggtggctgtgtaaagtgctgattttcttcaaacttttcaaattcaagttttgaatctttttcaagctttgcaatggtgttgtttgtaacaactttctcattatcactgtctgtatagactttcataaaaccgtcaaaatcaagttttgatgttgatgcattaaaaatatactttcctgcattaacttttacgttagttgtttcgtaaactgaattttccatacgacttgcaacaaatcttctccagataagctgatataatctaaataaatctcttggaagctgatcttttacttcttcaggcattaagtttacatctgtaggtctgattgcttcgtgagcatcctgaatcttcttgtttgacttctttgagttaatctctttagccatatatgaatcgccatatttgctttcgataaattcctttacctgaacttctgctgtttctgatactcttgtggaatcagttctcaaatatgttataagacctattgttcctctgcccttaatgtcaacaccctcatacaactgctgagctattctcattgtcttctgtgttgagaagttaagcgcctttgaagcttcctgctgcaatgtacttgttgtaaaaggtataggtgcttttcttgttctgcttccctttttaatgtccttaacagtaaactcactgtcttttaattccttaacaattccgtctaactgttcttttccggtaatttctaatttacctttgttgtcgccataaaagcttactgtaaattctttatttttgtgctttaatactgcatccatatcccaatattcttttggaataaatgcgtttatttcatcttctctgtcacagagcatttttaatgctacagactgaactcgtcctgcacttaaacctcttttaatcttcatccataatagcggactaatgctatatcccaccattctgtctaatactcttcttgcctgctgggcatcaactaatcccatttctatatctcttggatgttttaatgactcttttactgcctgctttgtaatttcattaaaagtaattctgtaagtcttctttggatctaatttcaaggctattgataagtgccatgaaattgcttctccttcacggtccgggtcagttgccaaatatactttgtctgctttttttgcatagcgacgaagttctgccaacttgtctccctttcccctaattgtaatgtactttggttcatagtcattttccatatctattcccattgtacttttaggaagatctctaacgtgtccatttgaagcaactacttcatagttagagcccaaaaactttttaatagtcttaactttagccggtgattccacaatcacaagatattttgccataaacatctccttaaaatattttcgctgttgtcgttaagcctttgaataataattttctgatggctgctctaccagtcccattaactgaagttttagcagcatacctgtaagttcttcatacttaaaacctgtttcattcatcagttcataaatatttttcggctgtaaacgtaacccactatacaacaaggctaaatctttttcaagacctttttctttttgttttttctcattttcgttttttgaaccactatattgtatgtcatttagcacgtcgttagcacctgtaattatgcctgctcctgcccttatgagacggttgcatccatcgcttaatttttcgcccactctacccggtactgccattacgtctttcccctgttccaatgcccattctacggtaatcagggaaccacttttctctcttgcctcaactactataaccttgtccgaaagtccgcttataattctatttctaagaggaaaatgccaggctattggtcctgcccccggaggatactcagaaattattccaccattttttaaaatatcattataaagttctatgttttctgttggatagcaaacatccacaccacttccaagtactgcaaatgttggcgttccaccttccaaagctcctatctgactataagtgtctatgcctcttgccattccgcttataatctgaactccgttttccgacagctctcttgccaatgctcttgccatttttcttccataattagagcacgctcttgcccctaccattgccactacaggcttgtccctgtcaggcagtcttcctttataaaataaatattccggtctatgatcataaggcaacaacttagccgggtaatccctgtcatttactgatacaacttttatgccctgtttttctaattcctttatgtagtttttgtcctttaatttttccagctgttctttgtattcactgcctcttttattgtttatttttttattttcatttgtatttgcattttgatttatgtttttatttgtattatccatatttatttgaaaagcaccggtctgtaacttacagcctcagctatatccccctgttgtattttttcgtgttgttttaaatctgctattgttctagccacttttatgattttgtcataagctcttatacttaaatccattgtagtatatattttttccattaaatgctgttcttctttgttaagcttgcagtatttctttatgttttcgcctgaaagctgactgttaaacttaaacttctcattggcatacctttcacgctgaatctgaacagccctatttactctttctttgatggttaaagaatcttccggctgttcttctttttccaattgaaaatatgtaacctgattcatatgcacgcacaagtctattctgtctattagcggaccgcttattttttccatatatttctttacttcctgctctgtgcaagtacatttgttcatgtcagggtagtaaccacatttgcagggattcattgcccctatcaaaataaatttagcaggaaattcatatgttcctccgcttcgggacacaataatcttctcatcctccaatggttgtcttaatgtttcaattacctgccttgaaaattcaggcaattcgtcaagaaaaagtattcccccgtgtgcctgtgtaatctccccgggtttaggattaaatccacctccaatcattgccgaaactgttgccgtgtgatgtggacttctcacaggtctggtcttcacaaggcttcctgaaagatttcctgccacactttgtatttttgatatttctatttgttcttccaatgtcatatcaggaagtatggatggcattgtttttgctataatggattttcctactcccggacttcccatcattaacatattgtgcattcctgccgccgctatttccgatgctttccttgcctgaatctgtccttttatatttttaaaatcgtatttgtaatcttctgtttcctgtggaatgatttttatttcaggcggtttcatattagttgccaaaatcattaccagttgattaagattctctaccccgattatttccaagtcttttataaaatcacattcgcctacgttttcaattggaacatagcacttcttaatcccctgttccatcgctgacagcgccagtggcaacactccgttaatctttacaatgtccccgttaaggcttaattctcctatgaacattttgtcatctactgtacagttaatcagtcccattgacataagtatggatactgccacaggcaggtcaaaataggttcccgtctttctaatattagccggcgaaaaatttattgtaattcgtttaggcggtatcataaaacctgaattcttaattgctgttctaacacgttctctggattctttaatattggatgctaaaaggcctaccatatcaaaagatggcaggccattacatacgtctgtttccacaataacaggttgggtgtcaattccggttattgcggcacattttatcttacataccatataagtccccccgctttcctttagtattttgattatatatttagttttgttttttaacaaaatctaacatattttctgactatttttctttatttctgaagccagtttatgttgcattttgttttaagtgtttcatttgtaatgtagttttatcacattctatatgaattatcaagagctttttttaatttttctaaagctcttttttctattctgcttacatagcttcttgatatgccaagtttttccccaacctttttctgagtcattggcttcttgccatccaatccgtacctccagacaattatttctttttctctttcatttaaactctgtgccacatatttctgaacaaggctgatattctcggctttttctatttgttcaagcgtatccatttcatcattttcaaccacatctataaggcttatggtatttccctctttgtccgttccaataggctcgtttaatgacacatccttgcttctctttttttccgctctaagcatcattagaagttcgttttctatacactttgcagcgtaagttacaaggcgattccccttgtcaggattatatgtgttaacagcttttataagtccaactattccaatggaaataagatcctggttttccctgttctcatcataatatttttttacaacatgggcaacaagtcttaaattcctctcaatcagtatgtccttagcttttttatccccaagcctcattttttcgatataaatcttttcttcatcaggggtaagaggttccaaaaaagttttcaagccggatacctttcgacatacttaatctagtttatgctttacctgacttctttgtgcctgtactctaaaaagaaaaaaacttgaaaagttacttatctaagttctctccaagtctttttatattaacatttattctgctttcattctaagtatgtctccggcctccggtacctggtcaagctttattgtaataatctgctttggatgcggacaactttccattgccactccatcctgatctgtaatcgatattacattagcttcaatatctcttccgtcagctttcattatttcgattttatcacctacgcagaatttgtttttctgctcaattacaaaacttccatcttccaaaggtttccctgatattccaagatatacataatctcgttcataaacgttacaatcatatatctgtgttgtttcatcaggttttccaaagaaaaatcctgttgtgtactgtctgtaagtacactgtgaaattagtgttttgtattttggaatgttttcttcgtacttctttggattttcaaaataatcatcaattgccattctgtatgttctggcaactgttgccacataaagagctgtcttcattcttccttctattttgaagctgtcaattcctgcgtccacaagttcaggaatatggtcaatcatgcataaatcctttgagttgaaaatgtatgttccgcgctcattttcttctacaggcatatattggcccggtcttgattcttccactactgcatatttccatctgcaaggatgagtgcaagcacctttatttgcatctcttcccgccataaaactacttaaaaggcatcttcctgaatatgaaatacacattgcaccatgtacaaaagtttcaatttccaaatcatccggaatatgatttctaatatcttttatttcgctaattgaaagttctcttgctgacacaactctctttgcacctagtgaatgccagaaattgtatgttccatagttagtattgttagcctgtgtgcttatatgaagttccatgtcaggcaacatttcctttgcaattgtaaaaatagcaggatcagcaataataagcgcatccggctttacttttttcaagtcattgaaatatgccttaaccggttcaatatcactgttatgagccaaaatattggctgtaacatacacttttacgttatatctgtgggcaaattccaccccttctttcatctcttccaatgaaaaatttttagcttttgctcttaagccaaaaacttcaccacctatatatacagcatctgctccatatctcacagcagtttttaaaacttccaaactgcttgcaggaactaataattcaggttttttcatctttaaatcctttcctcattattcatctatcaaaatagtatcttgtatataatatcttttttcaaatattatttcttcactgatattgttattccatcacctattggaacaatagttgtttcaagttcaggatgattctttactacttccaaatattcacgcatacgcttatgaattgttctgtcacgtcttctcacaacgtacttagactggataatatccccttcctgcaaaacattgtctgttataagaacagcccccttcttcattaagcgcataacttcaggtagaaaatgaatatactgtgcctttgccgcatccataaaaacaaagtcaaagctgtctccttcaaggccgggcataatttccatggcatctccttcaagcattgtaataacatcttccttatctgcttttttgaaattatcccttgcctgaacaattctcttttcgtagttttcaattgttataatacttgcgtccttttcaattgcttcactcattaaaatggctgagtacccaactgcagtacccagctctaaaattctttttggttttgttattgtaagcattactctcaagaagctttccatttcctttcggataatcggaactccgtcaatatgagcccgctgttcaatttcttccaacacattattatttggtttttcaagtgaatgcatgtaagtgactattctctcatctactatcacactattctccctttgctttcgtagttgtttccgtttctttcttgtcctcttccggaccggcatttataatcttaaaaatctcctcattgctctgagatgtattaaaagaatatgttcctgcctttatttttcttacttcataaagatatgactgaaccgtaaaaactcttgaactttttataacattaaactcctctaatgtttttccaaaactttctattgaagttccctcatcaacagtaaatgtcatatctgttcccggctttggatccacaccttcattgctaaaaatctgtgagccaaaactatatgccgttgtggcacagacaatggcaacaactatcattacaacataaaccaatgtttttattgaaaattttgcaaatccctgtgaggtctttctattatccatgtaaatctccatttcactcacttacaaagcgatgttctttattactcaacttccatgataattggtaaaatcataggatttctcttcattgttttccaaatatattcaccaaggctgtcttttactaccatcttaatcttgccccagtcagcatttcttctgcttaaacattcttccaatgcctcagttaccacaacttttgcattttcgattaagttctctgattccctaacataaacaaatcctcttgttacaatgtcaggtcctgccaatatctgatttgtgtatttttcaagtgttaatactactattataattccgttttcagcaaggttctgtctgtcacgtaaaacaatatttcctacgtcacctactccaagtccgtccacaagaactgaacctgcaggaacctttcctactaccttggcattttcttttccaatacttaacacatcacctgattccataagaaaaacattctccttaggaatacccattgactgtgctaactttccatgttccattaaatgtctgtattcaccatgaacaggtatagaatacttaggtttaattaatgaatacattaacttaatttcttcctgacacgcatgtcctgaaacgtgagtttcattaaaaataacatttgcgcccttcatataaagttcattaataacctttgatacagctttctcatttcccggaattggtgttgaactaaatacaattgtatctcccggtttaatctgtacctttctgtgaattgatgcagccattcttgaaagtgctgccattgattcaccctgacttcctgttgtaataagtacaagctgatcatctgtataattcttcatttcttcaatactaattaatgtattgtcaggaatcttaagataatccatctctcttgcaacagaaataatatttaccatactacggccttcaactataacctttctgttatatttgcaggctgtgttaataatctgctgtactctgtccacattagatgcaaatgtggcaataataattctgcttttagtattttctgaaaaaatatggtcgaaagtctttcctacctttctttcagatggtgtaaatcccggtcttaatacgttagtactgtcacacattaaggccaaaacacctttctttcctaattcgctaaatctgcataagttaattgcatcaccaaaaacaggtgtgtaatctaccttaaagtcacctgtatgaacaattacacctacaggtgtgtggattgcaagtgctgctgcatctgcaatactatggttagttctaataaattcaattctgaagtcacctaaatgtatgctttgtccaaacttaacaaccttacgttttacaacacttaaaaggtcatgctctgaaagctttccttcaataatgcccattgttaactttgttgcataaataggtacgttaatctcttttaaaacatatggcagagcaccaatgtggtcctcgtgaccatgtgttataacgaaccctttaaccttatctttattttcaagtaaaaatgtaatatcaggtattacacagtcaattcctaacatttcatcatcaggaaatgacaaaccgcagtcaactacaataattccatcattatactcaaatgcagtcatgttcattccgatctgttccagtcctcccaatggaataacctttattcttgaactatcactcatattttttatttttcctcctaaatctctattcacgttcttcttttcttatactcataataccttgctaactataaaatcatcacaattctctaaacacatagtcatccccatatttacaaactatcacattttctatgattgaaacgattttacttaatatttttctattttatcgctctatatcaatatcttcaagcagttctgaaaaaattcttccgatataatctaattcagaatcgtcttctaccatctcatatattgcttcttcatcattttcatctgatacatcttttaaaatatgtgcaatttcttcctcttcatccccttcctctgttacaaggatatagttaacgttgttaattcttgtttcttcaacaacgtacatttcaacttcattatcttcatcatctgttaaaacaatcttttcttccattaaataaatctctccatattctttaatcctatttaccacacagttcctatcgttataataatagctatagctttttaatcttatgtgttcttttcaatcctattaatataatcttccaaaataattgtggccgcaatctgatccacatacttatacctgtcctgtttctttatgcctgcttcatccataatctcgtaggcttccacagttgtaagtctttcatcctgaaagactatttcaagacctgttcttctctcaagcattgcgccaaactctttggtctttttaactctttcaccttccgtaccactaagcatgacaggataaccaagtacaatcttctctatattgtattgttctactaactgctctattcttgctaatgtctttcgtaacttgtttggagaatcccttcttataatctcaactccctgagctgtatatcctaaaggatccgtaactgcaactccaaccgtcttagagccaaaatcaagtcctaaaattctcattccattttccattttactttccattttgatttttatactgtggtatataaaagcatcaaaaacttatcagccgggatattcgtgatttcaatggtattattgcttacaatgttagctataataccattccaaaaccacatcttaattaatcgctttcccatatttccgcctgataagtttaattttatgttattcttatgctgttttataccacctttatttcaacttatggttaatgtaatactttactgtttcttcaataagttcatcacgttccactttcataatcaggcttcttgcattcttatagcttgttatgtaagttggatcccctgacataatataaccaacaatctgatttacaggattatatcctttttcagctaaggcttcataaaccttttcgagaatctcctctactcctaatttctgttcttgtggaactctgaaaaattgtgtatttcctaaatcgctcatcttatcacgtcctttttctacctatcaagtaggctttctttatcactaattttaatataaaacttacatagtggcaagcattatttcattagttaaaaaatctttaacatttacttttcgtatttgtccttcaagattttccttttcgggcactgcaattttaatataatcaactgtatgtccaacccaatattccttgttatccagtaggattttttcttcaaacaatactgtggtatcttgacctattttagcctgtctaaactcttttgtaagttcttctcctgttttgattaagtcttcacttcttaatgtttttattttttcatctatctgatttggcatttttgctgccacagtgccatctctctttgaatatttaaaaacatgtaattctgcaaacttaaccttctttacaaactctcttgaactaatgtagtcttcctctgtttctcccggaaatcccacaataacatctgttgtaaaagcaggattatcaatatactttctaattaactggcacttttcatagtattcatctgaagtataatgtcgattcatggcttttaatgttttgtcgcatccgctttgaagtgagaaatgaaaatgcggacaaatctttttaaccttgcccagtctttccacaaaatcttctgttacaacttccggatcaagtgaacctaaacggattctttcaattccattaacattgtctgccatttctataacatctattaactttttgccattgtcatcatagcagcttaagttaattcctgttaaaactatttccttaaaacctgaagctgaaagtctttcaagttcagcttttatgctttccattgttctgcttcttattcttccccttgcatatggaattatgcaatatgaacagaaattgttacatccatcctgaattttcaagtgggctcttgtatgttctgttactgttgaaatttccaaatcttcgtattcatctgtgtggttaatgtcaattacatattcttctttaacctgttctccggcttctttttcttcataatattcattaagaatttccacaatgtctttttttctgttatttcctacaactaaatctattgaaagatcctgtgccactttttcagttgcagtctgcacataacagcctgtggccactactactgcattaggattttgcttcttagccttatgaagcatctgtcttgattttctgtctgccatatttgtaacagagcatgtatttataatataaacgtctgcctgatcctggaatgatacgatttcataacctgcttttttaagcaattgagtcattgcttctgtctcgtatgaatttactttacatccaagattgtgaagtgcagcttttctcatattttttctcctttataaaaattaactgatttttgcaaatatttttgggcatttatacacattgacaaagattcaatccgtgttatcattttacatataaagattaagagaggtaatgatatatgaaaacagttacaatcaacttaggatcaattgataaggttaaatcttttgtcaatgatattacaaaatttgatagcgatttcgacttagtatcaggtcgttatgttattgatgcaaaatcaattatgggaatcttcagtcttgatctttcaaagcctattaatttaaatattcatggtgatgaagataatgctgaaattatggaagttattaagaaatacgaagtataatttcttctattcctaaataagtatttttatttattttgattttattagcaggtttacatttaagtaaacctgcttttttattacaatatcaaattttttaatatcatctgtgcttacacagtaatggatttctaaccaatctctataacttctgctgtttttacagcatcctcaaacattctgtcgatttcttctgacaaatgtttttctgagtttttaatcacattaatgttaggttttgttacagggtgctttgcaacaaatgttgtacaacagtcttcgtatggaagaattgatgtttcatatgttccgatttttaatgaaatatcaacaatctcctgcttatcaaaagcaataaccggtctgaatacaggcattgtacatacttcgttagttgctgcaagactctgcattgtctggcttgcaacctgaccaatcgattcgcctgtaataagtccctgtgccttttccttgtttgcaaaatattctgcaatcttcatcatatatcttctcataataattgttaattcatcatgagggcacttgtcatatatatacatctgaatttctgtaaagtttacaacataaagtctcattggacctgaatattttgatactaacttagctaaatccacaactttctgttttgctctttctgatgtgtatggtggtgcgtggaagtaaactgcatcaaccacaacgcctctcttagctgtcatccagcctgctacagggctgtcaataccacctgataaaagcaacatcgcctttcctgctgttcctactggcataccacctggtcccggaataatctttgaataaatattaatgtgatttctgatttcaacattaatttcaacatcaggattatgaacatcaacctttacaccttcaaaagcatctaagattcttccacctaattctgcgttaatcttcattgaatccattggataattctttcttgctcttcttgccataaccttaaatgtaaagtttttgtcagggtatgtttcatcaatgtatttaataacctgttctgccaaatcatcaaaaccattgtcttcaatctgaaccattggacagattccaacaataccgaaaacgtgctgtaatacatctacagcctcatcaaaatcataatcaccttctgctattgcataaattcttccgttttcttttgttaccttaaagtttccgtcaatcttatctaatgctcttttggcattatctaccaaagcattttcgaaaagatatctgtttttaccttttacgccaatttcagcgtatttaatcaaaaatgatttaaacatctttctcctccaaaataaattgtactaatttttatgttatttatctacgcacatattttctcaaaataggcaataattgctttatttctccaactgcatagtcaacttcttcctctgtgttaaattcacaaaaactaaatcttactgttgattccaaaaggtccttgtcaattcccatagccttaagtgttgagcttacggcaggtctgttagatgagcatgcacttcctgcagaaatgtatacacccttgtcttctaacgcatgaagaagtacttcgcttctgacccccttaaaacttgcacttacaatatgaggtgccccaagattgccctttctgctgtttacagttacaccttctattgcttcaaggctgtcaattaacttgtcctttaaattagtcataatttcaacgttatgctctaagttgtcataacaatcctttgatgcctgaccgattcctgctatacccggcacgttttctgttccggatctaaagcccatctgctgaccgccaccaaaaataatggggttaatctttgtattctttttaatataaataaatccgcttccctttggtccgtgaatcttatgtccactaactgtaagaaggtctatattatctcttcttggtttaatttccaacttgccaaatgcctgaattgcatctacgtgataaaccacagaaggatttactttcttaatatactgatcgatttctcctaccggctcaattgctccaacttcattatttacatacattgttgaaactaagatagtatcttctgtcatttctttttccaaggcttccatctgtacaacgccatatctgtcaacaggcaaataaataacttcaaagccctgttcttccaaatatttcattgttgcaagaacagatgaatgttcaatagctgttgttattattctgttgcccttacgcttattagccattgctgttccaataatagccatgttatttgactctgttccgcctgatgtaaagaaaatctcctttggatcaacttttaatatttttgctatattttcctgtgcctctttaatatatttttcagccttaactccaaccatatgcatagctgatggatttccaaaatcctctgtcattgtttttacaacaatgtcttttactgaatctgtaactatggttgtagctgaattatcaaaatatgcttccattttaacctctatatttaactatcaattatttacataactttaattatttttgtttcactcttctgtttcaaacattaaaactgacattaatgccattccggctgtctctgttcttaaaattcttttgccaagggtaatgtcataagctccggtatttattgcctgttctacttcttcctctgcaaaaccaccttcaggtccaataaatattccaacggtcatgcccgtcttaatctgacttacaacctgtcttgtatgagccatattttctgcattttcgtatggaataagtaccatatccatagcttctgccattttaagtgcctctttgtatgttacaggcattgaaacttttggaataattcctcgcttagactgcttagccgcactttcagcaattgaattccaacgttttgttttagaaacagctttcttattatcaagcttaactatgcatctcttagtggatacaggaactatttcgtatgctccaagttcaatcatcttctggataatcgtttccattttgtcccctttaggcaatgcctgaaaaagagtaaccttaattggaagttcctttgccactccatttacgtcttctatttttgctcgcacctgttcattttcaagttcatctattgtacaaacatattccctgtcttctccgtcgcttataagaatggtttcgcccttcttcattctgagaacgttttttatatgattaacatctgaacctataattataactgcgtcttcctgtatctggtcttttttaacaaaaaatctatacatcttatttcactcttacctatttcttaattgccataatggcacgccagtcaccctgatttactacttttgaaagctgaagattactattattattaattgcatctttaacctcttcctctttcatataaataatacctgatgaaataaatactccgcctggctttaaaaatctatccacaatacctgcaattggaataattacatctgcaagaatatttgcaacaacaatatcgtactgctctgcctcaaactcagcctgcattttttcatcttccaaaacattgcctgcttcaactttcacattatccatagaaagcttatttaccttaaaattatcataaacagcctcaattgccgcaggatcaatgtcggtcatatcaacctttgaagcatttaacttctttgccacaattgacaaaataccacttccgcaacctaaatcaagaaccttgtcaccatccttgacatattccacaagctgcttaatacaaagctgtgttgtgtcatgcttacctgttccaaaagcagtgcccggatcaatttcaatcatcttcatacccttatgctcttcatctacttcttcccaagtaggcttaataaaaaactctccaacagtaaaagacttaaaatacttcttccaattgttaacccagtcaacatcttcagttgtacttttttcaatactgccttcgcccacattaataaagctcttagcttcctttaacttctctcttaactgatcaagaagctgctctgcattatcatcttcctctgtataaaaactaatatatgcagttccgtcatcttctggaaggtcagccaaataatcaataaactgcttctccttatcttcctgactaatctgcacattatcttcaacctgaataccactaattccaagttccatcaaaacaccactgacaaaatcctctgcctgagtagttgtctttaatttatacttattccacttcatataaacgctccatttcctgaaccctttttaactgatttatcataacatataaacatctaatacgcaaattatactttgcgcgtttctacaagcgatgcgcattcaggacgaaatacagacgtggggagcttgctcaccaacggttgtatttcatactgaatgcatagcgcgacagcgcgtcatgagcatgtagcgtaagcgaaatgcgaatgaacatcgcgtaaaactaaaaattgtaccatatgtggcaattcctttttatatagtacagatttactctggtttaagctggaacaaactcatatatgtaccatatttgaaatttcttactcgtatggtacagattttctctgatttgaactggaacaaacttatatctgtaccatatacgagatttcttgttcgtatggtacagattttctctgatttgaactggaacaagcttgtatctgtaccatatacaaaatttcttactcctatggtacatattttctccgccttgaactgaaacaagcttatatctgtaccatatacgagatttcttgttcgtatggtacagattttctcagatttgaactggaacaagcttgtatctgtaccatatacaaaatttcttactcctatggtacaaccttgccacataacatacgagaactcgattctatggggtagtaacctattagtttgaatgagatgaatcttagaatctaccccatagcatacttgagcttgattttatggggcaatttccattaacttcaataatgataaaacttgaaatttgccccataatatgcacaacattaattctatgaggtaattcctgttagattcaataagaatgaaacttgaaatctgccccataaaatgcgaaacattaattccatgaggtagtttctattagtttcagtaaggattagacttgaaatttgccccataacacacttaacattaattccatggggtagtttctgttagtttcaataaggattaagtttgaaatctaccacataacatacgtaaatttgattctatgtggtatttatctatttgaattttgtaatttcaattttttcgatatataataaaaacaactcacatatgattttgatatatttcggaatattttatataagcaaacaataggcaggatttcgcaattttgcgagcatagtgtaaagcgtaaaaactactgtctgagcgtagcgagtttagtttttcgctttacaatagacggcggagcaaaataagaaatacaacgtgtttgcgctataaaatattccgaaatacacccaaaaattatatctagttgttactttatacaaaggagattaaatgattgaaaagaattgattttgataatggcaatgttgccggcaatattcttaatgctgccattcctatgttggtggctcagattttaagtcttttatataatattgttgatagaatttatattgcccgtattcctgatgttggtaccgcagctcttggtgcggtgggactttgttttcctattataactattgtaactgcctgcagtaatttgtttggaagtggcggtgctcctcttttttccattagtcgtggtatgggtgactctaagaagactaaccgtattatgaatacttctttttctatggtttgcgcgggagctgttgttttgactattttggggattgtttttgcaaagcctattcttgttttgtttggggcatctgacaatgcattgagttatgcttatccatatatgactatttttatgttgggcactcttccttccatgatttctacaggaatgaatccttttattaatgcacagggctatgccacaacaggcatgctttctgttgcaattggtgccattgccaattttattttagaccctatttttatttttgttttgggacttggtattagtggagctgctattgctaccgttatttcgcaaattttgtctgcttcttttgttattttctttctaagatgtaaatctgagttaaaaataagacttttgcacttaaatgaaataacaggttgtgttgagtatgctaagaatattgttagtcttggaactgccggttttattatgcaggttactaatagtcttgtttctatctgctgcaataatgttctttctgttacaggtggggatgtttatatttcggttatgactattgtttcaagcgttagacagatggttgaaactcctatttatgcaattaacgaagggtcatctcctatcttaagttataattatggagctaatcgccctggtcgtgtaagaaaggcgggagttgtaatgggctgtctgattcttggatatactgcgattatgtggactttgattattgttgcaccacattttctcattcagatttttagttctgacagcgctcttatagctgatgctgttcctgcgctgaaactttattttgcagcttttatttttatggatttgcagtatattggtcagacattttttaaatcacttaacaagaagaaacatgctattttcttctctttgcttagaaaagttgttattgttgttcctttaacttacatattcccatatttgtttaatatgggctctaatggagtttttcttgcagaacctatttctaatgtaatcggtggaagtatgtgctttattacaatgctatgcacaatattaccggaattaaaaagaatggaaaataaataaaaataccccttataccggccaaggttttgatttgtataatctctgcctttccgttatatggggtatttttttctattattttttgaagaatttctttattttatcttctgctgtttcatgtttgtcttcaccaaattcatttaaagtgttacctgaaactgcatcaaattttttgattaattccttctgttctgatgtaagttttgtaggtacttttacaacaagtgttgagtactggtctcctctcattgagttgttacgtacgtggcatacacctttgccttttaatctgattcttgttcctgtctgtgttcccggttttatgttaaatttaacatctccatcaattgtttttactctgatgtcgccacctaaagcagcctgagcaaatgaaattgatgtagttgtatatatatccattccgtgacgttcaaattcattacttggtcttactctaatatcaactaataagtcacctcttggacctccattacgtcccggctcaccctgtcctgtaattctaatactctgtctgtcatcaatacctgcaggaatgtcaacagaaactttcttcttctttgaaatatatcctgcgccatagcagtcaggacatttctctttaattactttacctgtaccattacaatcaggacaagttgttactgactgcattgttccgaaaagtgtctgctgctggctaacgtactgtccacgtccaccacattttgaacatttttcaggagatgttccaggttttgcacctgtaccattacatttactacatgtttccttaaagttgattgtaacttctttcttgcagccgaaaactgcttcattaaagttgattgttataccaaccctaacatctgcaccacgcattggaccattgttggctcttgagcttcttctgcttccgccaccaaatatgtcaccaaatatatctccaaatccaccaaatatatcgctaaaatctgctccgttaaagtcaaatccacctgcgccgcctgagccgtcaaaagctgcgtgaccgaactggtcatactgctttctcttactgtcatcacttaaaactgcgtatgcctctgatgcttccttaaactttgaagctgcttcttcatctcccgggtttgcatccggatgatattttttggctaattttctatatgcttttttaattgtggcactgtctgcgtttttgtctacacccagtacctcatagtaatctcttttatctgccatagcctgcctcctaaacaactaagacttacttgcgtgtgaaaacccgtccgggataactcgggcgggattttcacatgcatgttgcatcatttattatacttctgtaaattcaccatctacaacatcatcatttgcatttccggcaccctgagcacccatgtctggacctgcaccctgagctcctgctccctgtgtctgttcatacatcttagcaaataatttctgtgcactgttcattaatttttcttttccagccttaagttcttcaatctgagcatctgtaacttcttcgccaattcctgcgattgtagcctttaatgcatcaaggtctgcctgaacttcctgcttgtcgttaggatcaagcttgtcgcctgcttcattcatagcctgttctgtctgtgataccatagcatcagcttcgttcttagcatcgattccttctttacgtttcttatcctgtgcttcgtattcagctgcttcttttactgccttatcgatatcttcatctgacatatttgaacctgctgtaattgtaatgtgctgttcttttcctgttcctaaatccttagctgaaacattaacgataccgtttgcatcaatatcaaatgttacttcaatctgtggaacacctcttcttgctggagggataccatctaatctaaactgtccaaggctcttgttgtctctagcaaactgtctttcaccctgtactacgttaatatctactgctgtctggttatctgcagctgttgagaagatctgactcttctttgtaggaatagttgtatttctttcaataagtcttgtagcaataccacccattgtttcaattgataatgaaagtggagttacatcaagaagaaggatttcgccggcacctgcatcacctgctaatttaccaccctggatagaagcaccaagtgctacacattcatcaggattcatcttctttgatggttcatgacctgttaactgttttactttatcctgtacagcagggatacgtgttgaaccacctactaataataccttgcttaattctgctgctgtaattcctgcatcctttaatgcattctgtacaggaactgctgttctttcaacaaggtctcttgttaattcatcgaatttagcctttgtaagtgtcatattaagatgctgtggtccctgttcatttgctgtaatgaaaggaatgctgatttcgacctgagttgctgatgaaagtttcttcttagcatcttctgcttcagctttaactctttccatagccatcttatcgtttgaaaggtcgatacctgtcttgcccttaaagtctgctactatatagtccataatcttcttatcaaagtcatcaccaccaagtctgttatcacctgatgttgcaagtacttcgataacgccatcaccgatttcgataacagatacatcaaatgtaccaccacctaaatcgtataccataatcttctgttcgttttcattatcaagaccataagctaaagctgctgctgttggctcgttgataattctctttacatcaagacctgcaatcttacctgcatcttttgttgcctgtctctgtgcatcgttaaagtaagcaggtacagtaataactgcttctgttactttttcaccaagataagcttctgcatcagcttttaatttctgaagaatcatagctgaaatagcctgtggtgtataactcttaccatcaattgttactttataatctgtacccatatgtcttttaattgatgaaactgtaccttcagcatttgttacagcctgacgtttagcgttatcaccaactaatctctgaccatctttcttaaatgctactactgatggagttgttctgaatccttcagcgtttgctattactgtaggttctccaccttccattactgctacacatgaatttgttgttcctaaatcaataccaataatctttcccatgattgtttcctcctatataatctaaaaacttgttaatatctttatttgaaatggtatgttgctaattagttagcaacctttaccatactgtgacggacaactgaatctctgtatttgtatcctttctgtaattcctgggataccatgttttctccaagttcctcgttgtcctcatgcattactgcattgtgaagttcaggatcaaattcctttccttcagcttcgataactgtaactcccatatcttcaagagctgctgtcatctgtttatagataagattcattccctgacctacaggtgaatccaaatcctcttcactaagagctgcaacgcctctttcaaagttatcaacaactggtaaaattttttctatgattgccttagctcctacttcgtacattgctgttttttccttttcgcttctgtttctgtaattctgaaactctgcaaaaagtctttgatatttatcatttaattcttcaatctgctgatcctttttgtctttcttatctttctttttgaaaaacttctttttagtatcttcagatttttcagaagtttctgtatcttcagcttcctgttcattagcttcttctacagtttcttctgtctcaatattttcagcctttgtgttttcagcttcattatctttaacttcattattagtttcttcggtaatgttttcatccaaagtttctttttctttttccattggactttcctttctttcttattctattgtctaactaagctttgctataaatgttcatccttaaatgtatcgcttagttgttctttcacatttcttaaagcatctactactttctcgtagtccattctcttcggtccgatgattcctattgttcccttgaaaccatcttccaattcgtatgttgcagttacaacactgcaatctttcatagactgtacaggactttcacttccaatatagacctgaatacctgttttctcatctccttcattaattaattcggtaagctgagacttttcttctaatgtagtaagtaactggcttgctctttctttatcacttaattcaggatatttgaaaatgttggttgcacctgaagtataaatcttcatctgctcctctgttgcaattgcttccgttattgctttcaaaacctcgcttacaactgattcaaactctcctgcctgtgatgccagtgtagtcataactcctaaattaatttcttcaattgataatcctgcaaggactgtattaagagctacatttaatctgactactatttcctggttaacatccttgctgactttgacaattttgttaaccacatggttcttatctgaaactaccgtacaaagaagactcttttcttccaaaactgaaagctgtacgaacttaattctgttagtctgtgctttcggtgtggaaaccattgtggcgtaattagtattagttgctaacatcttcgccatattctgtaataaggtttcaaccttatcaactttctgaataagtaaatcttccttttcagtaactttcttctctctctcatcaagctctgccatcctgtctttaagaatattgtctacataaaatctgtaacctttatcagttggaattcttcctgccgatgtatgtggctgaactatgtagcctaactcttcaaggtctgacatttcatttctaattgttgctgagcttaaatttaaatctgtatatttggaaatggttctggaacctaccggttcgcctgtctcaagatagttcctaataacagcgtctaatattttttcttttctctcattaagttccatggcatctcctttctctttctgttagcactcgtttaatttgagtgctaatattttatctgtgttaaagttaccactcctcaaccgctttgtcaacatttttctaaaaaaagttttgtaaataatttgtgaactttctttgtacgcaattgcataacacgtagcaatccatgcaatcaattgggggggatttctaatctgtataagaaaaagaactgttactccggcacttgaactctgccaacttaacagttcttttcattgtggttattatatttttattatagctttcatcgttattgctattccaacatttattaactaattctttgctttttctactgctataaatccaaatgtttcaggtccaacatgagttcctattgtaggtcctatctgataacattccttaaacttaattcctttttcttcaactttctttacaaagttatcaagattctctgttccgtctgaataaattccataaattggaaatctttcatctaagtccattccttctatataactaacaagtcctgcaatggctttctttctgccgataaacttaccttttacaattaacgttccttccggaattgaaataaccggcttaagctttgcaaaattaccaaaacctgcttgcatctttgtaagtcgtccacctttgtataaattttcaagattgtcaattgcaaggttaattgatattcttgattttaattcttccaatgcctctacaatttcatctacagtttttccttcatctcttaactgtattccgtaatctaccattatctttatagcatatactgctgtttttgaatctataagatggattccgtcatattcagccatatcttttgcaatattggcactctgatacgttccacttattccacctgaaagcataacacctattatctggtctccattagccttagcctcttcgaaaacatcaagaaatgcctgtggtgatggctgagctgtcttggggaaagtatcttcctccctcattctcttatagaattcacttctgcttatttcaattccatctttatatgtatcattatcaaaagtaattgacaaaggaacaaatgcaattcctttttcttttgcttcatttacatcatagtctgaacctgaatctaccataaatttaatcattatattttacctcttcacctttaagtgtttttattgtacttgcttgtatcgtatacgtcaataggctattgaattcttttcaaatccgtagcataatagtgtttcagcacaaaataaaaatcaatatattttgtactaattataaaggagagttaacaatatgaatgaatctgttttatcatttaaagataaatactttggcgataaaaatttttacaaaatgacccttacaattgccatccccattattatccagaatcttcttactaatctggttagtatggctgacaatattatggtaggacagcttggaaccaatcagatgtcaggtgttgcaattataaatcagttgttttttgtttttaatcttttagtatttggaggaatgtccggagcaggacttttttcagcccagtattttggacaaaagaatcacaatggtgttcgtgatgtttttagaatgaagattcttattggcattacaattattgctatttctctttctgttatgatttttcttcatgaaccgctaattaatatgtttcttcacgaaggaagcagttcaggaaatattcaggaaacattcaattatgcaaaaaactatctttacataatggttattggaattgcaccttttgttatttctaactgctacaacactactcttaaagaatccggacagactgttgttcctatgaaagccggagttttggctgtagtatttgatatagttctcaattacatatttatttttggaaaattaggatttcctgccatgggcgttgttggtgcagccatcgccactgttatttctcgttttgttgaatgtggttatcttgtaatttatactcatatacattcaaatgattatccttttattaaacattgctacagaactcttaaggttccggggtctcttgttaagaaaataattataaccggtgcccctctcatgcttaacgaatttttatgggcaggtggtcttacattgcaaacacaggctttgtccactagaggtcttgccactgtaggaggcctaaatatttgcaatactattggaaatatttctaattgtatttttgttacaatgggaacaactattgctattgttgtaggacaactactaggtgccggaaaactgaaagaggccaaattgactgctacacgaatggctgctttttcacttttaatatcatttggcatgattataattcttggcctacttggacctgtatttccatatttctataatacaaccgacgaaatacgccaacttgccacaaaatttatatgggctatagctgctgcaacaccatttatatcgctgtcaaattctgaatatttcattttgagaagtggtggaaaaactataattacatttctattcgacagttgttttgtctgccttgtaaatgtacctgttgcaatatgtcttacaaaatttactgccatacacattgttggaatattcttccttgtaaatatgcttgaaggtattaaggcattaataggatttataatggtgaaaaaagatatttggcttaacacaattgttgactaaaaataattaagaaaaaagaacaaccgattcattttttgaaatcagttgttctttttatattattgaaatgtaaaacatcaaactgttaattacccgaattgtcacctgcctatgctaccacaatttaatatatttttaaaacaaaaattctgacattacataattgcttaaatctataccaaactctgtaagcttaacgtaaccattgtcatttataagaaatcttttatcttccatttttttctgaacttttccgtagacttccatataaggcttcccaaaataccgttcaaacttttccatgcttacaccttccatcattcgaagccctaagaacataaattcttccattctgtcccgttcagtaagctgctgtagattttttactatactgtttagaatattaacctgattttcaacttcactggaattttccacattatttattgaattctctttgatattgttagttaatacttcgatatatttatttatatctgaaatattattataacgattctctttatacaaagatgccgcaccaatgccaaaacctaaatattcttttcgctgccaataacctatgttgtgcttacattctttccccggtttgctataattagatatttcgtattttctatatccattagaacgcaaaatattatttgtaagataatacatctttctttcactttcttcatcgggaagaatatttataccttttatctgagctttttttactctgtcatacattaatgtattttcttcaactataagactataagctgaaatatgctccggctctaagcggacaactttgttaagggtctcctcgtaactttttaaagtctgtcccggcaaagcgctcattaagtccacattaatattgtcaaagccacattttcttgccaaattatagctttcaagaaatcctgcataattatggattcttccaatggactttagttcttggtcattggcactttggagaccaaaacttatacggttaattccacttttcttatattcccaaagcttgctttccgtaatagttcccggattgcactctattgtaatctcaggattttcagacatattacaattatctcttaaaactgacataatttttgaaatctgattttcttctaaaagtgaaggtgtgcctccaccaataaaaacagtgtccacaacatattctgacattttattcttatttagctttatttcattaattaatgcctcaacatatttctctttagtttccaaatctgccggtgctgacagaaaatcgcaataatcacatttttttacgcaaaaaggtatgtgaatataaatttcaagtccattcattatttctactccaaaacttattcatcatcaagttttaatactgccataaatgctgactgtgggatttccacattgccaacctgacgcatacgtttctttccttccttctgtttttcaagaagttttctctttcgtgaaatgtcaccgccgtaacattttgccagaacgtccttacgcatagccttaactgtctctcttgcaataaccttactgccaactgccgcctgaattggaacttcaaataactgtcttggaatttcagtttttaatttttcacacatcttacgaccacgttcgtaagctgacgcttcaggaacgataaatgacaatgcatccacttcctctttgttaatcaaaatatcaagcttaacaagcttagcctgttcgtagccctttaattcataatcaaaagatgcataacctcttgaacgtgattttaaggcatcaaagaaatcgtaaattatttcatttaatggaatatcatatttaagtaatgctcttgaaccttcaacatattccatactgatatatcgtcctcgtctctgctgacaaagctccataattgcaccgataaactctgttgttaccataatttccgcacttacaataggttcttccatatgttcaatctcacttggatccggaaggtttgttgggtttgtaaggtcaattacttcgccattttctttatatattttgtaaataacacttggcgctgttgttacaaggtcaaggttgtactctctttcaagtctttcctgaataatttccaaatgtagaagtcctaagaatccacatctgaaaccaaaacctaaagcaatagatgtttcaggctcaaactttaatgctgcatcgttaagctgtaacttctccaacgcatctcttaagtcaggatattttgctccatctgcaggataaagtccacagtaaaccataggattaacttccttatatccgggaagtggtgcgtctgccggattatctgcatcagttactgtgtcacctacttttgtgtcagacacattttttatacttgcagtaatatatccaaccatacctgcaggaagttcatcacatggaataaactgacctgcaccaaaataaccaacttcaacaacattggctgttgcccctgttgccatcattttaatattcatacccggcttaactgttccttctttaattctacagaaaataataacgcccttgtatgcatcatataaactatcaaaaatcaaagcctgaagtggtgcattagcatctccttccggtgccggaattttttcaacgattgcctctaaaacatcttcacaattaagaccagtcttggctgaaataagtggtgcgtcatgggcttcaagaccaataacgtcctctatttctgccttaactctgtcaggatctgctgaaggcaaatcaatcttattaataacagggaatacttccaggtcatggtcaagtgccaaatatacattggccaaagtctgtgcctcaactccctgtgccgcatcaactacaagcactgccccatcacaggctgcaaggcttcttgaaacttcatagttaaagtcaacgtgtcccggtgtatcaataaggttaaaaatatactcttctccatctttagccttgtaaatagttctaacggcctgagacttaatagtaatacctctttctctttcaagttccatattatcaagaacctgagcctgcatctctctgttagtcaaaagacctgtcatttctataattcggtcagccaatgtagatttaccgtgatctatatgggctataatacaaaaatttctaattttactctgatcaatatgtgacaatttattcgctccaatctgtttatattttgtctgtattattctatttgcttatattttttaacatttctaacaattagttttctaaaattcattcacattttaacataaataaatcataggttcaaacattttaactttatcactttattattttcattttatttgataaacttaatactatgtgccataattttatgtcacttaagtgacggaatggagaaaatatgaactatgcagaaataaaaacatttgatgtggcaaatggtcccggtatcagagtttctctttttgtaagtggctgtaatcacagatgtcccggatgtttcaatgaacaggcttgggatttcaactttggtcagccctttacacaggaaaccattaactacattatagatactttgtcttttggtgcttatcagggagttacattcctaggtggtgagccaatggagcctgttaaccagaaggggctgcttccacttgcccgaaagataaaagaaacatatcccgaaaaagatatctggtgtttcacaggatacgactttgaaaaagatataattggacacatgtacaacgagtgtcctgaaactaaagaacttctttcctatatagatgttcttgtagatggtccattcatcgaagcgcagaagaacttaaacctggtatttcgtggttccgagaaccagcgcttaattagaatacctgaaacattaaaaaccgggaatattgttttatgggaaaaagaaatgtaatctaaatggtatcttttacccattgcaggcagaaatttctgcaagcaaacaataggcaggatttcgcaattttgcgagcatagcgtacagcgataaacttactgtctgagccgtaggcgagtttaagttttcgctgtacaataggcggcggagcaaaatcagaaagacaacgtgtttgcggtagaaatttctgctggcaatggagcaatataccatttggattacattatattaacaataaaaggagatttgttatggctgttaatgttaacgtaaaaaaattaaaggagaatgctactattcctacttatggaactgagtatgccgcaggtgctgatttatatgcctgcattgaagaagctgttactattgaagccggtgaaactaagtttattggtactggtattgcaatggagattcctgaaggttatgccggtttgatttatgccagaagtggtctttcatgtaagagaggtcttgctcctgctaataaggttggtgttgttgatgccgattaccgtggagaacttactgttgctcttcataatcactcaaacaaggctgagactattgaacctaatgaaagaattgcacaggttgttattacaccatttctttcagctaattttaatcaggttgatgaactttctgatacagttcgtggtgttggaggatttggttctacaggtaaataacattattttaaaaaggcgcatttcaattccatgcgcctttttactttatgctttaaatttttcatctcaaccttacgatatatttttcatacccataacgttttactgttgtagtataagattaaaatgtatcatttttgtaacagccgtgtttacgtcataaaatttttctcttagtaatttattatcaataattccttatggatttttattatactttttaataaaaatcattatcaaatccgtctattccaacttctatgctttttttgccaagttctactctccaaacaagtccacttgttatttcacactgccatatgtaattctcatctttgtcaactatggcaattcctttagtttctttatctttgtcagctaattcattataataaataccctgttcatatggttctacataaattccattatagtagtctgatagctgctctattatttctttttgaaaagtatccaaattaataagagttaacttatttttctctgcgttctgcttagcgtagctaagtatactttccacattgtctcctgtgatttttatttcatatattttgttggtcgtattgtccaaatacacggttgccataatctttggactcttgcttaatgttgctgttgcctctaaatatgggaaagaagcactttcaccaacaatactgtaacacttttgaataacaatatttttaggcaccagttttattgtttttttattgtttattaactctttacatccaaaaagctcaagccaataatttatttgcttttttacattttttctaattgttttcaattcgttctctgacggatcaaacaacacttcaactttcttttttacatattcttcatcagctataatagagttaaggtcatctaacttctggtctattgttttagtctttgccgttgatgccatttcaaggtttacactgcctgtattcttatcactatatttaacctgatttaagtagcttgtatcactgtaataatataataattgaggcagaaaaaccgccaaagccacaattagcaatactgccacaggtaatattcttttcttcatttagttctgtccttcctgaaaaacaatacttattatcgtaccttttcctggtttacttctaacactccacttagcattatgtatgcttacaatctttttgcaaagggacattcctatgcctgcaccgccctcttttcttgctcttgacttatcaatcatataaaatgcttcagtgatttttttaatttcacttttctccattccacagccattgtcctgaatgaaaactgtgtatcctttttcggtttttatagccttaagggcaattattccctgacctgaaatggcttttctgccattatcgataatattcataaacagggacttaagcaaatcctcatttccaacaatcacagccggttcaacagacattttaaatctgatattgtgttccctaagcatttgttctacagttttttcaatgtcattaaacattttctctgtactaattctgttaaattcaattttctgcttatcaagagaaatcaaatccattaaagtaaatgacaacttctccagtctttttccctgcaaaaatatataattggaatattctgaaatctcttctttttcaaggtccattgaacgcatcatatcagaatagcctataattgaagtcaaaggagttttcaattcgtgagcgaaagctgccgtaaaatcttcctgttgtcttgctgtatcttccaactcttcaatattcttctccagcctgtctgccataatattaaagctattaaccaagtctccaacttcaccgtcagtttttatctttgctcttgtgtcgtactgaccttttgccatttgacttacggtatcagacaacttttcaattggtcttgttatttttttagaaaaaacatatgcaagaatgcaggtaacaacaagggcaattcccaatattaccctataatttttcatcatttcatttatgtcattgtaaacttcattaatgctgctaacaatgcttatgtaatatgttccgctttcaattgtcatttttgacattgtttccaaataataactaccattatttttaaaaatcaagtatccaaaattattgtcttttaaatctttgatttttatatttttttctattttgctgtcagtatatattgctttttctttctgatttacaattgtaattccaatctggctttcgcccatacttcttttgactgaatcaattattttttctatgtcatttttttgaatatattcagtatccgatgacaacattgaggctgaagcttcaaatgaatatacaaacatttgattctcgttttgctttcttgacaattctctacttaaagaattatcaaatgataactttatgaatattcctccaaatatagaaaaaataaccgtaacaattataatcagcgagaaaaacattttccaaaaaagtttcatttaacaccttttcctgtttgattattgttgattatatggattgctttgtgctcctgtaatcacactaacttgtatccaactttgtacacggactgtatcttgtctccccagtccagttttcttctaagtctttgaatatgtaaatctatagttctgctgtctccaacataatcgttgccccacacattttcatatattacatctctgtaaagggcaatatttttgtttcgtataagcagaaccaaaagttcaaactctttatgtgtaaggtccaaagtcttgcctgccttcgttacacttcttgactgaaaattaattaccacatcatcttcaaccaactcgtcgtttgtcttcttgtatcgtctgagaacactttcaacccttgcaagcatttcaactacttcaaaaggctttgcaatatagtcgtctgctcctgctctaaggcccttaaccttattatctgtagttcccattgcagtaataaaaatagacggaatgtccattgactttgcatactccaaaagttcataaccgtctatttccggtagcattatgtcgaaaagacataaatcaaaatgcttactgtctaaaagatttgccgcatcctttccgttatatgcgcatgtgcataaataacctgcctttacaagatttatttttattaaatttgcaatcatttcatcatcttctgcaactaaaatttctatcattaattttctcccagtatacatattaatccacattgtattttacattaaattgtatcttatttgtaaactattctccaagtactttttttattaaaacagccaaaggctctgctgcattttttgcctcctgatatgtattggtctgtgccccaacctcaattaacatacactgcttaccaagggacaaattatattcataagcatttacataatttcttcttgtaaaacccggataatagcattctgcgtttactttcatttggagtccaagggcaagattttcgaacctgtatggatttttcaaataatcaatatcgccacttagcttaaatctggacatgccattaaaaaacataatctgggcagttttctttccattgatttccgtaaccaaccttgttccgtcatttactccgtctctgtgaatatccaaaatcaaactaattgacggatatttctttaactgcttctttaccccagccttagactgagtgtatgcctcgtgtctgtccaacttaccatttactatatcatattttgttttgtcgtgtattacattataaccaaactgctctcttaaaatctgtgccagcctgtttccaacaccaataattgttgtgtcctcatcctttgttgtgttggaaaaatcctccattgaatgagtatgatatattagtatttgaggtttcttattgtttcccgttattttaaattctttatttaaagcctgtttaattggcatatcactttcttttatggttgttgcatttgttaccgtataaaatctgttaattacttctttaaaactgccaatatttttttccgtataaagttttcccgattttttaggcattggaactatagccttattttccttctttttattgttgttcttttcattatttttaacagttgtttccacaggtttagcagtagtttccacttctttttttgcaatctgattttcagctttcatattttcatacaaaatatttataacctggctatatgccggatcacttgtgtcataagtgtattcgctttttgctatataatctgttacaaccgttgtaagaatcctcttttttgcatcctctgcaatatctttgtgattctccaaatatatcatatattgtgtcattatatttgagttttccaaaatctcctgagcaagcatatttcctgtttccattaattctttacttgcggcaacttttattttcttattagttatcatatttgcacaggaaaaagttatataagcacacaatgcaacaataatcgcctttacaattacactaaacatataatcaggcgatttaaatttatacagttttattattccatgttttgtatgtttctgcacttttcctgtctccctttgtcccacttttaaaattatatgaaacaaggtcctgtaatattaattactattttaaaacattgcaaaacatatttattccacaggcaattattttgcttaagttatcaacaatttcatctatatcctttggagttacaaacatttgctctgtatcttccgacaaaagttcttcaaacaactgatatttttcatcagatgtgtagtctttaaatatatttgaaatgctattattttggttatgagaagcaagtatttccaaaagcttctccattgtgtcattaacaattgttgccccacttacaaccatgggaaccccaatggcaataaccttggtatttagagattgttcattcaacccttttctatgattgcctattcctgaaccgggagttatccctgtgtccgtaagctgtattgttgttgtaattcttcttacatttcttgctgcaagtgagtctattgcaataataatgtccggtttcatttgagccgttatgccttttactattgaaaaagtttccataccggtctgagccaatacccccggagccaaacagtacacattaggcaaaatttcaatctgctcggcaacttttggtcccaatgaatcaggcgtagcctttgaatttccaagacccactataaggattttttttatattttgattcttagtcatctcttccatatgatttgctatttcttttgcaaaaatattttgcctctccaaatcatcttccttaaaaagtcttgtttccattgtaacataacttcctataggctttcccatggactttgcgccattttcattaaatatttccacatctgttgttgtcataaataattctttattgtaatttttgtctatttttactccactaatttcaatatttcttttaaatcgttctctttcctctaatgccaaatccgtataaatgtttatttttttcataaagccccctgaaaactatatattcttaaagacgttatttgttattcataaaattcaattttttcttataaagccatccatcgtaaattctaaaaaataaagcgaagcactttatgctccgctttattaatatctacattattattaaatttattcaaactcaaaatatggctgaccttttttaagctttacacccttagcctctgccatttcagatacacttactatctgatatcctttcttctgaagctttggaatggcttctattgctgcatccactgaccagctatgaatgtcatgcataagaattatctgtccatcctttgcactgttcattatagatttaactgtttccttcttgcttttagtcttccagtccaatgtgtcaactgaccaacatacaataggcatcttagcagctttctgcacatcggcatctcttattcctgaaccatatggtggtcttaaaaatttaggattatatcctactgcctttttaaccaattcattaactccattaatctcgtatttacgtttactcttagataccttgtctagtgcacaatgattcattgtatgatttcccaagtcacatccaagagcatccattctcttaagtaatttatcaaccggaatatcagttctcttaaggctgtatccacacataaaaaatgaagctcttgcattatacttctctaacgcatccagtagctttcctgtatattgtcccggaccatcatcaaaagtcaacgcaatcataggcttgttaggatctattgctcttgtggtttcttcctgaactgtggtctcaactatggtcttcttaactatggtctgcttctggcttgtttccacatttcccgctgttggtactgattttttctttcccaaaatcatctttccggcaaaaactatgacaataataacccccaatattatggctattttttcatactgtctgtgcacttctttctttctttgtaatttctttagttcgtttttctctctcgttgtcatatttacctcactttctcagaactgcattatattacttatatttaagttttgcaatacttttttttattattttcgactttttataccactctattttcaccttatttttcccacttaatttttgcctcttttcttttaatcttatgtttattttttgcttgtgactactataaaataatgataaaatttagtcagcatattttgtgaggtgtaacgtgaaaactttagctaatgatattaaaaataaaagctttaaaaacgcatatcttttatgcggtgaagaagaatatttgaaacttaattataagaacaggctgattaaatccattgccggtgatgatacaatgaaccttggaatgtacgaaggcaaaaacattgacattaacgaagttatagacagtgcggaaactgttcctttttttgctgaatacagacttattgttatggaaaataccggtcttttcaaaagtggcggggagcagcttgccgagtatatgaagactattccttcaactactatttttctcttcgttgaaagcgatgtagacaagcgtagcaaaatgtacaaggctgtaaaatccgcaggttatatctgcgaaataaaccgacagactgaaaatgatattgcaatttgggctgcaagaatttttgattacaatggcaagaaaatcacaaaagccaatatgtcataccttattgccagcgttggcaccgacatggaagtcttatcaagagaaatcgaaaagcttattagctacgcactaaacaagaacgttatttctaaagaagacattgacgctgtttgcataaaacagcttaacgttagaatttttgatatgatggatgcaatttccgtaaagaatcaaaagaaaaccttggactgttattatgaattaattgcagaaaaagaacctcctatgagaatcctttttatgataagcagacagtttaatcttatgcttcaggctaaagacctttcatcccgcggaatgaaccgcgaacaagtggcacacacaatgggcgttcaaagttttatagccggcaaatgcatcaaccaatgccgtaatttctcaatggccgaactaaaatcagggctcgctgaaagcgtaaacaccgaatccctaattaaatcaggaatgatggacgaaaacataggggttgaaatgctgctggtaaaatatagtaagagaaactaaaaaagaagttgcagaaaactgcaacttcttttttattcacaattgtaattatgcaactgtgttaactaattttgttaatcttgaaatctttctagcaacgttgttcttgtggtagataccctttgaaccagccatttcgataagctttgtagctgcaactaaagctgtgttagctgcttccttatcgttagctgcaacagctgcttcaactttcttaatagctgtcttaactgctgacttaactgccttatttctttcgtactttgtctgattaactaaaattctcttttttgctgacttaatgtttgccattttgtccacctccgtgaaaaatctaattgtgatttccgttgagagagattggaaatcaagtttcaccatctgcgccattggaaatgcggacgtttgacgcagacactaaaaattattctagtaaaaaaaatatatattgtcaatattatttttttaattttcatttaattttttaccttatcgttatcccacctttttcatccgtcctatatatcaccccaccctgctttcgtaatctttccattgtttcatttccgggatgtccgtatgagttgtttttccccacagatattatgctgtactttggatttacttttttcagaaatttttctgagcttgaatagtttgaaccgtgatgtgccacttttaggactgtgtagttttcttctatatcatcttttattttctcttcaatttcctttgatatatctcctgtcagcagtatttttgaagttttatttttaacggaaagcactgtacagtagtcgtttttatccgatgctgttgttgtggtttccggatatatgcacttaattttcgttttgccaaggctcaatgcagctcctttttttatgtacaaaacattgattttttttaactgtgctttttcaatcagttcattgtaagtatcgtccttcatattaatgtctggcatcacaaggtttttaattcttattctgttggagttattattttctaaaatttccataataccgcttatatggtctttgtccgtatgggttattatggaatagtcgattgttcctatgccttcggcttttaagtatggaactatgcaattttttgccacctgtttttcagacgtacttcccccatctaccataactttcgttccattatctccatgtatcaatataccgtcaccctgtcccacgttaataaatgttatgtaaaaccccggatttggaatataatatatcaaacaatttagtagcaaaaatcctacaatacaagctaatcttagttttacattttgaccctttattcttctctcttttttagctttcctttccagtacaagtcctgtttctttttttattatgttcctttccttctcagcccttgtatacttagttcttatatttttaagtccaaacaaaaccacaagtaatattgcataataaactataattatagtcactttaggttgtcccaccactatacttgcaactgagcttttgttaattatgttacacagaaatgtgtaaagttccaatattccacagccgggaaatattacagcttttccaaagccaaacattatgtatgaacaaaatattcccgcaattgaagatacaattaccacgctcattaaaggcactacaactatgtttaacaaaaaagaaaatgttggcagttcataataattccacgccagtattggattcattaccaaacttattgtaaaattagcacttatgactttgattattttattatccgtgttcaaaatttcttcaactattggcaagataagcactatagctataattgccccgaaggacatttgaaatccactattacaaaccacaaaagggttctgaacaagtaacacaagtcctgcaagggatatggctgttatggcatcgtattttcgtccaagaacttcccctattatttttagtataaacattattattgccctaattgttgaaattccgaaacctgacattattccaaaactcaaaacaacaggtatggatactgctgctgaaaaaagaaatctgaatcttcttctaagcaatctgtaaattgccatgccgataaagctaatgtgtagcccgcttatggcgagtatatgtgctattcctgacaccgaatataactcctttatgtcactgtcaaggtcggttttgtccccaaggattattgcgccgattattccattcttattatttataatagaaaatatcccattattatcactgcaaagcttttccagtctttcgattatttccattctcaattcataaagtccctgtcttattccgctgtaatcactgtttattatttcaatggttcctgcttctatttttccataaaaacctaatgacagataatattttcttgaatcaaaatttcccttattggcagcttcttcaaactgtcttaactttccccttacttttataatatttcctatttttacattaggaatcttctctgtatttacaaatattcttttaacacttacgctcttttctccattctccacttctaaaccttttaaataaatatttgtacccaatgcagtattttctattttgtatatttttccctgtacaattacagtattttccttcaaatcatatatataattccgtgttgtaatttcgttactcattaacataaatcccataattaaagtaaaaaaaatcaccacaaaagcacccatatcttcatatgcttttatgatgatttttctaataactataattgccagcacaatgcatggcactgctatattcaagtcaaaaacagctattacctctccaagtacaaaagccagtaatatccaaaataccggtctttttataactgtcactccttttttatttatttttctgttcaaccaaatccaaatttcttataaaaggctctgccaataaaatatcgtcgtgatattttaaagctgaatcaccctctacacttatctgaaccttatgaatgttatcaagttccaataaagaatttacgattgagtatattacaagcttgttggaaaccgtactctgttccgttaagaaattgtctccaaaatccacataacatatgtttccggctgttgcaacacttataagctctgtgtcacttgtaagggtggctgtatattttcctttctgcgggcccttaataagttgctcaactataaactgctcttttgattttccactgtaagatgcattcttaagattgtattcctttaatttagtagctttcttattggcaaaatacaacttgaaatcatccttattcttatctgccaaatcccctcttaatcccgaaataaaatcagatgctttcattgccgttactgttttgtcgtctcctgtctgtccatatggtacaccccctattgtaaatgccacatagtcaacaccgtcaatctgattaagagtgcaaactactgctgtcctgcacaacacttccacctgtggatttaaaacattatagctttcgccaaaatccactgttaaaagtccatctgccaaagtataaccgttaactgttacagtgtccggaattgcttttttatcattgtccttaccattactttgcaatgccttaagtgcttcagaaatctgattttcagtttcgccttcctgaagtttgtaactttccgtaactaattttgtatttgctgtattaacataatacatctgaaagcctttttctgctttagttactgacttgtttccacagccccacaaagttgcaataagacttacaactaatattaaattaactatatttttgatagttcttttcatacctttcaatctccatttatgcaatgtacttaagaggtatacgtacagtaaatgttgtaccttctccctctttactgtgaatcttaatggaaccatggtgcttcataactatttccttagttatggccagaccaagacctgttcctcctgtctcccttgaacgtgccttgtcaactctaaagaatctttcaaaaactctgtcctgattttcttcagaaattccaattcctgtatctgttacttttaaataaaaatactggtggtctgaatttaatgatgccgtaacagttccatctgtattgttgtactttattgcattttcaactaagttagttgccacacttgcaaacttaagttcatctacgtctgcaataaccggtctgaaactttcaaatattaattcaatgtttttgctttcagctataggctttaatctcttaagaacagcttccaatatttcattaatattaactgatgaaatattaatttctgactctgatttttccattcttaccaatgccaaaaggtctgttattatgtcattttccctgtctatttcttttgaaatatcatgcaaaaattcctgatataattcttccggtaatccctgctgacctaaaagtgaatcagccaaaactttcattgacgtaataggtgtctttaattcatgtgacacattagatacaaattcctgtcttgatttttcctgcgtatttaatttgtttacaagctgacgaaattcgttacttatatccattacttcccggtaatctttttcttcttccatattgccctttgcaatttcttcaatggaaataccgattctcttaattggttttgtaaacataactgcgcataaccaacttgcaaataaagcaaaaatcaaaacaagtacatctgcaatggccacatttcttactatataatccttgtaatcaactgcatctgctgttgaataattgatgtataaagaacctataaccgtggttttagtctctccttcaccgtctgaaacagttgatgtaataggtattgcaaattctatgtaattatgactcttgctatcaacctgaacagtctcacccttaaaacttttaataacattttcagatatacatgtcttgcctttttcactgttattgctatccttaataataacatatcggctgtttacaacctggattcgacaattatattccttggctaactgttcaatctgggcatctacaatatcaatgttctcattggactggtccaaataattattgttaataatattattctttaacattgtattgttagccttaaagctgcctattctgttatttaaataattctttgttgttacgttaacaataaatatgcttgaagcaagagccggtataataatagcaagcataattactacaaaaactcttagcttcaagcttcttattggattaacaaattttgaaatcttattattattcatgtttctatccctggaaataatatcccataccccactttgtgtgaatatactccggtttagccgggttctcctctactttctctcttaatcttctaacgtttacatctacggttcttgcatcacccggatatttagagccccaaatcaaagttaaaagctgctctctaccgtatatctttcccggattttcagctaaaagtttcaaaatgtcaaactccttaactgttaatctaatttcacggtcctcaatataaagacgcttagcttcaatgtcaagtttaagctttcctgatgtaataacctttggttcctcaggttttgcaggagctttacgcttatttcttctgataatggctttaattcttgcctttacttccaatatattaaaaggctttgtaatataatcatctgctccatattcaaggcccaatatcttgtccatatcatcaccctttgcagtaagcattataataggcatgtcggaaaactctctaatctgctgacaaacctcatatcctgttaaaattggtagcatcaaatctaaaagaactatatcatattcagtttctttcgccttatcaacggcttcctgtccgtcataggcacaatcaacttcatagccttcctgttccaaactaaatttcagtccctttacaattaatttttcatcatcaactactaacgccttcattacataaacctttctacttaatcaacagttatcattttttcaatgtttgagtaaatggaatcacctattcccgacacgttttttatatcttccttagttttaaaatctccattctcctcacggtaggctataattgctttagctcttgtttctccaattcctgacaacgaagtaagaccctcaacatctgcagtgttaatgttaaccagattctccttaatgtcttcactatcatgtgtcttgtcattagtgccctggctgctattctggctatcattgcctgaatcagaattcccgtctaaattttcctctgagccattctgattctccttaagcttagcataatattccttctgggaaagtactacaatattctggccgtctttcaaaacttcagccatattaactccctgcttctgggctttcttagtaaaccctcctgccttctcaatagccataaaaaccctgtcgttactctttaaacaatacactcccggattgttaacctgaccactgacataaacataaatctcttccaaactttctgatggttcttcactgttctcaccggcttccacacgtgtagtctgactgttattttcagccttgtccgttaaagaaacctgagtatttttatccttacagcccgtaaaaaatactaaaaccgcaaccattgttaaaacaatgcatttctttgtattaatcattcaaactcctatccggagcttccccttgaacgcatatcataattgtacaaaattatgtttcagttagcaacactcatttttcacaaatttgtattaattttatctttcaaaaatgaaaatacctacaattgcaataattgcacccattaacttgctccactgaaaatcaaccttttcaactccaaacattccaaacacctctatcagatatgcaataataatctgggatattacaatcaaaagaactgcctttgcagggccaagtatgttcatactctttataactgtcaaagtaataaatgccccaatgacaccacccagcaacatatacttattttccatatgaaacatacccgacacattttgacgtcccgtaataaaccaagccaaaatacaaacgataaaagccgttagctgcacccatgaattggcagcccaaaggctactacttttcgtaacctgcgtgttaaaaacaccctgaacactcatcaaagctcctgaaatcaatgcaataataaatccccacatgtaaaaaacctccactattcacttagtaaggtattttttataaatatcgcacagaaattcccgttgcaaacacgttgattttcttatttttctccgccacctattgtaagacaaaaatctaaactcgcctacggctcagacagtagatttttgccttacgctatgctcgaaaaattgcgaaaatctgcctatcgtttgcaacgggaatttctgtgccatattaagtcaaaaaaaatacccaccaaatgtttatagtggatattttttacatatttgatttatttattcattgttttaaatattattgatattgttgtgccttccccaagggtgctgtcgatttggatttctgcctcgtgttgttctgctatgtgttttacaatggcgagcccaagtcctgtacctcctgttttctttgagcgggctttgtctactcggtagaatcgctcgaagattcggtttaaatcgtcttccggtattccaataccgtcatccttcacctgaagtattatgttgtcatcttttttgaatactgatgcccatacgtgtccttccggcttgttgtatcttatggcattatcgcaaaggttgtatataacctcctgtatcatttcctgatttgcctttattatacagtctttttctattatgtctgttgcgattgttatgttgtgcttttcggcattcatctgcaacatgtccacacagcttactacttcttcatttaagcttacgtttgttgttgacagctgatggtccataacatctaactgtgacaattcaattatgtcatttataagtgacaataatctgttggcacttttatgaatttcactggcaaaatgctggatatctccctcttttgccattcctgtttctatcagttctgcgtaacctgaaattgaagccaacggtgttttcaactcatgagatacgtttgccgtaaattcctgtcgcatttttgagcttttctttaatgctttatgctggctgtgaattttgtccataaacggctggatttcttcatatgtttccgttgccttatcatcttcaagatgttgtgccataagctctattggctttataagactttgtgccaaaagttttgccacaacaagacttactcctattgccaaaataagaactaccaaaaaaattgggaatatctgtgtgccaaactgccacaggtttcctgcttcttttgcaactcttattatttgaccgtggttcattttttcagcatagtagtatgtatttttttcaagtgtgcctgactctcttattgcacttccactacctgtctttaatgcctgtttaacttccggtctgtttccatgattgtccatggaaccaatgtctgcattactgtcatattcaacttttccgtcactgtctataactgtaattctcagattatctattttaggatcaaagtccttttctatatattcaagaactgcctccgttgtttttaaaatatgaacatgagtcttaagatcctccataacctgacttctgtatatattataaaaaattcctacacttgctatcattgttattattgtaaaaatcaccgagataatggtcattcttgtatatattttctttttcacttacttgtcctttctgtaattcattgtgtaacccacattccttacagtctgaataagatttcctttttcgcctatcttacgtcgtaatgttttaatgtgcatatcaagagtacgtgattcaccttcgtaatcaatcccccatactctgtcaagaatctggcttctctgaagaacgattcctgagttctgaattaacatttttaataactgatattccttgtatgttaattcagtctcttgtccatcaactaaaacctgatgcttagcatcatccattgttatgccatcaaaactgtaaatgtgacttccacctgaaacatttgctctccttaacaaagctttcactcttgaaattagttccataattccaaaaggctttgtcatataatcatctgctccctgatcaagcccttttaccttgtccatttcagaagtttttgcagtaaccattataaccggtaactttgccgtactctgctcagctctcacatcctttaacacagataatccgtctctgtcaggtaacattatatccataattatcaaatccggatgttcttttgtcaaggcattttcgaaatctgatgctgttgcaaaagcacttacctcatatcctgcatttttcaatgcaaactgttcaatttccgaaatattcttatcatcttctaaaatatagatttttcccatatgcgtttcctattttttttcaggtaagattgaataagcaatgtttacggcatgatctgctattctttctaacccaattactaaatcagtaaaaataagtccggcctcaattgagcaatcacctgctgccattctttcaacatgaccttcctgataatcaatctgcatctgatcaataatgtcttctaattcattaatcttatccatattagacttgtcattgttaacaaatgtttttactgattcatcaaaaatcttaattactttgttatacatttttacaagttctttttttccttcattagaaaagttgatttttttatttttctctttaaaagcgtcatccataatatttactgcatggtcgccaatacgttctacgtcaataacaacgtggaataaaccacctaatctttctctatccttaataggcataccatactggttagcttttaccatatattctgttattctatgacttaagaaatcaatgtacttctctcttttataaacatcatctgcagcacttctgtcattttcaagtaatgctcttgttgaaaattcaagattctctcttaccattaatgccatacgttcaatttcctgaacaatttcaaccatggctgttgatgaagatggtgcacctgaaactccaatgtattttaataccatttcgttttcatcatgttcttcatttccctttgaatgaataaccttctttgataattttacaagaagacctgaacatgggaataatataatagtctggaataccttgaataatgtgtctgcgttggcaacaaatctcttaaagtcacctgaaccgctaatacccataattccattaataatagtccggcttgcaaaagctaatattattgaaataacaacaagacctacaacgttaaacatgacgtggataaatgctgttctcttagcgtttctgttagcattcattgcagccataactgcaggtgtacatgaaccgatgtttgcacctaagataaagtataaacatgccaatggttcaacaagtcctgagcctgccaataataccaatacgctgactgttactgatgaactctgaacaataactgttaaaacaagtccaagcaaaactgctatgaaaggattgtccaaatattcaaaaatctttactaatgcctcatattccggtatctggccaagtgcccctgtcataaagttaattccaaggaataatgcaccgaaaccaaaaataaccgctgctatctttttaagtaatggtttctttccgaacattaatacggctgaaccaataaatataataaatggtgccactgccgtaagctttaatgatactaactgtgaagtaattgttgtaccgatgtttgcaccaaaagttaaccctactgatctttcaagtgttaaaatgcctgcatttacaaaacttacttccattacagttgttgcacctgaagactgaataaatgcagtaaataatgcaccaaatactactcctataaatttagttcttgtgcatttgtctaatacccctctaagtttttcacctgcggcctgctgaagactgtcactcatatatttcattccaaataaaaagagtgcaagaccactcaacaattctgttatcattgtgtacataactctaattaactcctaaatatctttttcattattttcgctgtcgcttctttacaataacaagcctaagtaaaatctacgtaaaaattttaacatagtttttacttttatactagataaatatcttttttttaatattatttcgatttattagtacttttccacaaaatttgcataaagatactgctaatttttttcagtttggttttaaatatacgcctctgtaatcctttggagaatttttgcttaatataatttccatatgaatttcttattaagaaaaaaaatgtgggacattttcttacatcccacactttttcttaacaaaatatttactcaattatttcgtattttttcattaattctttctgataagactcatcttctgctgacttttcaagctcatcatatttcttttctgacattaatactttgattaacttattaacctgaccggatccctgagcttttccttctgcaatgccttttctccaaccttcggcaagtcctctcttatactgtcggtccatttctgtgttatatgacatgtatattacctccaatgcctattttatccattgagttatcctatggacatctttttccataatcctatattataagcattgtgacaaaatttcaatcatttcatcaacattttcttttgttataacaagaggtggtaccattctaagcacatcacttcctgctgatataacaagaagtcctttatcaatggctttatttacagtgtctataacaggtgttgtaagaacaagtccctgcataagtcctttaccacgtcttgcaacaacattgtcgtactgttccactaatttgtccaactgttcttccaaataattgcttacttcattaacatgttcaagaatattcatttcttcaaacaaatcaaatacttttgaaactgctgctgttgccaatggatttccaccataagttgttccgtgatctcccggaactaatgaatcacagcacttctcccctgcaacaaatgctccaacaggaacaccacaacctaaagccttggctgttgtaataatatcaggtttaacattataatgctggaatgcatacatctttcctgttcttcccataccacactggatttcatcacaaatcattataatgtcattgtcatcacaaatctttctgattccttccataaattccttagttgccggataaattccaccttccccctgcacaggttcaacaataatagcacatgttttttcatttattaatgcctttacactgtctaagttattaaactctgcaaacttaattcctgaaatcattggcccaaaaggttcctgataatgtgagttacctgttaatgccaaagctcccattgttcttccgtggaaagaatgattcattgcaataacttcgtggtctgaatttttgtctctgtcataagcataacgcttagccatttttaatgcaccttcaatagcttctgcaccactgttagtaaagaatgctttcttaagtcctgatgcttccactaccttttttgctgcttcaatggcaggcacattataatacaaattagatgtgtgtataagtttgtcaatctgagcctttaacgcatcattatattctttatttccatatcctaatgcaaatacagctattcctgctgcaaagtctaaatatttctttccattaacatcataaagataaacaccttcacctttatctaatacgattttaaatctgttatatgtatgtataaggtactgttctccctggtccatatattctttatctgtcattttactttcctcacttttattaacgttttatttgtttaataagtcagtatagaatttttcctgttcgtcatctaaaattgctgtaccgacacctttatttgtaaagatttcaagaagaatactatgtggaatccttccgtcaagaatatgaactcttgatacaccattttttatagcatccatacagtttttaatttttggtaacattccgccggcaattataccatcttcaattaatttttctgcttctgaaactgtcatttctgaaataactgtactgctatcatctttatccatataaacaccctcagtatctgttaagaatgcaagtttttctgcttttactgcttctgcaattgcacttgcagcatcatcagcattaatattgtaaccatgataatcttcatctaatccaataggacaaacaattggtaaaaagtcatcttcaagtaattccaaaaggatatcttcatttacatgtgtaacttcgccaacatatccaatatcctggccttctgataattttttctttacagtgagaagtcttccgtctttaccactgatacctattgcacgtactcctaactgttcaactatctgaactaatttcttgtttacgctattaagtaccatttcagcagcctctaaagtatcttcgtcagttactctaagtccgttaatgaattgtgtttccattccaagtctgtcaatatgacggctgattgcttttccgcccccatgaacgattattggcttgaatcctactaatttaagaagtgtaatgtcctgaattacgcttttcataaagttttcgtcaagcattgcgcttccgccgtattttactacgatgatttttctgttgaatctttgtatgtaaggtagggcttcaattagcacgtctcctttttctatccatttgtccatgtccagctgctgctgttgtcccttcattatcattttcgtctctcctttcgatgttatctcacagaaaatttttgtcttgcaaacacgttgattttatcttgtttgctaatccaaaaattttctgtgagattattattgatttgcacaatatatgattttctttatttacgtaatgcattcgtattaagctgcgcttattcttcgtctacatagttaaattttatttttttccatcaatcccatatatgcatattgtgtcacaaaatgttgcatctacatatttttcttctttgttgcatttttctcttccattcctcactcattaatatataatgcccctttcaatttcttgtccttagcttctgtaatcagcattaatgcttacgtattcatgtgtcaaatcacatccccatgctgttgctgtgcaatcacccatttttacgtctgcaatggctgttacttcattttctgacaaaatctttgttgcctttgcttcgctgtagtctgtagccattccgttttctactattttaagtttgcctgctttgctttcaaaataaatatctactttttcaggttcaaacttggctgttgaatatcccattgcacaaaggattcttccccagttagcatcatgtccgtagattgctgcttttgtaaggcttgatgttacaattgacttagcaagtgttactgcctgttctttgctttctgcatttacgatttttacttcaaataaagctgttgctccttctccgtctcctgctattttcttagctaaaaattcatttactgcgtgaagtgcctctacgaatttgtaataatcttcgtttttctctgtaatttcagggttgtctgccaaaccattagctaataacaatactgtatcattagttgatgtgtcaccatctactgaaatcatattaaatgtatctttaatgtcaccacttaatgcttcgtataacattgactttgaaatttttacgtcagtcattataaaacctaacattgtacacatattaggatgaatcattcctgaacctttgcacattcctccgattgtgcatgtttttccgccaatttcaaattcaaaagctatttcctttggaattgtatctgttgtcataatggcttctgctgccaaatgaccaccatctaaactttcgtctaatgttggtgcaagtaactggattccttttgttattttgtccattggaagctgggctccaataacacctgttgaagctacaagtacctgtcttttttctatatctaatgctttagctgttgcttctgccatttgttcgcagtaatccattcctattttgcctgtacatgcgttggctacaccgctgttacatactactgcataaacataatctgatgtgtaaattgtatctctgtcccagattacgggggctgcttttacctgatttgttgtaaatgttcctgcggcaacacatggtgtgctgctatatatcattgccatatcttttttgtcttttttaattccggcttttaagcccatggctgcaaagccttttggagctgtaacgccacctttgatttttttcatggttaaattcctttcatttagttttttgctggttctatgttcagctcgattacgcactttgtgctccatcgggcgagcttttagttttttgctgcttttatgttcagctcgattacgtgcttcgcacttcatcgggtgagcttttagttttttgctggttctatgttcagctcgattacgtgcttcgcacttcatctcgctgtgtttatgtttgttattaccttgggaacgaagttttctttcaaaaggaactgtgttccttttgaaaccacagctactgctgtggttttgtacaaatagtaatgggcatccttgcaagcaagcttgcagatgcctatttctatttgtacagaaatcttctgtatttgtgttttatgggaacattggtacttgttgtaagccttcgttttccggtaatccaaacattatgttcatgttttgcactgcctggcctgctgctccttttaccaggttgtccatagctcccatcattattattcttcctgttctttcgtctactttgaagcttacgtccacaaaattgcttccttctacccatcttgtttcaggtggtgtgctattttcgagtactcttacaaagtattcgtctttgtagtatttgtcgtatactgcttttacttcttcatatgtcattggtttctttaatgtggcatatgatgttgcaaggattcctctctgcattggtattaagtgtggcgtaaagtttatcattacttcttcacctgctgcatagcttaactgttcttcgatttcaggtgtatgtctgtgtgttgcaacaccgtatgctttgcagttttcgtttacctcacagaataagttgtttacttttgctccacgtcctgctcctgatgttcctgacttagcatctattattattgattttggatctaccaatccttcttttaccattggatatattgataagaagctacatgttgggaagcatcccggatttgctattaatcttgcatcttttattttgtctctgtttacttcgcataatccatatactgcttcttctataaactgtgggctctggtgtttgattccataccacttttcatatgtagcaacatcttttattctaaagtctgcactcaaatctattatttttacttttttaagaatttcttcattaactaatgagccacataatccctgtggtgttgctgtaaatattacatctactgcgtcagctaattcttccatattgtcatccatgcattttgcatctactatctgaaacatatttttaaatacatctgcatatttttcatcaacgtagcttcttgaaccaaaccagactacttctgtctctttatgctgctgtattaatcttactatttctgctcctgcataaccagttgagcctataataccaactttaatcataactaacctctttcattattaatatgtaattctttttgggttaaatgttttgttattcaatccatctctttattttagtattttccttattaaaatacaacatttttatatgtgcattaataaatatacatcttttttgtatattatgcaagtaatttgcataaaaatacataataacacattttttccttgcattttatgcatatatgctgtatagtatcacgtgaaaagaaaaagtggatgcaatattccgctgtttattatatttatttttatggaggattttaaaatggcaaaggaaaaagttattcttgcttactcaggcggacttgatactactgctatcatcccttggttaaaggaaaattatgattatgatgtagtctgctgttgcgtagactgtggacagggaaatgaattagacggacttgaggaaagagctaagtattcaggtgctgctaaattatatatagaagatattactgatgaattttgtgatgattacattattccatgtgttcaggcaggtgctgtatatgaaaacaaatatcttttaggtacttctatggctcgtcctggaattgctaagaagttagttgaaattgcaagaaaagaaggtgctgttgccatttgtcatggtgctacaggaaaaggtaacgaccagattcgtttcgaactttctattaaagctcttgctcctgatattaagattatcgctccttggagagacagtaagtggaaattacagtcacgtgaagatgaaatcgaatattgcaagcagcatggcattgatcttccttttggaactgatcagagctacagccgtgaccgtaacctttggcacattagccatgaaggtcttgaacttgaagatccggctaatgaaccaaactacgaccaccttttagttttaggagtttctccagaaaaagctcctgatgaacctgaatatgttacaatgacatttgaaaagggtgttccaacatcagttaacggaaagaagatgaaagtttcagatattatccgtgaattaaacagacttggtggaaaacatggcataggtattattgatattgttgaaaaccgtgttgttggtatgaaatcacgtggtgtttatgaaactccgggtggaacaattcttatggaagctcacaagcagcttgaagaattagttcttgacagagctacaatggaaactaagaaggatatgggtaacaagttatcacagatagtttacgaaggaaaatggttcactcctctttgtgaagcagtttgcgctttcgttaaatcaacacaggaatatgttactggtgaagttaaattcaaactttacaaaggaaacattattaaggcaggaacaacttctccatattcattatatagcgaaagtcttgcatcatttacaactggcgaattatatgatcaccatgatgctgacggattcattacattattcggcttaccacttaaggttagagcaatgaagatgttagaattagaaaaaaataaaacaaatcaggaataattaatcaaaattaattaaatgattcttataaaaatatccggttattgatttttttcaacagtcggatattttttattttttacccctataattttcatgcacttttatcactttctatagttgtaatttctttacacccctacctttttatagtagaatatagatattaatgtaaagacggttagaaatcgtttttttattgtttatatttgaaaaatactaatgttgttgtatctatattctgaaggcaataacatttcagactttaaataaaagtacaaatttataaaggttattaatatgaaagattcaattataaagtttagaagttttttgttagcacatattaagaatccaagtttgcaaacacttattaaaggcttaataagttacgaaatgcttacttatgtttttttcggcattggtactgccattgttgactaccttgtatttactttttttaatgcaggtaaggtcagtgcccttattgccaatatcatctcaacattttgtgctatcattttttcttatgtcacaaataagcgatgggtattcaaaagtaagaccagcggttttatggaagttctacatgagtttttgcgctttgccagagcccgtatagctactttaataatgagcgaagttattatttttgcttcagttgctatttatggaaataaccagaaagtcaaccagatttcaaaacttatttctatggttcttacggttattttaaattatattatcagtaaattatttattttcaatgatagaaaggagcttattaatgaaaacaaatagtaaaaagttttctattaaggattggtttgaaaaaaataagttatatatacttgcttttgtattgcctattttatctatgttaatagtctactattttaagaatattttcccatttggtgaccaaatgtatcttcgaagtgactgttatcatcagtacacaccttatttagaaatacttcaacagaaacttaaagacgggggaagccttttttatacttgggaaatcggcgccggtatgaactttatggcggttgccgcttattatcttacaagtccccttaacctacttgccattatctggccgggttatatggctgatatggtaagttttttcatcgtattaaaaatgggacttgccggattttcagtatgctactatcttacaaaacgttttggtcagaaaaatatttcttccgtagttttcggtatggcatacgctttatcagcttattttgcagcatttagctggaacattatgtggcttgactgtatgtggttacttccatttattgttcttggtcttgaaaaattagttaacgaaaagaaatgcaaaatgtactgcatttcacttgcacttgcaattttctctaactattacattggcttaatgatttgcattttcagcattatttattttgtttacttattctgcattgttgaatttgatgaaactgttgaaaaaactaaagcaagacttcttattttaaaagactatgcaatttactcaatacttggtggtgctcttgcagcatgcgttatcttaccagagtatttttcattgttaactactaagtctgctgattcaagtttcccaacaactttggaagaaactgtttcaatgctttatatgattttcagatcattaatatgtgttcctgttgcagatttaaaatattatcctgaacctaatatttattgttcagtagctatttttatacttattccattattctggatgtgtaaaaaaattaatgttaaagaaagaattggcaaaaccgttattgccttgattatgcttttaagctttggtcttaacattcctgcatatatctggcacggattccattttcctaacagcttgccttgtagacagtctttcctttatattttccttattcttactatgtgctatgaggcatttctgtatattagggaatatgagccaaaacatattgcatgggctacaggcggttcagtagctttggtatttttacttgaccagttatttaaagacgcttctattttcagcgatttggaaattgagacaagcattgtaaagattatttactttagtcttttgtttatagttgtatatgcctgtcttattgtctggtataagaaagcacctaagcttaaacctttcctttcatatttgatgattctgattgtattctgtgaattaactttgaatatgaatgttacaggtattccaagtacatcaggaagaaaaggttactacgaagctactaaggcttacgaccagttaaatgatattactaagaaagatgcagattctcagaacgttaaatattacagaactgaatctgctgtccacactacaagaaatgatggtgcccgctttaattacaatagtatttcaacattttcatctgtattatctgcaaatattcaggattactttgattcaatgggattacagacttcatacaatgcatgttcatactatggtcatacaccacttacagcatcattgttctcaataaaatatgaatattcaacaggagagccatctctccctaataatgtatcattgcttaacagcgcttcttacaatttagaaagtggtggaaattcaactgtttatgcatatgaatataataacacattaccattaggcttcttaattaattcaagttcaattgcaaagatgaactctgaagccggtgatccatttacaatgcagaataactttgtaacttctgcagtaaacggcggacagatgattttccatagattaaagacagacggtactaattcaattactgctcagtataatcttgaagaaaatgatacagctaataagagcggcacaaaagtttatgatatatacttctattgcgaaacatctgctgaaactttaactgctactgtttctaacggaagcattcaggacaagtcttttgtttcaagcagtgttacaacttctacttcaaaaacttttgattctgctaaccagaattatatttgtcatcttggaaatgttcctgaaggtgcaacaattagcatttccgcaagtgataacacagccatctcagccatgtacgcttatgcatttgatgaaactgcctgggaatatgactacaatcttttaaatgctaatccttatcaggtaacatcatttagcgatacaaagattgaaggaacacttacaacagacaagggcaatttgttatacacttcaattccttatgacaaaggttggtctgtatatgttgacggacagaaagctaatacaacagctatatgcaagggtgctcttacaggtgtaatggttactgccggaacacaccagattacatttaaatatactcctagaggcttcttccagggaattataatttcaataatttcacttttaattctgttgggattaatatttagagaccgcatattagaattaatcacaggaaaaaagaaaggctcaaaagtaccttcaaaaaaaccacaggttcaaaaagctgtggcaaatgaggagccaaaagtttcaaaataagaacaataatatattgattatttgtaattaatattactaaaaaccacccgttagtgatatgatacctctaaagtagacagattaaatataaaatcctgttactttggaggtattttttatgtctagaaaagaaagatttactcctcaagaaaaagaacaagct

SEQ ID NO: 12688 - DNA, 920 bp, Unknown
  gut microbiota DNA sequence
gaaatccagactgttgcatgtggcctgataaggagctatcctcatggccacgtttttcgtgtaggcaaggactcctcctttgcttgccgcatactccggaaattcagaccctgtatgcccgcttgctgatccaatcataataacagaataaatattgggatgaatgccgtaatgttctgtaacagaaatcgtccctttcagatttacatcaatatcatcgccattctgaacccctgcattattgatcagaatatctaccggtccgatttccggataagagtttttgtctctgatatccagacagaaatgagtatatttcggatgttggattgaagatatatttttatcaaatccatagacttcatgattttctttcaggaaaaattctgcacagccttttccaatcccggatgctgtgcctgtgatcagaactttcatcaggcaaaattctccttcatgcttttacgtagcgctgtaataagaactgctgctactgcaatacacagaaccctgtcaatgtagtctgtgataaactgaactacaaaacagcttcctaccattccaagaggtgtttttgccagaagctgtacaagaacagtggatccggaagaagtgattcctccaaataaaaatgccgtaatacaggaactgattatagtagatggaagtgtgatcacaagagcagccggaaatatctgccactttttcggctggaattttctgtacacaagacctgtcacaaaaccaagaagaattcctactggagcataatacagggaataaatatctacagtcattcccatcagcagaccgctgagcagattaggcagcattccataaaagggtcccaggacagcagccacaaatacagttccaatactgtccagataaataggaagtttcagaaataaagcaatctg

SEQ ID NO: 12689 - DNA, 794 bp, Unknown
  gut microbiota DNA sequence
ctggacaagatattcgggaatacgttggtggcagaatattcggaagtcgtattgatatgcattgccgttcttatcctggtattggtcatttggtttgtgtacaagaagcgtccggaactgttcatgcgttcgcgcaagagtaccctgccctatacagtgggggaggataccatctatggagtggattttgcggaaagaattgccgatgcgcttgcccggacggattatcgggaggcggtgcgtttgctctatctgcagacgctgaaacagctcagcgatggaaaacgtatagactggcagttatataaaacgcctacacaatatatctatgaagtccgtctgccagctttccgccaaatgaccaaccattttctacgagtacgttacggaaattttgaagcgaccgaaactttgttccatgcgatgcgggatttgcagaaagaagtggagaaaggaggggcggcatgaaggggaaccattggtttatagccggtatcattgtttttctggtgttgatgtttgcgatagagtgccgtctgccaaagaagtttgtctggaaccctacgttcagccattatgacaagcaaccgttcggctgtgccgtgttcgatagcctgctgtcttcatcgttgccgaagggatattcgttgtcgagaaagactttttatgaactggagcaggaagatacgacgctccgccgcggaatactggttgttaccgataacctgcatttgacggatgtagatgtggaggcgatgttgaagatggcgggacggggagaccggattatgctg

SEQ ID NO: 12690 - DNA, 45334 bp, Unknown
  gut microbiota DNA sequence
atatggattgcatttgcagaagaaacaggaatccctgaacttaagagaacaacaagagatgagcctgattacgataagcttatgaattatagaattaacatcttaaaagagcacggattaggacttaaggaaattcaggaaacaattgcaaagattgatcctatgcctggtgcaaaagaatttttagatgaattaagagagattactcaggtaattattattagtgatacatttacacagtttgcaggacctttaatgaagaagttaggttatcctacaattttctgtaactcattggaagtagcagaagatggagaaatcacaggatttaagatgagaattgaaaactcaaaacttactacggtaaaggcattgcagtcaatcggatatgacacaattgccagcggcgacagccacaatgaccttggaatgattaaggcaagtaaggcaggatttttattcagaagcacagatgaaatcaagaaagaatatccagaacttcctgcttttgaaacatatgatgaattaatggctgcaatcaaggaagcattataatataagaaatttaaattaaatcagagtaataaagaactatgtttgatactggaaatttattgtagcatagttcttttttttgcatttatggaaaggatataaacatattatatttgaccgagctgaatgcaaggaatgcttcttgtccaaaggacaaggagatgtggactggagtgaagctaataaacatcgcgtaaaacttatatttgtaccatatacggtaattcttttttatatggtacagagttgttcaggtttgaactggaagaagctaatatctgtaccatatatgaaaattcttgctcgtatggtacagattttttctgatttgagctgggacaaacttatatttgtaccatatatgagatttcttgctcatatggtacagatttgttctgatttgagattgaacaagcttgtatttgtactatatatgaaatttgttgctcgtatggtacagatttgttctgatttgagattgaacaagctcgtatttgtaccatatgtaaaatttcttgcttgtatggtacagatttcttctgcgttaagcaggaacaagctaatatctgtaccatatttgaaatttcttgttcgtatggtacaaccttacctcacagaatatgagaactcggttctatgtggtagttacatattagtttgaatatgatgaatctttgtatctgccacataaaaagagaaaacttaatcatatggggcaattcatattattttcaataacaatgaatcttgaaatctaccccatagtatgcataaacttgcttctatggggtaattacctacttgaattgaattaaccttgtcttctaccaaactacataaactggaagtttaaatagtttcccaaaatcatagatattatgttatactgtttttagtgtagaaaagagggagtattgaaaaatcaataatttattctaatcaaattctaaatttgttaaaatctattatttatccccgaaaagttcgttgcaaaaagagttgtaagagttgcaaaaaagttgcatagagttgcgaaaattaaaagagttgcaatggttaccataggaaccccacaatgaaagtaaaagagggaatgtatatgaagaaaatattggaggcaattaagaatttcttttccgcatctcacgaaagggagcgaaaaggaatacaggcgactaagcatggaatgtttaacaatttcgtatatgcagtaaagctgacatggcagttaaacaatcagtttattatagcaatgattgtaatgggagtattgtcggcattgtatatgcttattggaatttatattccaaagattgtattggcattagtagaaaataaagttacaacagacacaatgattaaagtgttggtagcagtgggaattataattcttgtagtaaagcttattaacacaaaggctcaatatgtaggcgagtatgcctgggacaaggtatataaggggttagtttcaaaatatcttagaaaatcatttacaacagattttaaaaatatggaaaatccggatttccttgatttgattgaaagatcaaaacatgcaatgtataactatcagggaattagtggttactgtagaagaggaagtaatattctttcaaatattgtacttgtagttatagcaggtgcggcaatagcagtaattaatcctttgataattttggtgctggtagttatttcatattttatatataaaatccttgattcaacaatggagtggacgaaaataaattttagagatgcaatgtcatctaattttagaaaaaattattatttttcttcaacagcaagagattttaaatatgccaaagacataagattatttaaaatgcaggattttattgaacagacgtggaaagacataaatacagtttattatgcagcctgcaagaaaaatcacagaaaatgggtaatgtgcgaggcaaagatgagttttcttcgcctttttcagaatttattactatacgtagtattgatttatatggttttaaataagggaatgagcatttctgattttgttttatacataggtttggttgcatcattttccacagctatgacagatatgttctgcaatatggtttggatgaatatgaaccgaatggaacttgacgattttagaacatttatggactggaatgaggacaagcctgacattgaaaaaggccagggcgtaagtaagaatataggcttgaagcaatttgagtttaaatttgaaaacgtatcttttaaatatccgggacacgaaaaatatgttctaaagaatattaatctgactattgaagcgggaagcaagttggcggtagttggtattaacggcgcaggaaaaacaactttaacaaagcttcttatgagactttatgagccaacagagggaaggattcttcttaatggagttgatgtaaagaagtatgacagagatacatattttaaaatatttgcgcctgtgttccaaaacattgaaatttttgcttttccggtatggcagaatatttcaatgaagcctgaaaatgagacggacaaaaacagaacaatggaggctttggaaagaagtggtttggatgaaaagattaacaaatatgaaaacaaaatagacactatgcttcttagaatatttgaccctaacggtgttgatttgtcaggtggagaaagacaaagacttgctatggcaagggcgctttatcagaacagagaagttcttgttttggatgagccaacagcggcacttgacgcattggcagaagacagaatgtatcaggaatttaatcaaatggtaaagggaaagactgctatttttatttcacacagactttcaagtacaagattttgtgacaaaatagttatgtttgaagatggcagaattattgaagagggcactcatgaacagctaattaaagccaatggaaaatacagaaatatgttccaggttcaggctcaatattacaaagataaggagggtgaggtatgttaaacaaattttttggcggaataaaagatatttggttttgcacaaaatattttgcaaagtttgcatggaaacatcttcctatatattatttatacatattaatgtcagtcataatcagtacggcaggaccttttgtttcaattattggctcaaagtatttaattaacgagattgtatatgagcagaacagaaacatgaatatgataatattctgggttgcgttcatatgtattggtacatacattcacgtagtaggaaacaagtttgccaatgagaagcagaattattgtaacgaccagtttgacaggatgcttcatatggaaattagttctaatactatgaaaatgaagtttgaatacacggaaaattcagaaatgttagacagtataaataaagcaggacgtgcatttgagcagacaaatttaattcagggacttacagatggtatagtaggacttttaagtaatattttagtccttgctggtgttatttacatagtagttaaatgctctgtatggctgataattcctgtattgttaagcttcgtagttaacacatatataacaatgaaaacaacaaaaataaaggaacagtatttttcagaagctatggaaatggaccgtgttgttgattattatattgatgaacttacaacaggtgaatatgctaaggacattagaatatatcattcagacgatatgattatagacaaccagaaaaagcagagcaacggcatttataatctgtcaaagaaaagtgaaatgaaaatatggaataaggataaagccgcagtaacgacaacagaagtctgcgatattgtagtttatattattcttggcataaatactttgacagaaaagattacagtaggtgatttcagcagtttggtacaggctatacttaagtttacggaagcacttaatggtatttcaagaggcttgttggaattaaaatatacggcatcagttttgaaatattatattgattacatagaacaggcagcaatcgacagaaaatacgaagaaagcaaaaatgcagtagttcctaatattaataatggtgtttcaattgaatttaaaaatgtaagttttaaatatcctaacacagatgtttatattctaaaaaacataaatacaataattcattcaggagagcacttatcaatagtaggaaaaaacggtgcaggaaaaacaaccttcataaaattactttgcagactgtacgaagtaacggaaggagaaatacttgtaaatggagtgaatataaacgacatagaatactccaaatatcttgatttgctttcagtagtatttcaggattacaaacttatggcattttccataaaagacaacatagatatgggacaaaacaaatatccagatgttgagaataagataaatgaactatgtgaaatagtagaaatagacagttggattaactcattgaaagacaaacaaaatacaaatctatacaagatgtttgatgaatcgggaatagagccgtcaggcgggcaggcacaaaaacttgcaatagttcgtgccctgtacaaagactcaccaatagtagtacttgatgaaccaacagcagcactagatccaattgctgaatttgaagtatataacaacttcgataaactggtaggaggcaaaactgcagtctacatatcacatagactatcatcatgccgattctgtgacagaataatagtatttgatggtggtacaataatagaagacggaagccatgacaaactaatggaaaaccaaaaaggcttctattacaatatgtacaatacacaggcaaaacactaccaaaattaagaataaatattgtataataatcaatccgaattaaaagggcacgatgctaattagtttattgcaatatgctaatcagcattggagccctttttgcgttatgtaccccgacatttcaaaaaggctatttttcggggtacgaatttggcatttttatatgtcatatgcaagctatgagtgacatttttgactgcttgtaccccgctatttaaaaaaacttgattttctgggtacgaatttggcatttttatatgtcacaagcaagttatgagtgacatttttgactgctcgtaccccgctatttcaagttgcccgttttttttaggtacattcgcaaaactatcataccatcaaatcttattcatattgcatagcctagattgaatatcgttgacacataactaactttactgttaagatttataataagtttagaaattttttattagcaaacaataagtaaattaacgtgtttgcataaaaaaatctgaacttatttggaaaagtcagcgaaaaggagaaaaaaaaatgaatccattagatatgatgaaatttaaaggcatgtttgaaaagtttgtcacacgccatccaatgcttccaaaattttttgcaagaatccagccggaagtaaaagaaggcagtgtaatcgaactaactgttaccccacctgacggtgaaccattaaaggctaatattaaggtacaggctgaggatatggagctactgcaaatgataaaaaatatgcaacaaaaataaagaaaacgtaccataaatgtgttataatcaggggtatgaaggagagacaaagtgaaggatatagttaagagtacattgacaggaattatattagtattttgtgtagtgtttgccttgatgatacagaccaatgcagcagaatcagatttggataattcagataataacgatataagtcagactattaggaatgcaggagagttgcagaaagatgaaagtgtaactacaacactttcagagaaacatgggtgcgaatattataagataattatagacgaagagagcaaagttattatcaattataaatccaatgcaggacagtccacttttcagttatatgacaacgaattgtctcttataaaagaagaaaaagttaaaggcggaagatatcgaaaatcagttaagtatagcgaagagattactttaaagcccggtgtgtattacataaaagtattaactgaagatgaggagagcacaggaaagtataagagaatatattcaatatcttattcatttaataattacgtgaaaagcataaccgttacaggaaataagacggtttcagttaacaaaacaataagattgaaggctattgtaaaacctgacaatgcaactgcaaaagatattgagtgggaagtaagtaatacgggaagtgctgttattgatacaaacacaggaattttaagagcttataaaccgggaaaagttaatgtaatagctaagacaacagacggaagtggtgtaaaagcaacttttactgttataattaaaccatcaaaagtctcaaatttaaaaattaaacgtacaggcaggaagaaaattaaagtaagctggtacaatgtttataatgcatccggatatcagcttcaatatggtcgaagaaagtcaacttccagagcccaatatagaagaatttctgcaagaaagagtacaggaactttatcaaagataaaaaatagaaagaattattttgtaagggtaagagcatattataagtcagacaataagaattattatggtgactggagttcttacaaaaaaattaatataaagtaatagtaacatattttgtaggaggtaatgatatgggtacattgaaagggaaaacagcaattattacaggcggaggaagagcagtcttaagcgacggaagttgtggatctataggatatggtatagctacagcatatgccaaggaaggcgccaatcttgtaattacaggtagaaatgttaaaaagcttactgatgccaaggaagaattagaagaaaaatatggaattagggttcttccggtccaggcagacataagtgcaggtgctgataatgaagcattagctgaaagtgttgcaaagcaggcaatggaagcctttggaagaattgatgtgttaattaataatgcacaggcatctgcctcaggtgtaacattggcagaccatacaactgaacagtttgatttagcagtttactcaggattatatgcaacatttcattatatgaaggcatgctatccatatttgaaagaaactaaggggtcagttatcaactttgcatcaggtgcaggtttgtttggaaattatggccagtgcgcatatgcggcggctaaggaaggaatcagaggtttgacaagagttgcagcaacagaatggggaccggatggaattaatgttaacattgtttgcccactagcatggacagcacaacttgaaaactttgaaaaagcttatccggaagcatttaaggctaacgttaaaatgccacctatgggacattatggcgatgtagaaaaagaaatcggtcgtgtttgcgttcagcttgcttcaccggattttaaatttatgacaggcgaaacaataacattggaaggtggacttggacagcgtccgtaaaacatatcgtaaaaatataatttaaatgattatagaaaaactattttcataaggtaaatctgattacatagattgttcttttggaacatcgaagtcagattaaataaatgttatgaaaatagttttttctttgttaaaaatgtaacgaaaatgtaataagattattccaaaatgtagcctaaatgtagttaaaatatgacattaagaaacaatataaaaatattacaaaattacggaaaaaacagcttgaaaataaaacttttagtgctattatgtacatagcaaatatcacaatgacatcacatgatattacttgattaaaatatggggaaggttatctgatattttacgattgacataacgggataactaaggttatggaaaatgaagggagcacagaaagatgaaagagaagaacacaagaacgaaaaagatgacacagaaaataatgatttttctggtagtaatgatttgcgtaggaatgataagcgcagtaacgacgacagcagtaacaaatgacaaaacaccaactacaacaaatcaggcggaaaacaaaagtaacgtaacgaaaacaactgtaaacaaaaacaatacagatttaaacaataaagaaactgtaaacaaaaataacacagattcaaataataaaacaataaaagcaaaaagtaagaaacagaaaacccctgttgcaaaatttaaaactaaaaagggcaagacttattgcaagatatcaggcaaaaaaataaagaaccagttagttacagtaaagaataaaacatacctttttgataaaaaaggagtaatggttacaggttgggctaagtacaaaaaggattattattatttaggacgtactaatggaaagatggctaagaaatgtactgttgacggcattaaacttgacaaagccggaaaggctaagcagactgaccttagcgttgccaaaatcaaaacaatgatgagagcaagaaagcagttaaatgaattatgcaaatatacagatacaaagcagcagaaactaagaaaatgttttgactggattgcaaaacgtccatataagagatatagatttcttaaaaagatttataagcagaaaggttgggagtcaactttcgcagatgatatttttatccacggagatggttgttgtgtttcagagtcagcagcacttgctttccttgttcatgaggcaggatataagactgtttacgtggcacatgattcagaacatgcatgggttgaattaaacggaaaagtatatgacgctttatttgcaagagcaaaggattataacaagtactataatttatcgtataagaattacaattgtcatccggtagacaagagaaaaatctaataaaaacatagataagacgttaagaaatacagacaacgtttacgaggagcagatcatggtttttagttcggcaatattcctttttgtgtttttgcctattgtctgcgcattatattttatagtgccgggaataaaggggaagaatacattattgattatcgcaagcctaatattttatgcatttggagagccaatatatgtattattaatgattggttcaataatagctaattacatatttggtttgatggagggaagatttagtaaggctaataatatagcaggaaaaaagattgtcttaataatagcagttatttgtaatataggtgtgctgtgtgtgtttaaatacacagcatttatcttggaaaatattaattatgcaggaagacttaatataaagattccgggaattgccctgccaataggaatttcattttttacatttcaggcattgtcatatgtaattgatgtgtacagaaatcctgaaatggttcagaagaatctatttaacctgatgctttatgtatcattctttccgcaacttattgccggacctattatcagatacaatgaaatagcaaaacagattaacaacagaacaagcagtattgaaaaaacaactgaaggaattagcagatttataagaggtcttacaaagaagcttattattgcaaatgccacaggatatatggcggattcaatatttgcattaaagattaccgattataattttcttgtggcatgggttggagcaatagcttatacacttcagatttattatgattttagtggatattctgatatggcaataggaatggcaaaaatatttggctttgagtttaatgaaaactttaaccacccatacagcgcaaaaggaataaaggatttttggcgaagatggcatatttccctatcactttggtttagagaatatgtttacatacctttaggtggaaatcgaaaaggaaagtttagatgtgaattcaataagatgatagtatttcttctgacaggaatatggcacggagccaactggacgtttgtaatatggggattaatccacggagttgccaatgtaatagaagacacattgggcagtataattaaaataaaaaataacattataaaaaatattattacatggatagttgtggtttgcggatttgtaatgttcagggcagattcagtaggacttggtcttacgatgttaaaaacaatgtttaccggctttaatatggaagtaaagtcaatcagctttgtggcaggacttcttagtccatattatatatttgttataataatggcaattatttttgcatatccgttaagacagaagttggaaaatgccatttctaaaaagattggcagcaacataaatgaaacaataattcacatagcagatataggattactacttgtatgtattataagccttgcaacagcaacctataatccgtttatttattttagattttaagaggtgaccgaaatgaagaaaaaaatatttataataatatttttctgtttactgtgtctaccatctcttggaatgttattttttaaaacagatgtaagtgtggagcagagacaggtacagattttcccgtcaattaagacaggcggaaagttaaatgtaaagttttttgatcagttaaacgactatttttcagacaattttgcttttaggcagaatttaattgaagcagatgctataataaagaagaatgttttcagacaatcaggaaatgagaaagttatagttggcagtaaaggctatttgtttttcagtgaaacattagatgattatcttggacaaaatactttgtcaaaaagagaaatctattcctgtggaagagttttatctttattgcaggaaaatgtggaacagaacaacagacagtttctatttgtaatagcaccaaataagaactcgctttatcctgaatatatgccaaagcgatacataaaaacaagtgagcagaataattacagcttattacaggcagaaatgaaaaaagaaaatataaacacagttgatttaaagaaaatgttcattgattccggaaaagaagtgtatcacaagttggatagccattggaataatcagggagcggcaatgggctgtaatgccatacttaactatttaggaaaagaccactacgattatactaatgaaaggcacaccataaagaaaaacttttcaggggacttgtatggaatgttatttccaaaaggaaacaaaaaagatacaaatgtaatctacaataaaaaaagttcgtacaaagtaacttcaaacaacaaaaaagttacagatatatcaattgaaacagaaagcaaagacaaaaaagaatcaattgtaatgtaccgtgactcatttggaaatgcgttaataccgtttgtggcagatgaatttcacaatggctattttacaaaggcagttccatacaactggaatctgcaaaatgaaaaaaaagcagacaaagtagtaattgaacttgtagaaagacacatacattcacttatagaagaggcaccatatatggcagccccattaagagcaggtaacttaaacacaatggaagtaaacagcaacacaactgcagaaattggcgacgatgaagaatatgtaccaataagtggaaaagtggattcaaaatacatagatgacgatagcaaaatctatgtacgcctaaaaagtaaagacaatgaatacacatatgaagcatttccggcaccaatagacgtaacgtcaaaaaacgaaggatatgactacggcatgtacttagacacatcccaagtagaagcaggaacatacgacatagatgtaataacccagaaggataacaaatactattcttccggtgtaaaaacatcattagaactagaagaataaaaaacttaatatacgtcggtatatttcaaaacaagaaaatcaacgtgtttgcgttaaaaaatgttttggaatatggaataacgtatattaagttgttaaatattgtaagttaaggagataatagagaatgagaaagtattttatgattggaactgttatggcagccatggttttaacagtaggttgtggaaatggcaagaaggaagaggcaactacagctgtagcaactacggttgcagaaacaactgtgcaggagactactgtggaggaaacaactactgttgctgaaactacagctgtggaagaggctactacaaaggcaaaacagaaaacaaagaagaaggctgataagggtgaaacagccattatgaaaaaaaataaagaagaaacaacggagaaggtaacagagacggctactgaaaaggtaactaaaaaggttgaaaccacaactaagaaggctaagaaggttgtaaagaagagttctgaaaaggcaactaaggctaagtcaaatagcaatggtaagagtactgctaaaaagtatattggaaagaatatggatgagttagtagctgcaattggaaagtataagagtatggataaggataagagctgtcttgaagaaggtgagtatgatggcttcttctattatgatggttttacagtatctgctacaactaagaatggtcagtggattattaattcagtagattaattttcatattgatttatttacaaagatttgtttatatagatttattcatatatatatttatttacatagatttatcatagaataatattaaaataattacatattaagtaaaatagcacgtggaaattacctgcgtgttatttttttgtgcaaaataacaataaactcttgcaaaaaacgtttttatttgtttagatatattatggaatcaaagggtattgtactacctatgtttgaataatggtggacgaagaccttggaacgtataattaaaattaaggagaatgatatgaagaagagtttattgacaaaggctttattgacattttctgtcattggaacggtatttgcttttagtaatactgttaaagcagcagacaattatgaattggtttggtcagatgagtttaatggtaattctcttgacactaacacatggaactatgaaataggaacaggaagctggggctggggtaataacgaacagcagtattatactgacagaaatattacggtaagtaatggtactatgaagattacagccaagcgtgaagactatggcagaatgaaatatacatcttcaagaattacaacaaagaataagaagaacttcaaatatggaaagattgaagcgagaattaaaatgccaaagtttaaaggtgtttggcctgcgttttggatgcttggagcaaatcaggattctgtaggttggcctaaatgtggtgaaatagacattatggaagcaatcaatgatgaaaatcttgtatatggaacattgcattggtttaatgatccgggaaataataacgcagattcaggaagttcagtagcagtggctgacagaacagaatatcatgtatatggagttgaatggacagcagacaagttaagatggtatgtggatggcaaagtttatagaacgatggatgtttcaaacgactcatttagcgaggtaagaaaggaatactttgttatctttaatatggcaattggcggtcagtggccgggatatgacattgatgaaacagctttcccggcaacaatggaagttgactgggttagagcatataagaaagttgaagaaacaacaactaagtatacgggaccgatgattactgtaacagaagatgctgttgaaacatgtagtggaaaatggggttcttatttcggttctgactgggcaggggcttcaggtacatcaaaacctacagacaaagcagtaacaggcgcaacaatgaacattacatcaataggtaattcacagtggggagttcagcagtacttaaaaggattacattactatccgggcagaacatataactatagttttacaatgacatctgatgtggataagagggtttttgtaaaagtagccggagatggcgacgaacaaatatttggtgaatatattgacttaaaagccagagtgccttataacttctcaagacaagtaactttggcagaagatatggaaggcgttcttgacttatactttggaatgggaaagtgtgatggtgatgcagcagcaactaattcagcagcaaacattactttatctaatgtatcatttaagacaacaacacagattcctgatcctaattataataacggagaaagcacaacaaataaaccaacactaccaagtgaagaaaagacaacaactaataatggagtgacaacaactaataacggactgacaacaacgggtaatggagtgacaactacatctaaggttgtagtaagcagaccgggaaaagtaagcgtaaaaaaggtagtacgttcaaagaacaacagaaatattaagataaatattaaaaaggtaaaaggtgttacaggctatcagataaaatattcaacaaacaaaaagctgaaaaaggctaaaacagtaacaacaaaatctgtaaaaaagactttgaagaagcttaagaagaaaacttattatattaaggtacgtgcatatgtagttaagtcaggcaatgtgaaagtaacaggtgattggagtaaaattaagaaagttaaagtaagaaaatagtaaaaataatagaaaaattaaattaggaagaattgaatttttgagggtctggcaatgtcagaccctttttttgaatgattgtgcaaaagtgtgaataaaatttgaaaatttgttgacatatttggaaataaatgctaaactagttttaacagttgggagaacgttattatggattgttactatttcgttaggcaagaccggatttcgcagatcaagtttttttgcggggccaggtctattttttttacaaaaacaattttatgaaaaaaggcaaatgatttagtaaagctattatatgatatagataataaaataggaaaaattatgataataaacaaagtaataaacaataatgtgttaagtacccatgacgaaaacaatagggagattgttcttatggggaaaggaataggatttcaaaagaaggttggagacgaagtagctgaggataagattgaaaagaaattcgttttggatagtgaagatgaagttggtaagtttagtgaattgattgaaatgattccacataattatttgaatctttctgtagacattatttcatatgcacagcaggttatgtctaaaagattaagtccaagtatatatatttcattgacggatcatattaatttcttacttgaacggtcaaccaaaggagaattatttgaaaatcctttatttaatgagattaagagcttttatcctagtgaatatttggttggtgaaaaggcactggaacttattgaaagtgaggcaggaataaaattgccacaagatgaagctgcatctatagcacttcattttgtaattgcagagtacaatatgggaatgagtgatacagttaatgctacaacaatgattagggaatgtatcagtattgttgaaaaagaattaggtataaaacttgatgaattaggtttacactgctcaaggtttataacacatttgaaattctttgcacaacgtatgtttgccggagaattgttggacaatcaggatcaggaatttttagatatgattattaataagtatcctaaggaatatgatataagtgagaaaataagtcagtttgtacaaagtaaatatggatatgatattcctaaagaggaaaaagtatatttggcagtttacattaaacgtattcagccacatattgaaatataagcgataggaggattattaaatgtttgattttttgaaaaaaaaagtggtagcacctgatgatgttttggtagcaccaataaaaggaatggctgttccaagttcaagtattaacgatccaacatttggtcaggaaatgttaggaaaaggaatggcaattgagcctagtgaagggaaactatattccccaatagacggaagcgtggcagtagttattgatacaaagcatgctctaagtattgtttcagataatggagcagaaatattaatgcatgtaggccttgatactgtaaaattaaaaggaaagtattttacacctaaagttagtgtaggagacaaggttaaaaaaggagatttgattttagagtttgatattgatgcacttaaaggtgaaggatttgatgtaattacccctattataatctgcaattcggacatctataaagaagtgaaaacaaatgttggtcaagaagttaatgtgggtgacacaataattgaacttacaaaataaagtaaataaagtcctaaaagacgggattttaaaaataatattataataatgagaaaggaggatgtttttatgatgaaatatcttcaaaaattaggtaaagcattaatgcttccagtagccgtacttccaatatgtgggcttttaatgggtattggctacgcattatgtcctgcagcaatgcagggtggtgatatcaaaggacttattcctttgattggtttatttttggttaaggccggtgctgctttaattgataatatggcacttttatttgtaatcggtgttggtgttggtttatccaaggataatgatggtacaggtggtgttgcagcattagcatcatggctaatgataacaacattattaaacacaggatttgttacaactattatgccggcaattgctgaaaatgctaataagacattggcatttgacaagattgtaaacccatttatcggtatcttggcaggtattattggttcaacatgctataacaagtttaaagatactaaattacctgattggttatcattcttcagtggtaagagatgtgtagcaattgttgcaggagttgtttcaattcttgtatcagtagtattattatttgtatggccattagtattcggtgtacttattgctttaggtgaaggaatcgttaaattaggtggtgttggagcaggtttatatgcattctttaacagattgttaattccaacaggattacatcacgcacttaacaatgtattctggttcgatacaatcggacttggtgatttaacaaacttctggggtggtaagacttcagcagatgtaagctggtcacttggtatgtatatgtcaggtttcttcccatgtatgatgtttggtgttccgggtgcagctttagcaatgcttcactgtgcaaaggataataagaagaaagtagcagcaggtcttttactttcagcagcaatttgtgcattcgtatgtggtgttacagaaccatttgaatttggttttatgttcttagcacctgtactttacttaatttatgctatcctttacggtatctttacagtaattacatattatgtaggatttagagcaggattctcattctcagcaggttgtacagacttagtattctcatcaacacttcctgcagcatcaaagacatggttaatcattcctttgggaattgcagcatttatagtattctatgtagtattcagatttgcaattacaaagtttgaccttaagacaccaggtcgtgaagatgacgatgttgaagctgaaaaacaggcagaacttggaaataatgattatacacaggttgcttctattatattagaaggtatcggtggaaaagaaaatgttgttgaaattgataactgcattacaagacttcgtctcgaagtaaaagataatacaatcgtagatgaaaagaagattaaatcagcaggcgtagcaggggttctcagaccgggcaagaataatgttcaggttattattggaacaaaagtacagtttgtagctgatgaatttaagaaactttgcaaataaaagtaaataattaaagtttaaggggtgtcatttaggcatccctttgactttaataagacaattttttaacaaaaataaaacttataagatagacacagggaggatgaaatgtttaaagtagtaagagagcatccaaaggttttttgggcagtaataattataataatcgtggtaagcatactgtctgtttatgagaaacagaaatataaggctaatccgtatgaaaagcagataggaaatcctccgagagaaaataaagtatttgatgataacttttattatgaaaagcttactgataatgaaaaaaaagcatatgaaaaaataaaggatgcaatagttaattttaaaggtggagaacttacatttgacagtccattgaatggaaaagaatactcaagagttactcaggcattgtattgtggtgaggatgatttgttttacgcaattgtaaatgtgccaatgacagaaaataatcaaagcgtaagctcagtaacaaaaaatattacggatataaaagaacagacaatagtaaaatgcattattttattgtatcctgcagagggaatcaatgaacagggtgatatagacgatcagggatacgtaaaaaatctggaagatttaaaaaatccattggcaaccatgaatgaagataaaaagtcgacggttttgaaaatgcagcaggcgtcagaagaaatacttaataaggtagttagtgatatgcctaaggaatatgggaaaaagcaggcaatcgattattttctggattggatggataagaatctgattttagatagtgatacaatggaaaacacggataaactttcaaatatgacagaggttttcgaaaaaaattattttgaaggctgcacttcatgtgtagtagagggtaaggctgtagctacaggatattcaaaggtattaaccaggttgtgtaataaggccggaatttctgctcatatgactattggaagttggaaatattcaggaagctatacattagtaaatgtggattttgaaggaaaacaggtctatattgatgcgtccggatgcaagaaggatgacctttggaatcagagatatattagtgatactttaatggcaagaaatatgactatatcagatttgtttaatgatgaaaaataatatagttaatataaaaataatggtaatggaaagtggattataaaaattcataagaggtgttagatatgaagatttatgttggtgaagattataaagagatgagcagaaaggcagcaaatattatgtcagcccagattattttaaaaccggatagcgtaattggtcttgcaacaggctcaacacccattggcatatatgatcaacttgtaaaatggtacgaaaagggtgatttggatttttcgaatgtagtttcaattaatctggatgaatataaaggtttatcaggagacaatgatcaaagctatagatattttatgaataagcatttgtttgacagaattaacattgataagaataaaacatatgtaccggatggtcttgaacaggattcttataaggcatgtcagcagtataataatattattgaaaagtcaggcggaattgatatgcagcttttgggacttggacataatggtcatataggatttaatgaaccgggtgaggcttttgaaaaggaaacacattgtgttaatctgacaaagagtactattgaagcaaataaaaggttttttgaaagagaagaggatgttccaaagcaggcatacacaatgggaataaaatcaataatgcaggcaaagaagattttgatagttgtttcaggaaagggaaaggctgacatagtaaagaaagcattctttggaccggttacaccggaggttccggcttcagtattacagcttcataatgatgttacattagttggagacagagatgcattgtgtgaaatattatagagattgaaattcgaaaaagtagtttagctgtgtaatgcgtagggcattgcttacagaaacacatatattgaggtaataaagatgattattaagaacggattagtatttaacgaagaaggaagatttgaggaaaaagatgtattcatagatggtgatagaatttctacagaagctacaggtgaggtcattgatgccaagggcttgtatgttataccgggattaacagatattcacttccatgcatgtgtaggctatgacttttgtgatggaacccaggaagctatttcaaaaatggcacgctatgaattggaaaacggaattactacaatttgtcctgcgtctatgactttttctgaggaaaagcttgagcagattttcgaaacagctaaggaatatgatggaaaggacggagcagagcttgttggtattaatatggagggaccttttatttcaatggagaaaaagggagcccaaaatcctgaattcattcacaaacctgatgctgaaatgttttatagattacaggaaaaagcaggagggttaattaagcttgttgatattgcaccggaagttgatggtgctattgactgtatcaaaaaaataaaggatgatgtaagagtatcagttgcacatactgccgcaacatacgaccaggccaaagaagcttttgataacggagcaaagcatgttacccacttatataatggaatgaatgcatttcaccatagaaatcctggagtaattggtgcagcctgtgataatgagaatgtaacagtagagttaatagtggacggtgttcacagtcatccttctacagtaagaactacatttaagatgtttggcgatgatagaataattatgataagtgatagcatgatggcatgtggacttgacgatggtcagtatactcttggcggattagacgttacggtaaagggcaatgtggctacacttacgggagaaggaaatatagcaggttcagttaccaatctgatgaactgtgtaagaacagccgttaaaaaaatggaaattccacttgaaagtgccattaaatgtgcagcggttaatccggcaaaggctataggtatatatgacagattcggaagtattgcccctggcaaagtagccaatattgtacttttagataaggatttaaatataaaatccataataaaagatggaaacattatataaaagcatttcaaaaagttgaataatttattataatagagccagttattgtttttagattaaaagagctaaaaaaaatgccggctcttttgtattctaaaaggaaaatcagaaaaaatatggttgttacggaaaacgatattaatgaaggcaataataataccagtgaggtcaaaagatttaaaattttaattattgacgattctgagaaaaatcgcggagaattaacagaaatgctggagagagaattcgatgtgattaatgcttctgatgcaaagcaggggatagaaatgattaataaatacggagaggatattgcattgctgcttcttgaagttaaaatttgtggaatgagcggatttgaggttttaacttatatgaagcatagtgggattacagaaaatattccggtaataatgatttcagatgaaaagtcagagtcatttattagaagggcttatgatcttggagcagttgattatattggaagaccttttgattttcaaacagtatatacaagagttcttaatactattaagctttatgcaaaacaacgccgtttggaaaagcttgttgccaggaatatggttgaaaaagagaaaaataacagaatgttaataggcgtgctggaacaggttattgaatatagaaatggtgaaagtggaattcatgtatcacacattaaaattttaactgaaatgttattggacaagctaatgcagaaaacggacaagtataatcttagctggtcacagagaatgatgattataacatcctctgctcttcatgacataggaaaggtaggaattgaagaaaaaataataaacaaaacggagaagctaacagaagaagaaagcaatgaaatgaaaatgcacacattaattggtgcaggcatgatagaaaatcttgatgagtataaggatgaggagcttatgcaaattgcctatggaatatgtaggggacatcatgaaagatatgatggcaaaggatatcctgacggacttaaaggagatgatatacctataggtgcacaggttgttgcactggcagatgaatatgacagattggttatgggcagacctaataagaagtcagtaagccatgaacaggcagttaatatgataaaggatagggaatgcggaaagtttaatcctatcctggttgagtgtttcttagaaataagtgatgaaataaaagcaaggttacagtaacgaagataggggggaaaaatgagtgatttttggttaataataaatgttattttagatgcttttccgtggattttccttttatatatgccttttaaggacaggttgagattttcccggattacaacagtacttgcaaattttgtggtgctaacactttattatatttcattcaaaagaataatcggagaagatttttacaatcttgatattatgctggcatatcgtatggtgcagatatttgttgttttgatattatgtatctattttataaatgattttatacagaaagttttgtttgtgtttggccaactattaccaataagtgtttttgttttggtatgggcaagtcacacaaataactatataacaattaagcagtcagcaacgtatctggatacagcagttttaagaataataatatcatgtgtatgctttccttttatgtatatattgtggaagaaatatattgtgcctgtggtaaaaacagataataagcgacagtggaaatatggttggataattccaatgattttttcaatagtaagtctgtcttattgtgagaacaattttgaaataacttatatgcatcttcatcaggttcttgcaaggcttacgttaagtataggtgttgtaattgttagtgtgatgcagtttagggccgtgagaacagaagaaagctttgtaagagcagaagaaaaggctaagcgcagcagaatgttaattgaaatgcaggcagagcaatataatatgattactgaaaaaatagaaaaaaccagaaaaagcagacatgacatacatcatcatattaatgttgtttatcagttagcaaaggaaaataaaatagagcagttaatagaatatttggaagaatataataagattgattctacaaaagagccaatggtttattgtaataacagcacagttgatgcaattttgaatcattatattttgctggcaaaagataatggaatagaggtacagttaaatgtggcattaccagaagaattaaagatacgtgatacagacttatgtattgtaataggaaatcttctggaaaatgccattgaagcaagcaaaaaagaagaaaataaaagaataaaattaagaataaacagaagtaatgagtatatatgtatgttagtttcgaacttgtacaatggagaaattaagaaaggtcattcgggttattattcgagaaaacgggagtttaaagatacaggaataggtctgtcttcggttagtgccgtagttgaaaaatatgatggcagaatggaagtagaccataccaatggagagttcaatgtttttattatgatggcaaacattagcagtaatttaacataaaaaaccattaatttttttgtaaaaaattcacaaagtatagacgaaaaaagcataatcacaagaataagaattagacatatgtataatgaaaatgtgtaaaaaatatacaaaatacactaaaaaaagtatctttataatcttaaaaatgtgaaatatagccaatatacataattgacaaattgacaaaaaatcataattagtaaaaaaaagactaccattatttggagaaagtagtataattgcgaattgtgagagatatttgacaataattgcataggcaatgacatatacacaagggagtggagttacggtcggatgaagggctgtgacatctgctcttttatactatatgagaaaaaatattatagtaaatataataaaaaaagtatggtatttgtacataatatatgttagtgcaggcaattaacagccaaaggttctacactgagaaatcaattttcaaggtaacatgtttaagtgtaagatgcgaagtaattcgtgcgattaaaacttggatgtttgatatccgataaataagtcagacacgtaaatatgttcaatactaagagaggaggttcaaaaatgggaaatctgtcagaggaattaatggcagaattaaattgtgagacagcatttacaattccgatttttggaggaattccggttgccgaatctgtcgtggtcacgtggattattatggcagtattaattgtggcagcgttcttccttggaagaaatttaaaggtagaaaacgttggaaaaagacaactggttgtggaaactgttatcggaggattacacaatttcttctacgatatgttaggagaggcaggaaagagatacattccttatatgatgacagttggaatttatattgcaatctcaaacatgattggtctgtttggactgaaatcaccaactaaagatgtaggtgtaacaggagcgttggcactgatgagtattattcttgtagaatatgcaggaatacatcagaaaggtgtaaagggatttttgaaaagctttgcagagccgataataataatgcttcctatgaacatattggaagtgtttatcagaccactgtcgttgtgtatgcgtttatttggtaatattttaggcgcattcgttattatggaacttattaaaatcgtagcgccggttttggttccggttccattaagtttgtattttgatttatttgatggttttatacaggcatatgtgtttgtatttttaacatcgctatttattaaagaaagtatagagtaaaaggagataaatattatgacatcattagtagcaattggagcaggtttagcagcattaacaggtattggagcaggtgtaggtattggtattgcaacatcaaaggcaacagatgcaatcgcaagacagccggaagcagaaggaaagattactaaggcattattacttggttgtgcccttgcagaaggtactgcaattttcggtatggttgtagctattttaattattttattcttaggataagaaaggatttggtagagaatgcagttattaagaatagattggaacgttgtatttaccatcatcaatctaattgtactttaccttgcacttagaaagtttttaatcaaaccggtaactaatattatggaacagcgtaagcagatgattgaaggagagattgctgatgcccgaaaagaaaaggataaagcgtatgacttgaaagctcagtatgaagataagcttacacaggcacataaggaatcttcagaaatcatcgagaaagctagaaagagtgcgcagactgaatataataacaaggtttctgtggcaagtgcagaggcagacagaattataaaggatgcacataaagctgtagaactggatagagaaaagacagtacaggatttacagtcagagattgcaggacttgctgttgcagcagcagaaaaagtattgggtgaatccggtacaaaggaaagcaatcagttaatgtatgatcagtttttggctaaagcaggtggtgtaaatgacacagacagcgaataattatggagaagttctttttgaattaggcataaagaaagatacagttgaagagagtaaaagaattttttctttgacagagcagttgcatagaactttggaaagtcccattatttcaaagaatgaaaaatattctattatagaaaaagtttttccaaaagaaatagagaattttttaaaggttgtatgtgaccatgaaaaaatgtcttatatagatgagattatagaagcttactataagaaatataatgaagcaaacaacattttaacagctacattatcttacgtagtagagccaaatgaaaatcagttaagtcagattaaaaattatcttgcaaagaagtacaataaagagacggttgaaattacaatgattgagcagcctgaacttattggaggctttgttttgaaagttggagatattgaagaggacaacagcattagaggaagacttaacaggttagagaaaaaactaacatggaggtgataacgtgggttccattaattcggaagaaattatttctatccttaaaacagagatagaaaactacgatacagtatgtaaagacaaggaagttggaacagtcatctgggttggtgacggaatagcaacagtttatggtattgaacatgctatgtatggagaaatcgttatttttgaaaatggtgttaagggaatggtacaggacattaagcgtgaccaggttggatgtattattttcggtaaagacactgagataaaagaaggtacaaaagtaacaagaacaaagaaaaaagcaggaattcctgtaggtgatgcttttcttggaagaatagttaatgcattgggagcacctattgatggaaagggtgaaattaaggcagatgactatagagccattgaacaggaagccccgggtattgttgacagacagtcagtaaatcagcctatggaaacaggtattttggcaatagactcaatgcttcctattggtagaggacagagagaattaattatcggcgatagacagacaggtaagacttcaatagcaattgatacaattcttaaccagaaaggtaaagatgttatttgtatttatgtagccataggtcagaaagcatctacagttgccaaattagtaaacacattaaagaagcatggtgcaatggattattcaattgttttatcatcaacagcaagtgaatcagcatcattgcagtatatagcaccatatgcaggtacagcattagctgaatattttatgtacaaaggcaaagatgtacttattgtatatgatgatctttcaaaacacgcagtagcttatagagcgctttcacttttgttagagcgttctcctggacgtgaagcttatcctggtgacgtattctatttacattcaagattgttagagcgttcaagtaagttaagtgatgaattaggtggaggttcaattacagcacttcctattattgaaacgcaggatggtgatgtatctgcctatattccgactaacgttatttctattacagatggtcagattttccttgaaagtgacttattcttctcaggtatgcgtccggctattaacgttggtatttctgtatcccgtgtaggtggtgcggcacagactaaggctatgaaaaaagcggcaggaactattcgtattgatttggcacagtaccgtgaaatggaagtgttcacacagtttagttctgacttagatgatacaactaaggaacagttacagtatggtaaaggacttatggaattattaaagcagccactttgtaatccgatgagtcttgctgaacaggttatcacattggttgcagcaacaaaccgtatattcttagatgtagatgtcaagaaaactaaggaagtacagctgggaatgttagacttctttaaggcagaacatgaggatattgttgatgaaattaatgaaaagaaagttcttgatgatgcacttacagaaagaatagttgaagcagctaaagaatataagagcagaatttagaagcaggtgatagataatggcaaatactaaggaaattcagaaacgaatgaaaagtatccaggatacgatgaagattacaaatgccatgtatatgatttcttctgcaaagcttagaagtgcaaaacagaaacttgaagacacagagccttacttctatgaattacagtcggcaattgcgagacttcttcgtcatttgcctgatgcaagaagtaagtattttgaccctcattccaatattcctgatgaggaaaagaagagaggttatatagttattactgctgataaaggtttagccggagcatataaccacaatgttattaagatggctaatgaactttttaagcagggaaaaaataataagctctttgtagttggagagcttggtcgtcagttttttgcaaaagagggtatggaggttgattcagaatttaaatatacagttcagaatccatcacttcatagagcccgtgtaattgcagagagagttttggagttatataacaaaagagaattagatgaaatctatgttatatacacaaaaatggaaaattctgtatctatggttacggaaaaaatgcgtttgcttccatgttacagagaacagtttgaaaagaacagacctcctatagatatgtatcaggaagaaatcaagacagatacatcagtaaaggaagttctggagcatattgttccaaactgtgtaacaggtttcatttacggagcattagttgaatcatttgcaagtgaacatagctcacgtatgatggcaatgcaggcggcaacagatagtgcaaaagatatgttgcaacagttgtcgattgaatataatcgtgtgcgtcagtcagccattactcagcagattactgagattattggtggtgctaaggcacagaagaagaaataggaaggaatcgaaaccatatgttaaaaggaaagattgtacaggttatgggacctgtagtggatgtagaatttgcagacaacaaccttccatatattaaagatgcgcttgaagtagataacaatggaaagcgttgtgtaatggaggttgcgcaacacataggaaataatacagtaagatgtattatgcttgcagcaagtgaaggtcttcataaaggtatggaagttgttgcaacaggaagtggtatatctgttcctgtaggtgaaaagactcttggaagattatttaatgttcttggagatactttagataatggagaaaaattagatggtgaacagcattggtgtatacacagagatccaccatcatttgaagaccagagccctgttgtagaagttcttgaaacaggtattaaggttattgaccttttggcaccttatgcaaaaggtggtaaaatcggtcttttcggtggtgccggtgtaggtaaaacagtacttattcaggaattgattacaaacattgcaacacagcatggtggatattcaatattcacaggtgttggtgaacgttcccgtgaaggtaatgatttatggacagaaatgaaagaatcaggtgttttagataaaactgccctagtgtttggacagatgaatgagccacctggagcacgtatgagggttgctgaaacaggtcttacaatggctgaatattttagagatgaagaacatcagaacgtattgttattcattgataatattttccgttttacacaggctggttcagaagtttcagcattacttggacgtatgccatcagcggtaggttatcagccaacattagcaacagaaatgggtgaattacaggaaagaatcgcatcaacaaagaatggttctgtaacgtcagttcaggccgtatatgtgcctgccgatgacttaacagaccctgctccggcaacaacatttgcccatcttgatgcaacaacagttctttcaagaaagattgtagaacagggtatttatcctgcagtagatcctttggaatctaattcacgtattcttgaggaagatgttgtaggaaaagaacattatgaaacagcaagaagagttcaggaaattcttcagaaatatacagaattacaggatattatctctattcttggtatggaagaattatcagatgaagataaacttgttgtatatagagctagaaagattcagaagttcctttcacagccattccatgtagctgaaaactttacaggtgtaccaggaaagtatgtaccacttaaagaaacagtacgtggatttaaggctataattgatggtgaaatggatgattatccggaagctgcatttttcaatgttggaacaattgatgatgttattgaaaaggcaaagacaatggcaggagaaagttccgcaaactaggaggaatgagctatgagtaattcatttggtataaaagttattgcttgcgataagatattctatagtggaagatgcactcagttagttttacctcttcgtgatggctcaaaagccattcaggctcatcatgaaaatatggtattttctgttgaggtaggagaaataaaaatcacaaaggaagacggtagcactattgtaggtgtaacagggactggttttgcccagatggtaaacaatcgagctacagttatagttgacacttgtgaatatcctgaagaaatcgacttaagaagagctgaggaagccaaagaaagagcagaagaacagcttcgtcagaagcaaagtattgctgaatatcatatttcaaaggcatcattagcaagagcaatggcaagattaaaggaaggaagcggtaagggaacaccttatggctattagaatataagtctggagagatggcagggaatagtcataaaccagatagaataaaaagccgggagacgcattgaaaattgtaccgccccccaaaagttagacctaaaaatctaacgattggaggtcggtacaaatgcgtagcccggctttttttgtgaaactttgggattacgaaagctacaacatttttatcatatgacacgtaatgacactagaagggcagatttattgtatccaatgagcgtagacaacgccctgggcgactttgtacagaaaaggaggagagaaatcttaaaaaaggtgttgacaaattatttttttaataatatactttgaaagtcaaaacactttataatcaaaaaattttaaaacaaaataattttaaataaaaataaatgtgattgcttaacctattttgattaaagtgttttgaataatttttgaaaggataatgaattactttgggaattcaatctgatttttgagtttatgtttggaaagattataggaacaggttcttatgcgccggataatgttgtttgtaataatgacttaaaagagttctttgaaacagatgaccagtggataagagagcggacaggaataaagagaagacatattatgaccgatgagagtacaagttatatggcgtgcagggcggcagaaaaggcaatagagaatgccggaataagttgtgaaaaaattgatttgataattgtatcaactgtatcgtcggacactattttgccaagtacagcctgtattgtacaggatcagttaaaggcaacgaatgccatgtgctttgacataaatgtggcatgtacaggttttattacagcatataacattgcacaaagttacataaacgcaggcttggttgaaacggcattagtcattggagctgaaggcttgtcacaaatagttgattggacagacagaacaacagcaattctttttggagatggagcaggagctgcaattattaaaaaagatgaaaaagcaagatttgaaacagtaatgcattcggatggttcaatgggaggtgcattaacatgtgagaattcaatacagtacaggggaataaatgattctaaaaaaacattcgtatctatgaatgggcaggaagtttttagatttgcagtaagaaaagtccctgagtgtattgaagaactgatttcaaagatgaaaattgaaaaatcagaaattgatttgtttttgttacatcaggctaacaaaagaatacttgaaagtattggaaaacgattaaaagtttcaatggatttaattcctgaaaatgttagcgagtatggaaatacatcatcggcaagtattccaattttacttgacgaaatggtaagggatggaaagattcaaaaaggaaacaaaataataatggcaggttttggcgcagggcttacatggtcagcagtttatttggagttttagaaaattataaaccataggtaattaccggttagccggattacatacaaaataaaaatgaaaaatgaaaggaaaaaataaaatgtttgaaaagattaaagaattaatagcagaagaattaggagcagacgcagcaacaattacaaaggaaacaacttttgatgaagacttaggagctgattcattagacttatttgacttagtaatgaagtttgaagatgaatttgaagtaaagattccaacagaagaacttgaaaatattaagacagttggagatgtttgtgattacattgaaaagaacaaataaaaatagtcagaaagataattaaaatctagaaaaaaaatagaagataactaagaataattagaaaatagtttaaaaaatcagaaaacaaaacgaggcgattatgaaaacagctttaacagaaattttagaaattgaatatcccattattcagggaggcatggcttgggttgctgaagccaatcttgcagcggcagtatctaatgcaggcgggcttggaattataggagccggtggcgcagatgctaagtgggttgaagatcagattattaaagcaaaaacattaacagataagccttttggcgtgaatataatgcttatgaatccgcaagctgatgaaattgcgaaagtagtagcaaaacataatgtgaaggttgttactacaggagcaggaaatccgggaaaatatatgggaatgtggaaaaatgcaggaataaaagtaatgcctgttgttgcctcagtagccatggcaagaatgatggaaaggtgtggtgcagatgcggtaattgcagaaggaacagaagccggaggacatattggtgaaataacaacaatggttcttgtgccacaggttgtagacgcagtaaacattcctgttgttgcggcaggaggaattgcagatggaagaggttttgcagcggcatttatgcttggagccagtggtgttcaaatgggaacttcttttgtggcaacaaaagaatcaacagttcatgacaattataaagccaaaatcgtaaaagctaaggatattgacacaaaggttacaggcagaagcacaggacatcccgtaagaaatcttagaaacaaacagactaatacataccttaaacttgaggcagaaggtgcaggcctggaacagcttgaaaaacttacgcttggcggtttgcgaaaagcagttgtggacggagatgtagataatggtagtgtaatggcaggtcaaagcgcagggctcgttaaagaaatatgttcctgtaaagatttgattacaaaagttatgacacaaggagaacaacttttaagcaaaggatttgattaaaattctaattcaataaaaagaagttgaaatacaaagcaattacaatataacgaaaattgtaattaaatattgatttgaaataatgtttaaaacaagattttaagaaaggcataaaatgggaaagatagcatttatttatccgggacagggtgctcaaaaaattggcatgggaaaagatttttatgaaacaaaacctaatgcaagaagaatttttgatgaagctgataaagttttggattttgacataaaaaatatttgttttgaagaaaatgaacttataaataacacaaaatatacacaggcggctttggttacaacctgtcttgcaattacaaaagaagttgaaaatcttggtataaagcctgatgtagcagcgggcttaagccttggagaatatgcggcaattgtagcagcccatggaatgacagaaaaagaggcgattgtggctgttagaaaaagaggaatttttatggatgaagcggttccaacggacaatcctaaaaaagcaggagctatggcagcagtattaggaatggaaacatctaagatagaagaattaattttagacatagaagatgtggacatagctaattacaattgcccgggtcagattgttattacaggtttaaaacctgcagttgaaaaagcagcaaaagttttaaatgaaagtggggcaaaaagagtaatagaacttaatgttagcggtccgtttcattcaaaatttttgaaaactgccggagaaaaaatgtctgtggagttggaaaaaattaatttaacagaattaaaaattccatatgttacaaatgtaacaggggaatatgtgagcgatatttcaaaaacaaaagaacttttggttaaacaaatttcttcacctgttaaatgggagcaaagtgtaagaaatatgattaataatggtgttgatacttttgttgagataggccctggtaaaactttagcaggatttattagaaaaatagacagaaatgttaaatgcatcaatattagcacggtagatgatttagataaactaaaggaaatcagtttataaatattatgataaaaaactatgacgaaaagtttgtaaatcatatggagagagcatattaaaataaaaacagtatggagagttttatgttaaatgaaaaaatagctgtaattacgggagcgtcaagaggcattggcgcagccatagcaaagaaaatggcagaaaatggtgcaactgtaatcatcaattatcagggctcagttcaggcggcacaagctttggaagcagagattatagaaaagggtggtaaagcagttacatataaatgcgatgtttcagactttgacaagtgtgaaaagtttattggagatattgttaaagaatatggaagaatcgatattcttgtaaataatgcgggaataacaagagacggacttttgatgggaatgaaagaagaagattttgacagtgttattaatgttaacttaaaaggaacatttaatactataagatttgcctcaagaacaatggtaaagcagagaaaaggaaaaattattaatatttcttctgtatcaggagttacgggaaatgcaggacaggctaattattcagcatcaaaggcaggtattattgggcttacaaagtcggcagcaagagaattggcttcaaggaatattaatgttaatgcaattgcaccgggctttgttgatactgatatgacaattacattatcagacaaagttaaagaaggagctaaaggacaaataccacttggaagatttggcaaacctgaggaagtagcagaattggcactttttcttagttcagagaaaagcgattatataacaggtcaggttattaacatagatggcggaatggtaatgtaattataggagataggtaatggagagaagagttgtagtaacaggaatgggtgcaattacacctattggaaataatgtagaaactttctggaacaacgttaaggcaggagttcttggaatagacgaaataactaagtttgacacaacagattatagtgcaaaacttgcagcggaagttaaggattttaatgcaaaagaagtattaggatttaaacaggcgaaaagactttcacctttttcacaatatgcagtagctgctgcaaaagaagcttttgctcagtcaggcatagatatggaaaaggaagatccatacagagtaggtgtaagtgtgggctcgggaattggaggcctgggagatatggaagaggaacatgtcaagcttcttgaaaaaggaccttcaagggtaaaacctttgcttgtgccaatgatgattacaaatatggcagcaggaaatgtggctatagacttaggtcttaaaggaaaatgcgtaaacattgtaacagcctgtgctacaggaactcattgtattggagaagcttttagaacaataaaatatggcgaggctgatgtaatggtagcaggtggaacagaaagtgccataacacctattggcgtggcaggtttttcaagtcttaccgcacttacaaaagaaacagataaaacaaaagcttcacgacctttcgacaaagatagaagcggttttgtaatgggtgaaggtgccggaattgttgtgttagaagaattacaacatgcaataaacagaggcgcaaacatatttgcagaagttgtgggatacggtgcaacatgtgatgcttatcacattacatctccggcagaagatggaagtggtgcagctaaggcgatgacccttgcaatggaagaagcaggagttaaacctgaggaagtagattatattaacgctcacggaacaagcacacatcataatgacttatttgaaacaagagcaataaagttggcattgggagaagcagctaagtctgtgaaaattaattctacaaaatccatgattggacatcttttaggtgcagcaggtggagttgaatttatcacatgtgttaagtcaattcaggacaattacatacatcagacaataggtcttgaaaacgaaggtgaagaatgcgaccttaattatatgaaaggttcaggggaaaaatgcactgtgaaagtagctttaagcaattcattaggttttggcggacataatggaacattagcagttaaaaaatatgaaaaataggtgatgaaaatggatataagtgaaataaaagatttaattaatgctatttcaaattctaaaattgacatatttgattatgaagaaaatggagcaaaactgcatttggaaaaaaagacagaagttgaagttattgcttcaccaaaacctgtagcacaagatgttttagttaaacaggaaaatacagaagaaagtatcgaacagaaagaagttttaacaggcaatgtaattaattctccattggttggaactgtatatcttgcaccggaagaaggggcaaagccgtttgttcaggtaggagacacagtgagaaaaggtcaggtagttgcaatagtagaggcaatgaagctgatgaatgaaatcgaaagtgaatttgatggcgttgtaacaaaaattttagttgaaaatgagcagacagtagaatatggtcagccattatttgaagtagagtagaaaaagaggaattaaaaaatgttaggaattaaagaaatagaagaaattattccccatagacatccttttcttttaatagattatattgaagactataagccgggggagtatgccgttggttacaaatgcgtaacctttagagaagatttttttagggggcattttccacaggagccggttatgccgggagtacttactatagaggcccttgcgcaggttggagcggtggcaatacttagtcaggaaggttttaagggaaagacagcattctttggtggaataaataaatgtagatttaaaggaaaagtagtgccaggggacaaattaaaacttgaaacaaaaattattaagcagaaaggacctatgggaataggccaggcaatagcaagcgtagacggaaaagttgtggcaaaagcagaacttacatttatggttgggtaacaactttaacccgcctggaattggagaatgatatgattcagaaacttttaattgcaaacagaggtgaaatagcagtaaggataataagagcatgtagagaaatgggtattgagactgtagctgtatattcaaaggcagacaaagatgcacttcacacacaattggcagatgaagctatttgtataggggaaacaaaggcaagtgaaagttatttaaatatggaaagtataattagcgcaacaattgcaacaggtgcagatgcaattcatccaggatttggttttttatcagaaaatagcaaatttgccagattatgcgagcagtgcaatattatttttattggaccaaaatcagatgtaatgtataatctgggaaacaagtcagttgcaagaaaaacaatgatagaggccaatgtacctgtaattccaggaagtgaagaacagatatatgatagcaaaacaggaaagaaaatagcagaccaggttggatatccggtaatcataaaagcagctttaggtggcggtggaaaaggaatgcgtgtggcgtatggccctgaagaatttgaacaggcatttaacgcagccaaaaaagaaagcgaagcagcttttgatgatggaacaatgtatatagaacattttgtggaaaatccaagacatatagaatttcaaatattagcagacaaatttggcaatgtaatccatttaggagagcgtgactgttcaattcagcgaaatcatcagaaaatgatagaagaatctccaagtgtaattctgtcagatgaattaagaaaaaaaatgggcgatacagcagtacgtgccgcaaaagtagcaaaatacgaaaacgcaggaacaatagagttccttttggataaagacaaattctattttatggaaatgaatacaagaatacaggttgaacatcctgtaacagaaacagtaacaggaatagacctaataaaagaacaaataaaaatagcagatgggcaaccactatcatacaaacaaaaagacataaaaataaatggtcatgccatagaatgcagaataaatgcagaaaatccactactaaactttagaccatcaccgggagtaataaccgacctgtacctaccgggaggtaacggagtcagaatagactcagcagtatacaacggctatgaagtaacaccatactacgactcaatgctggccaaactaatagtacatggagaaaacagagaagaagccataaagaaaatgataagcgcactgggagaagtaatcgtagaaggaatcgacacaaacgtggactacttgtatagcattctcaatgattcagttttccaaagcggacactttgatgtaaactttatagaaaatttcaacaaaaacattgaaaacatagcataaaaattgatggagctattattttgctatttctcgcggaagaattttcctgacaagcaaacaataggcagaattttgcaattttgcgagcatagcgtacagtgataaacttactgtttgagccgaaggcgagtttaagttttcactgtacaataggcggcggagcaaaataagaaattcaacgtgtttgcgtcagaaaaattcttccgcgagaaggaataaaaaagtagcagatggagaggtttatgaaatttaaaaagttatttgatagaaaaaataaagattacgttacaattaaggtcaacacttccaacgtgccagacggtcttctcagaaagtgcaagaagtgtagctctattgttttggctgaagatgtgaagaataataattatatttgtcctaagtgtggcggttatttcagggttcatgcttacagaagaattgagatggttgtggataaggatagttttgagcctatgtttgaaggacttaatacaagaaatccattgaagatgaaaggctatgaagcaaaagttcaggcgttaagggataagactgggcttgatgaggctgttacaacaggaagagccacaattggtggcaattcggtggctattgccgtttgtgacgggcgtttccttatggcaagtatgggtgaagttgtaggggagaagattgcaaaaactgtggagtatgcaacaaaagaaaatattccggtcattatttttgcctgctcaggtggagcaagaatgcaggagggaatggtttctcttatgcagatggcaaagacttcagcagcgttgaaaagacatagtgaatcagggaatttatatatttcagttttgactgatccaactacaggaggcgttactgcaagctttgcaatgcttggtgatattattttggcggagcctaaagcgttaatcggtttcgcagggccaagggtaattgagcagactattggacagaaattgcctaaaggttttcaaaggtcagagtttcttttggaacacggttttattgacgggatagtggagcgaaaaaatttaagaaataggttaataacaattcttactttgcataaaaaagatgataagtcttacacagataattttaacataaaaaaagaaaaatcaacaatggctcagaagaaaagagaatcgattaaaatgattactgagtcagttaaaaagtcagcttgggatagggttttggcgtcaagaatgaatgatagacctattgccagcgactatatagacttgctttttgatgattttgtagaatttcatggagacagatattttaaggatgatcaggcaataatcggtggcattgcatcttttcatggaatgccggttacggtaattgcacaggaaaaaggtcataatacaaaagagaatcttgaacataattttggaatgccatcacctgacggatatagaaaggctttacgattgatgaaacaggcagagaaatttaaccgaccggtaatttgttttgtggacacaccgggagcattctgtggcttggaagcagaggagcgcggtcagggagaggcaattgcaagaaatctttttgaaatgtcatcacttagaacaccgattctttcaatagtaattggagaaggtggaagtggcggtgcgttggctttggctgttgcagatgaagtatggatgatggaaaatgcagtttattcaattttgtctccggaaggttatgccagtattctctggaaggacagcaagagggctaaggaagccgcaggagcaatgaaaatgactgcaaaagatttaaaagaaatgggaatagttaagaaggttttctttgaacctgaaaaatatacaacggatacgttacctaaaattacggaaaaaatggataaagaaattgtgaaattccttgctgaaaaaacaaaaattactaaggaacaattagtagatgaaagatacaacttttttagcaatggatattagaatgcagtttaaataaggagttatggatgaattataaacctttacagattggagatttaatagcagaaaggcccatagtacaaggtggaatgggggtaggaatcagccttggaaatcttgcaggagccgtggcaaaagaaggtggagtgggaattatttcttctgcacaaattgggtttaaggaagaggattttgaaaataatccaagacttgccaacaaaaaagcaataaagaaagaatatgaaaaagcaagacgaatttcaccaaatggaattataggatttaatataatggttgccctgaaagattacagggagcatgttattgaagctgcaaaagcaggggcagatattatagtgtcaggggcaggtcttccaacagaacttccagaatatcttaaaggttttaaaacgaagatggctccaattgtttcaagtgtaaagtcggcaaaagttattttaaaatattgggacagaagacataacgcaacagcagatatgattataattgagggaccaaaagccggagggcatttaggtttttcggtggaagaacttgaaagtgaacttgattatgacaatgaaattcaaggaataatagatgttgtaaaagaatatgaaaaaaaatacaacaaagacattcctgtagttgttgccggtggaataagtgacaaaaataaggtgaaacatgcttttgacttgggggcacaaggagttcaggtagcaacaagatttgtgccaactaaagaatgtgatgcagatgaaaattacaaaaaagaatatatcaaggcaaaaaaagaagatatagtaatagtaaaaagtcctgttggaatgccaggccgagccataaaaaataaatttatggaaaaagtaataaatggtgaaaaatttacaccaaagaaatgtttaggttgccttgcaagatgtaatcctaaagaaattccttattgcataacggaaagattaatatatgcagcaaagggaaaaacagatgaggcgttactattttgcggagcagatgcgtacaaagttaataaaattacaactgtaaagaaggtatttaaagaactgctggaagaaaaagaagtttaaattgatttatttttgtataccgaattattttgaaagttttatttggaagtttgcattttgaattgttttattttaaattcttatttgaaaataggcttaaataatgttaatattaaaagtagatgcaaaaccgtagataaatttaatggagagattgatgacaacatttgaaaaaattaatgatgtattagtgcatttgttccaggaaatatgggaactggaagaaaaggcgattataactgaagaatttaaagatataacaaacaatgatatgcatattattgaggccgtaggacttggcgaaggcaacaatatgacaacaattgccaagaagatgaagataactgtgggctcgcttacaacttctatgaacagtcttgtaaagaagcactatgttgagcgaaacagaagcgaggaagacagaagaattgttaatataactttaacagaaaaaggtataaaggcttataaacatcatgaagagtttcatgagaaaatgtcacaggcagctattagtgaaatgagcgaagatgaagtaaaggtacttctaaaaagcctgaataatctgtcaaagttctttcattcatatgataatgaataaaaaattcgtttgacttttttgaaaatgataaatataataaactactgaacgagtagcgaactagcgtaaatccagtttttgctactcgttttttcttttatggaaaatccaattggaattagaaacggagctgtgggaattgcgacacttgtaatgggattgattaagtaaaaaaatcatgttaaactgttaaaaaaaaacaagggaaataatttaaatcaggaggtgacaacaatgaacgacaagtggattgattttgcaattcgccttcaaagtatagcacaagcaggattgcaatatggaaaagacaaatatgacatagaacgctatgaagaaataagacgtattgcagcagaaatgatttcagctaaaacaaacatttcggcagaaaaagtttacaatctgttttgcaatgaaacaggttatcaaacaccgaaagttgacacaagagcagcagtattcgttgacggaaagattcttcttgttcacgaaaataatggcacatggtcattgccgggaggatggtgtgacgttgatcagtcggtggcttctaatacggagaaggaagttaaggaagagtcgggactaactgtaaaatcagaaaggcttattgctgttcaggattggcgaaagcacaatgtaacaaattatgcttatggtgtaatcaagatttttgttcagtgtaaatatgtatgcggtgagtttgagaaaaacatcgaaacaacagagataggattcttcggaaaagatgaaatacctgaaaatcttgctgtggaaaaatgtacaagagagcaagtgctgatgtgctttgaagcatatgaaaatcctaaaatgccaacaagttttgattgattatcaactgttttgactttggcatgtgtttttactaattatattttgtcgtagacaaaaaaatacaggaattgtataatgaacaaaacaacaagtaaataaagtaaaagcaaattaaagggattcaaatttgcttaagctttaacaatcaactactaattgaaagtagtggaatgtacataattaatgaggtgaaaaacatatgaaagaagtatacgcaacaaacaacgaagttgagattcagatgcttgtaggtcttttggaaagtcaggggattttggcacaggtacatgcagatggagcaggtggatatcttagagtccaaggtgcagattttaatattttcaaacgagttgtagttagagatgaagattggagcagagcactaagcatagcgaaagagaatggcttcgaaaagaagaaaaacacaacaaagatagatagaacctatgtatgggcagcaagaattacacttgttatatttttagtgataatattgttaggcatttttaaaggaatgatgcagtgataaaaagtcggcgagaagccgactttttattaaatcttaaatccttaaaattcagtatattcttttataagtttaactactgtacctgacaataagaacaaggcaatcaagtttggaattgccataagtccgttaaatgtgtcagctatgctccagataagtcccaggtctactgttgcaccaagaatggcaaccaatgagtaaacaaccataaaaggtttgatgaccttagatgagaaaagaaattcaatacatcttgcaccatacaatccccaaccgataattgttgaaaatgcgaaacagcacattgcaacagcagtgaagagtgaaacccagttaccataagttgaagtaaatccctgaattgtaagttctgctccggcggctttaccgaaatcaatgctaacgccactgcaaagaataacaagggcagttaaagtacaaataacaatagtatctgcaaaaacttcaaagattccaaagaatccctgctttacaggctttcttgtgtcggcacatgcatgagcaattgaacctgtaccaagaccagcttcattagaaaagatacctcgtgaaacaccttttttcatacaaataaagatgctgccaacaactccacctgtaacagatgaaggtttaaaagctccttcaaaaatagaagcaaaaacagtaggaacatgtttgtaatttaaaataattactccgatggcaagaattacataaaacaaagccataaaaggaacaagcttttcggcaaccttaccgattcttttaataccacctaataaaacaagtccaacaagaacagtaattgcaatacccataattaaattaagtgtagaaacaccattttgtgaaataacattataatttaaaagagcagaatcaatggcggtagtaatagtgttaacctgtgtggcattacctgtaccgaaaacagttaaaacaccaaaagctgaaaacaaaacagcaaggaactgccaattcttgccaagcccgtttttgatgtaatacataggaccaccaacatagtcgccttctgcatttttttcacgaaaatgaacagcaagagtaacttctgtaaacttagtacacataccaagaagcgctgaaatccacatccagaaaacagcacccggaccaccaatggcaatagcacctgcaacacctgcaatattacccgtacctacagttgccgcaagtgcggtacaaacagcctgaaatggtgtaatggaaccatcacttgcttccttttttttaaacatacgcccaattgtagttttgatggcatatggaaattttctgatttgtaaaaagttagttcttatacttaaatataaaccaacgccaataatacaaatcattgccggaacaccccaaataaagttgttgacggcagagttgattttttcaattgttt

SEQ ID NO: 12691 - DNA, 1911 bp, Unknown
  gut microbiota DNA sequence
gatagtcctgctgatgggtatcgggtacgtctttgctccattctttgcaatcgggcagtgggcgctttttgttttggcggtgtcggcgctggtggatggggtgatgctctatcgcattcgcggcatccgggcattccgccagtgtgctacccgcttctccaacggagatgagaacaccgtgaacatacgtgtggagagcagttatccgcatccggtggctgtggaagtggtggatgagattccttttgcattccagttgcggaatattgatttccggatgaggctccaggcgaatgagggcaggacgattacgtatcatctgcgtcccacgcggcgggggatttactctttcggacggattcgggtgtttgtggcaggcagaatgggattgctttcccgcagatatacttgcgatgctccgctggatgtcaaggtatatccgtcctatctgatgctccatcggtatgagttgcttgctatcagcgacaacttgacggaattgggcatcaaacgtatccgcagggtggggcatcatacggagttcgaacagataaaggagtatgtgaaaggcgacgattaccgcacgataaactggaaagcaagcgcccggaggcacgaacttatggtaaatgtctatcaagacgagcgttcccagcaaatctataacgtgatagacaaggggcggattatgcagcaggcatttcgcgggatgaccttgctggactatgctattaatgcctccctggttctttcgtacgttgtcatgcggaaggaggataaagccggactggtaacgtttaatgagcactttgatacatttatccccgcctcccgacagcccggacaaatgcaggcgttattggagaacctttacagccagcagactacttttggggagaccgacttttcctcattgtgcgtacatttgaacaagcgcgtcaacaaacgcagtcttttggtgctgtataccaatttttccggcatcggcagcttgaatcgccagttggcttatttgcagcagttgaaccgccagcaccggttgctggtcatcttcttcgaagatgccgctctgaaagagtacgtcgccactcctgcgagggatacggaagggtattaccgccatgtcattgccgagaaatttgtattcgagaaacggctgatagtctccaccttgaagcagcacggcatcagttctgtgctgactacaccggaaaatctttctgtggacgtgataaacaagtatctggagatgaagtcacgtagccagatataaaaacagtaactaaggttatataatccgtaataagggtagtgaagatgtctggattttcctctaattttgtaattggtatattgtgaaggtgtggaaaacatatccttaagattttatatatctgaagttacaataatgagaatgactttataggtgatgaaagacaatacattggacataaagaccgtatgtgaatgtaaccggtgcctgggatgtaaaacgttgcatcctcaggtaagcattattaatctggaaaatcctagtgtgtatcaggatgctgtgaagtttgaattctatgccatcctactgattgaggactgtgaaggggattgtgactgctgcggacggaaatattatgattattccaatgctacgatggtatttcttactcccggcgagatattccggatgaacaagaacaatacgcttccggacaaaggttggctgctggcatttcatcccgatttattgctttgtactacgttaaagaatcatatcgacaactatactttctttttctaccgcaaggaggaggcgttgcatctgtcacagcgcgaaacggccaaagtgacgtgttgccttgagaatattgatgatgaacttcatcattccattgatacgcatagcaataccatccg

SEQ ID NO: 12692 - DNA, 762 bp, Unknown
  gut microbiota DNA sequence
aagctatttcgaggagaaccagctatctccgggttcgattggaatttctcccctacccacacctcatcaccacccttttcaacggatgtgtgttcggacctccattgccttttacggcaacttcatcctggacatgggtaggtcacccggtttcgggtctactcacactgactaactcgccctgttaagacttggtttcccttcggctccacacctttggtgcttaaccttgccagtaagagtaactcgccggaccgttctacaaaaagtacgcggttgagcatgtatagctcttccacagcttgtaaacacagggtttcaggttctctttcactcccctcccggggttcttttcaccgttccttcacagtactatgcgctatcggtcactaaggagtatttagccttggggggtggtccccccgatttcctacaaggttccacgtgtctcgtagtacttcggattccgctcgctcccttctgatttcgaatacggggctttcaccctctgtggctggctttcccaatgccattcttctatcttacgggtcacttcttgcggtccataaccccggaatgcacgcatcccggtttgggctccttccatttcgctcgccgctactttggaaatcgatttttctttcttttcctccggctacttagatgtttcagttcaccgggttccccctgcatgcctatgtattcaccatgcagtgactggagttcttccagacgggtttccccattcagacatctgcggat

SEQ ID NO: 12693 - DNA, 13490 bp, Unknown
  gut microbiota DNA sequence
aggtgttagtttattaaattcagttttataaagctgctttaaaactttttgacccacatctgcatcctccatttgcctatttcttcctttatttttttcataagcaattttttctattccgcttatactatcctgataaaatatttcctttagtatagcacatttcaacatatatcttttttattatttttctatttattattgttattgtataaatgtgacaaaagcagacaaaaatcgtaaactatattgctgttaaaacaatatgttgatatactaattgtaataattaaaaaatactttacaagaaggctgtaagtttttgatataaacttacagccttatcttttttgtaaatcaattatttattcagctttattatttgcttatttttattagttttaactaaccctatattaaaaaaatttttatttttttaatatatttaatactctatgggaaactactcctataatcccacctgtaattactcctgctataagaagcattggaacatagtagtaaatgccgttgttttttactacaaatgctgcaacggctatctgtgccatattgtgacatactgcccctataatactaactcccataattccaaaaaaatctgtttttttaattatcatcattgcaataagacttactatggcaccggcaaggctataggcaattgacattaaactgccaaacataaatcctacaagaactattcttaccaatgatattagccatacgtcccccatatctaagctatacaatgcaatgactatcacaaggttagccagtcccagctttacaccagggattcctatattaattggtattaaaacctctacataactaaaaattattgcaagagcaacaagcattgctatatttgctattttctttgtactcatcttttctctcttctcttttgaaattgctacaaactcctattttgcaataacatctgcctcattaccttttgtattgtctgatactgcaatttccacaacaatcttgtgtggcagacatacaatattttgtctggtctttgttatttttccctgcttaacacaatatttatcaggacaatctgcttctttcatttccacacaattatcgtgaatccaaactatatttttacctttatcagtttttatctctatttcctgattctttgtcaatgaataagttccatatacatttccgtctacggttatttttactatttcaccgttatctaactgcatctgattcattataatatatatgacaatggcaattacaataataactgctgtcaaaattaaatctttctttttcgtcaatttcaagttattcattatgattttccttttttattttttctaccggatagtccgtagaataatcactataaattccttctgttacatattgcttgttgtcgttagttaacagtattgcgtcaaacttatcgctattgaccctccaatattccttagccttgtcaatacccataataaataatgatgttgataatccgtctgccaaagttccatcagagctaataattgtaactgatttaagtcctgaatctgccggataccctgtagccggatcaattatgtggtgatatgtttttccgtctttttcaaaataacgctcatagccacctgaagtaataactgccttgcctgcaatttcaagaactcctatatagctttcatcactatctggattctgcactgcaactttccacttgcttccgtcaggcttggctccaagcgcctgaacatttccaccaagactaaccagaccgcttttaattccgttattcttaaaaactttcataacttccgatgaagtatatcctttagcaattccgccaaaatcaattttcatttttttatctagttttgccactcttgtttttgaatcatatttgatttttgattcattgatattttttaatgtactttccagttcttttttattaggaactttataattctttgtatcaaaaccccataactgcataattggatatattgcaggattaaaaacaccgcctgtactttcagatatttccaaagaacgctccattatgtttccaacatcttccgacaacttgagctctttctcactgtttaatttgctaacttcactgtcgctgtttcctgtagaaagcattccgtctaattcatttattctggcagaagcctttgctactgcttcttttgcattgtcaccatatgctgttatttccatatatgtgtccattgcaaaaagttcgcttgtgtacttctgctcattattctgtgttgtcttctgagattttaccatgttaccatttccacatccacatagcaaaatcgcacatgttaataaaataattatttttttcatctatagcacctttgtatatattttcattttatgtataacttactcaagttaatttcttctaaccttgaatggtctagcataggttatttctgttgtcaacaatccagattttggagttttaaaataacatacactattaattgcctttacggattttacgaaatatttcgtattgtctttttaattcttcctcttcattaatcggatatccttttgcctccaaaattctttctattgcctgacttggatccattgtatgataagcaaaaaataatttccgtaattcttttggttttatgattttataaacctgagatgatgatttttcatatgtgtatgaaaaatagcggtaaatataccctatccagtacatttcattaggagaatactttaccgaaccatactttgactctccatactgttcaactattctttcaaaaatatcttttggttgaatattagtctgtaaaatatctccactgtctaaactttttgcaattatactttgcataaaccttcttataaatatttctgaacttgtagacgtcgtttcaattgacatttcaaatacttgtccttgcatttcacataatattaaaccatctttgtcaaattttctcatataataactgctccttacaatcctttttatttcagaatttcatctatataacgaccttttcctctatatttaattctggctaatttgactttatcatctccaagcttagcatccgaatttctcattttcttatagtattccttttctttttccgaaatataacaacgttccaacattttaaggcttttgatagctttgtcacttttaaatacatactgataacctaaattggtagccgccagacagtgcttacactgctcatcagttatttctcccataataaatgagttaataatctggaacattctattatccacaatgggagctatgatataatcacagtcacaggatttttctattagcttttttattatgggatgattttcatattcctctaaaacgccacgataataagctatagtcatcatccattcctgattcacattatattttttcccttttaaaccttcttccttaaaatcaaaaatatacacacttgacttttcaaaacctgaaataaatgatatcgcctgttcgtatctctcacctgtataaaagccctgtcccaaatcattattcgttctgcttttatgtatatccaactttccttctatcctgctcttcgctccatgaaataaaagcttatgattcttatccatatgttctatatagaacatttctttaagcctattaagtttaatattattcttaaaagcaaattcatacacatgctctagcaatttatcagatggagtagttttacccatctcattacgcgaaatagtaatctgttcaacaccaattttttcggcaatctgagattgtgttaatcccaatatctccctaattgatttcaaatcttctttaaaattatattccatattttgtcacctcaacttatttatatcatattacttaaataagtttgttgtcaacttatttacatcatattacttaaacaagttttaagttatagctgaccctcgcattcagctcggtcaattattaattagtttctttatacttctacttcttattaattatcttaaatataatgcttattgctataaccgcagttattacatctgagcacgcctgtgatacaagtattccgttgtagcctaccacatttgacattactaccagtgccaatacgtacactactccctgacggcttattgataaaataaatgctccaagcgcactgcctactgactggcatacgcaggttgaaactaatgtaactgccataaaagtcattcccaactgctggaatctaagcattgttgcaccgtttgatacaatatccgactgcttcataaacacgcttattattaatggtgcaaatacactcattattatagtaaagactaatcctaatcccatttcaaacaaatatgcaaattttagtatttcttttaaacgcttattgttctttgaaccatagttataaccaattaatggctgtccgccgaaggcaaaacctaccaaaatcagtgcagtaatcatatttacctttaaagcaattcccatagctgcaattttgtcatttccatatggaagaagataatgatttgttgtcattaccataaaactttgcattatatttgtgattgatgccggtattcctataataagaacgtttctaatcattgaagttgaaatctttgcatcgccaattgacactgacaatctgttagtttttttaatcattacataaacatagtagatatccgcaattaaatttccaagaaccgttgcaattgcggcacctgctgcaccctgctttaatccaaaaataaatattggatcaagtattatgttggcaactgaacctaccattgaaccaaccattgcctgagttgcaagtccctctgttcttaatatattacttggcacaagtccaaaaataattgatgtggcacctattgcaatccatgtataatagtcacttgcatattggaaagtgccgtcatctgttcccaaaatatgaagaatcggcgttttaaaaaccataagcactatgcttacaaatattccaaatccaatagctccccatatgcaaaacgcactgactctttttgcctcttccaatcttttttctccaaaaagtcgtgaaatcagtgagcttccgcctagtccaaatatgtcaccaaaagctatcatcaaggtaaacacaggaacaacaagagatactcctgccacaagttcctgcacacctgttaaggctataaaatatgtatccaccatgttgtaaatcagtgaaaccatcatactaaatactaccggcaaagcaagcttcatataggcttttggaaccggtgtcttttcaaataaaacattttccatcttttttgtctccttatttttagggaacttttttgttgtttttctttcaaaaagttccctatttaaatttcttattaatcaaaaaacatccacaatcacagaataaatggattatggatgtccgaccgtagcgcaaattgcgccctatcatatttaattatttaattttccatattcttcttttgacaaattaaatactgcccaagcttttggccaacctgcataaaatgcaacgtaccaccaaattggaaaacctaaaattacgtgcaaagcctatctctgaccttgcacgtttattatatctcttttattcaattatgactactacctatattaaatcatagtctatgccttgtaagcatttatttcttttataaacaaattacttgtctataatttttacagcagtaccataggcaatcacttctgctgctccactcattacctgtgatgaaccgtattttacaccaattaccgcatctgcgtccagttcttttgcctcatcaaccattctcttaacagcaatctgtcttgcctcatttaacatttccgtataacctacgatttctccacctacaagtgttttcattcctgccataaaatcacgacctacatttttggtctgaacaactgttccttttaccatacccaatgcttctatttccgttcccggaatataatcaatacttagcagcttcatcttcttctcctccatctatttctcttattctgcctattaaaacaccaatgatacatacaatgataacaaccggaattgctactaaaactatcaaaagtcctaaaggaattggatcaacactatttccccacaggaacattccaataagaaatatcataaatactatcattactgctcctccgattattgctcccattttcttcttcatgtggatgtcaattttgctaatgttcacaaaatctatgccctccttctccatgttttccatcttctcaagccattcatctgttttcagattattaagttcacatttctgatttatgatttcttcggtaagattatacatattggtaaggttagatttttgtttttccaaaacatctaaatatttttccaaacaattttccaaagtaacattgtcatttaatactgattttatgtcttctactgatattccgatttttcttaaaagttttattttttcaaaacttctatattatcctgatggtattctctgtaaccattatcagctctttcaggtgtaagtaatccctgactttcataaaatctaatatttttgcttgttattccaactagttcttcaacctgtttaatcttcaccggatagcctccatcttcttgtttttaataacccgattcacttataactgtatcgatacaccttatttatacagcttccataaggtggaaggtcaatactttttttaattctaataatattatataccatacattacaatatacaaagaaaaaagagccgggctccacaactcttttctcaacgaattatgatttttatccttttactgctccaactacaagactctcctgtacctgtttgcttaaaaagaaataaataattatagtaggtaatgttgctataaccatacctgctcctattaatccccattctgttgaatactgacctgcaagtgacattattcctactggaagtgttctatactggtcactgtcaacaaaagtattggctaacattaattcattccatgttccaagaaatgtaaatattgaagctgtggcaatagccggcttaaccattgggaatattatttgaataaaacatttaaatattccacagccatcaatatatgcggcttcttccatttctcttggtattcctctatagaaaccaactaatatcataatactcattggcaaagctcctgctatatatggaataattagtccaagataacctccctttaacccaagggtgtcaagaatctggaataatggaagtaatgctgcctgagcaggtatcattattcctatcataaataatccataaacagcattctttagtttccatgtcattctggcaatggcgtatgctgccattgaagatattattcctgccacaacaacggtaactacagaataaaaaactgaattaaggaaataacgaattaagttagatgaacttaatgctgttatataattatcccatctccaaacttttggaagtcctattacattctcgccaaatatttccgtattgctttttaatgaaaaagttataagccagtataagggaaacaactgagtcaaagcaattaaaagcaacactataaattttatcttgcctataatatttttcttcttcattgtaccctcctatactgctgaaacattttgttctgcttttttaaacaatctgtttacaataaatgtaaatattaaacattcgattactataaaaaatgcctgagcacttccataaccatataatccttttctaaacaaattgttatacattaatgttgccggaacctcacttatatgatttggtccaccacctgtcattacatatactaaatcaaaggctctaagtgaacctgtaattgcaaagattacacaagtctttattacaggaaccagcagaggtaacgtgatttttctataaacctgccatgttgatgctccatcaatctgtgcagcttcatagtaatctgttgaaattgatttaattcctgcgtaaaaaataatcatgtgataacctatatattgccatacagatggaattaacacggtcataaatgcattttttgtaagccatgagtgttcatattccggtacaaaatatcttattacagtatttattacaccataatcactgttaaacattttaagccataattgtccaataaccatacttgaaattacaacaggtataaaatatatagttctaaaaaagttatccccttttacaccttttgataatatcaaggctaatattaatgatattggtaactgaataaataatgatgctgccactaatattaatgaattttttaccgcctgtggaaaatatctgtcggaagtaaataattcaatatagttttttattccaataaatgttttacttccaatcccattgtattcaaaaaagctatatactcctgatgttatcaatgggattagagtaaatcctaaaaataaaagtagcgccggtaatatgaaaatcaatatgtattttttatttccaagcattttttccataacactacccacctcttacttcttatttgccgttgattgccgctttatgttcatcaataaattcatttatatctgcgccatctgcaaataatgtctgtacctgttcgttatgaactgctgcaggttctgcttctaaagatgtatcccatgcaagaacaccctgttttccttctgccaataaatctttaatctgaatgaataatggatttaacttactttcatcagcttttgttgtccatccactgaatcctgaacctgtttcgtatgatgcaacacccattttttcattaatgtaaatacagaattttgctgcttcttctttgtacttagtattgttgtttacccagaatgattcaacataaccgccacaataatctgttgattctccatttccgtcagaaatcataggaatctttaatgctacaacttcttcagggttaactgttgctgcttcatctgtatatacgttgttcgcaaaccagcttcccataattctcattgctgccttgccgttttcaaatgctgcattggcgtcatcatttccctgctctaatggattttctccaaaagctcctaatttgtataagtctgatactttctgtgctgccttcttatatccctcgtcaccaaattcttttttacctgatagcatttcattaacacctgtagctcctacttctctcaaagctaatgcctggtatacaaaagctgcattccatccgtcctttgcacctgctgctaatggtgtaacgccgtcaagagtttttaatttcttaactgcatctactaattcatcatatgtttcaggaagcttagcacctgccttgttaaataatgttttgttgcagaataatgtcatataccatgagaacattggcgttgaatataattttccatcatattcaaatgctgatgttgaaccttccaccattcttgatttaacatcatctgttaagtaatcatctaatgccattacttttcctgcgtcaactaatttcttagctgtacctgcaccccaccagtagaatacatcaatgccctttgcatctcctgcaaactctgcattaatctttgtcttgtatgcttcagtatccaatgtttctgttttgatttttacattaggattatctttttggtaagccttaactgcttcctcatatctacccttaagttcatttgtgtcatttgaccactggtgccatacatttaatgtgatagttccgtcatccttttttccctcactcttactatcactgtttccgcatcctaccatagagaatgccattgttgatgctaacgtaaccgctaacactttcttaaagaaattctttctcattttgtttcctcctcgaatttttatactgaaagtatactttagtacaacacctatctcaatttaatattttgaccaaaaaaggttaaaaattttactaaaatttctaaccttttttttacactatactctatattcttttaccgtttgtcctgtctgctttttaaagcaaatacagaaatagtgggagtctttaaaccctattttttccgccacctcatacactttaagatccgtctccttaagaatttttttgcttgcttctattcttttccgggaaatatattcaataaaacttacaccatatgttttcttaaattccctacttaggtaactgtcatttatgtataaatcggaggcgacctttttaagtgaaagttccgggttatacagatttctgttaacgtaatccagtgcatcttttattacatttgttctcttacctgaacgctttttttcatgataatcacaaacctgtttaatgtattttataacacactccgatgtatcatctatggttcttatttccctaacattttggaaaacttcttcctcacttactaattgatatatgtttgttccatatttgtttaatgtagagcttgcccttaggattattgtcattgccattaatttaagatattcctcatcaggtattttttctgctttaattatttctgtgtaatcagaaacgtattttagtacttcttctcttctacaattaattattgcatctgaaaattcatcccagtctatttccttttttgaactgtttttcttcattatttcctgatactcagaaaaggtaacaaccttatttctgcctaataatacagaaacacctatagctttgtttgcctgaccatatgctgccggtattccattaaattcactgtttttttcactaacaccaatagttgccgttattcccatattgtttaatttattatgcaaatcattagcgtaatcaatgcatttacttacgtctgtttttgtgaaaaacattacaatattatgcataaaatgtataaaagaaaggctattctcattattttgcttttgtataaattcatacacttttttataattttgattttcttgggcatctttgatttttacatttatgcaaacacatccatcaactaaatcactgcaattatatgtttccaatttttttgtagcttcctcttctcctatacgattttctactaatctaagaagaaagctctcccttaatatatcgtaatttttttccgcactttctttaagctttgccacttttgattcctcttcattgacttttgctatttcagttttaattttagtcataacttcacttatttcttttatgttgacaggctttaaaagaaactcgtcaactccaagcttaattgcttttcttgcatattcaaattcacgaaatccggttacaattactaccctgcatttaggatttttttgtagcaatttttccgtaaactgcaatccgtccattccaggcatattaatatccgtaattacaatatcaacattgtggtagtttatatattccaaggcatcctctcctgatgcagcctctcctacaatattaaaaccgttctcttcccaattatatcctttacggattaaaactctttctaacttttcatcgtcaaccaataatacatttaacatatgttatttctccattttaatctttttgattgtgacaattatctccgttcctacaccaacttcactttgtataattacaggattttctattccgtatgtaagacgaattctctgtattaaactatataaaccaaatcctgactttccggtaactgttcttcctgcaagaatatcttctattttttcatcactcattcccactccatcatctgatactatgaaaattatttcatcttcctgctcaaataccttaatttcaatattacctccttcaccatttaagccatgatgtacagcattttctaccagcggttgtaacagtaatttaagcactttttcatgttttacagcatcttctatatcatagctaattgcaatctggttttcatatctggtgtttaaaattgtaatgtagctttcaatacaaccgatttcatcttccacgcttatataatccagtccactgtttaaactatttttgtaaaagttacccaatgcctgtatcatctgaaagcatttttcattctcttccattaaagccaatgctgaaattgcatctaaagtattatacaaaaaatgaggatttatctgagcgtaaattatgtctaactttccttttgcaattattctttcctcatcctttactctcttcattaatgccttaactgataaaatcatatgattgaaaacttttcttaaatttgttatttcgttatcatagtcatccacaggcattgtaataaattccccattttctactatctgcatatgattttctatttttcttaaaggtttaaaaataagatacgtaagtagcgtggaacacaaaaatacaaaaataatattaattcccataattattgcaataatcgttgaataatacggtgccaaagatgtaatatcgtccattgaaaaaactcctaccagtttccaatcctgtattcccatatcctgacaggctacaatacactcttctccattattttttacttctttgtatccttcattaatattttctgctactttcgtatactttttgaaatctcttttttcctcctgaggttttattacataatttccttttgaatcaataatataaaactgattctttgaatcttcacttacctgattaaaatatccctgaagaacagtattatcaaaagtaataagtagtgttgctaaaggcttataatcttttttgtctaaaatctgccttacataacacaaatagttattattttcatagtattctattgtgccatcacttcccttataaaaaaatccattgccaccggcactttgcattttcttataccagtcagctccctggatgtacttattaacttttcttggtgttcttttatatgaactgtaacaattattatattgatcaaatatatatactcctgaaacataatctcctgataaaatcatgttaaaaagacttttagttatgttcttctgataatttaaatcaatattcgctgaattaatttgtcttagagaatcctgtacaatatcatcaaaatatagatacgtagaaagctgcgtaacattttcaaacactaatgctaagtttccatgaagtgcgctaactgtctgaacacctgcttttccgatttcttccttagtatacttattattaacagcccatatcattgaaaacgtcataacaaatgatagtagcaaaattaatatatatgtaaatataatctgtgttcttattttagattttttccaatattttataatttttttcaacttttttctgctccataatttttttgtaaatccgtatccttctatactcaactatagcctatcttttcaggttgtacaacttaaaaccagacattgaaattttttcttttttttttagataa

SEQ ID NO: 12694 - DNA, 139 bp, Unknown
  gut microbiota DNA sequence
gaaacgaaaatatatgaaaatttgaataaattacttgtggtgtagcgttttcgttccacgacacgtaattggaaacgaaaatatacgaaaatttgaataaattacttgtggtgtagcgttttcgttccacgacacgtaa

SEQ ID NO: 12695 - DNA, 163 bp, Unknown
  gut microbiota DNA sequence
tcctacgggaggcagcagtggggaatattgcacaatgggggaaaccctgatgcagcgacgccgcgtgaaggaagaagtatctcggtatgtaaacttctatcagcagggaagatagtgacggtacctgactaagaagccccggctaactacgtgccagcagccg

SEQ ID NO: 12696 - DNA, 872 bp, Unknown
  gut microbiota DNA sequence
tgcccgttttccaaatcacgcaatcgcttctgattgttttcgtcctctgggtctacaccaaaaaaggcaagggtttttttaatctcgttaaggtcagtggaacgaaaggcaaattttaagccgaggttatttttcagtttttcatctaagaggtcatctgtattttgggtcacgaaatataccccagcgttcatagcacgaccagcacgaaccagcttcatagatagtgttttcccttgtgccacctgtaagaagctccatgcttcgtctaagtctacaatcttgaaaatacttcggtctgtatggataaagtccaacgcaaaggtactaatgacaatcagcattgctaccgatagtaactccattgtggtatattcctcaaaggaagtttccttgtcaggaagtaccaagtcggcaacctgtataatgttcagttgtttttcaaggctgatagactgctctacataaccatcactaaaaagcagatgggcaaagtcatagtctgtaaaactttcgatatggtcggctatgctggtacttagtggcgtattctcaacccgtaattcttcaatcactttcatcaaccctcgcacttcactattggttactgcacgaatggcttttctaaggattgggaagcgttccccatcacgagaggaaatccccgtaaggaatgtcaaaatatcaatagccagtgattcagaatctttggtatttttcataattacataagggtcaagtaagcctttgtttttctcatcagaagtcagattgacgatattgatttcatgggaaatctctggcaaggtttctttccatctgccacgttctgcttttgggtctacaatcactgcttgtgccccataaagcac

SEQ ID NO: 12697 - DNA, 1305 bp, Unknown
  gut microbiota DNA sequence
atatctcatctagtctattaagaagatggattcagatgtataatgccaatatagaacttaaagattattatccaaaacaggaggtctatatggcagaggcaagaagaaaaacaaccaaagaagaacgaaaaaagattgttgaatattgcttaaataacaatcgtgattataaagatactgcagccaagtttgatgtttcctacagtcaggtatacaactgggtgagaaaatatgatacttgtggtttagagggtttgacagataaaagaggtcatcataaatctgataatgaggtcgatgaattagaacgtcttagaagagaaaatcttcgcttaaaacgtcaattagaagaaaaagatatggttgtggaattattaaaaaaagtgaaagaattcgaaaggatgtgaggttagggaaaacacgatacgaatcaaaatatatggtaataaaggaattacacaccgagaaaaaatggagtattgaatggatgtgcaagcaactggaaatatcccgtgccgcctactataagtggcttaagcacgaaatacctgaggctgaaattgaaaatatcaaacttgcagagttgattaaagaatacgacgagcgattcaatcatatcctgggataccgaagaatgacatcttggattaatcactttaatcatactaattacagcaaaaaaagaattcatagaatcatgaaaaaacttgggatacattcggtaataagaaaaaagaaggcgaaatatacatattcaaaacctgatgaaacagcagaaaatcttcttcaacgagatttttatgctaccgctccaaatcaaaaatgggctacagatgtaactgagtttaaagttcctggtgataaaaagaaaatatatttgagcgccatcatagatttatatgacagatatccagtagcatatgtaattagtggacgaaatgataatcaattagtttttaaaacttttgataaagcgattatggctaatcctgatgccaagcctatttttcactctgatcgtggctttcagtataccagcaaaacatttaagaaaaaacttgaaaaacaggaaatgacacaatccatgtcacgcgtaggacattgcatagataatggcccaacggaaggattttggggaattatcaaatctgaaatgtatcatatgcatgaaataactgatgaaaagtcattgcgtaatgcaataggtgactatataagattttattccgaaaaaaggcctcaagatagatataactgtaaaacaccactagaggtgcgtcaagaaggtcttgcttcagacaatcc

SEQ ID NO: 12698 - DNA, 2232 bp, Unknown
  gut microbiota DNA sequence
atatctcatctagtctattaagaagatggattcagatgtataatgccaatatagaacttaaagattataatccaaaacaggaggtctatatggcagaggcaagaagaaagacaaccaaagaagaacgagaagagattgttgagtattgcttaaataataatcgtgattataaaaatacagcagttaagtttgatgtttcttatagtcaggtatacaactgggtaagaaaatacgatgcttgtggtttagaagggttgactgacaaaagaggacatcataaatctgatgatgaggtcgatgaattagaacgtcttagaagagaaaatcttcgcttaaaacgtcagctagaagaaaaggacatggttgtagaattgttaaaaaaagtgaaagaattcgaaaggatgtgagattagggaaaacacgatacgaatcaaaatatatggcaataaaggaattacacactgagaaaaaatggagtattgaatggatgtgcaagcagctagaaatatcccgtgctgcctactataagtggcttaagcacgaaatgccagaggctgaaattgaaaatatcaaacttgcagagttgattaaagaatacgatgagcgattcaatcgcatcctaggatatcgaagaatgacatcttggattaatcattttaatcatactaattacagcaaaaaaagaatccatagaatcatgaaaaaacttgggatacattcggtaataagaaaaaagaaggcgaaatatatatattcaaaacctgatgaaacagcagaaaatcttcttcaacgggatttttatgctaccgcaccaaatcaaaaatgggctacagatgtaactgagtttaaagttcctggtgataaaaagaaaatatatttgagcgccatcatagatttatatgacagatatccagtagcatatgtaattagtggacgaaatgataatcaattagtttttaaaacttttgataaagcgattatggctaatcctgatgccaagcctatttttcactctgatcgtggctttcaatatacaagcaaaacattcaagaaaaaacttgaaaaacagaaaatgacacaatccatgtcacgtataggacattgcatagataatggtccgacggaaggattttggggaattatcaaatctgaaatatatcatatgtatgaaataactgacgaaaagtcattgcgtacggcaataagtgactatataggattttattccgaaaaaagacctcaagatagatataactgtaaaacaccactagaggtgcgtcaagaaggtcttgcttcagacaatccaacagaatatcctatacctgaaaataaacgtataaacaaatacaaagagaaatggtgtgcatagaaaaatacctacatttcaattaaaatgtaggtataatctgtactaatttttagatatttcacctgtctacttgacagggggcatatcaaattacggttaaggtgcttttttatgcgttagtatagctgtaccatatgagcaacttttgaatgatatggtacaaatccttgtaatttaaaacctaaatttatacaaatctgtaccatacacggtgattcttatttatatggtacagataagtttgaatttgagtaggacaaacgttgaatctgtaccatatgcgacaatttctgcttatatggtacaggtatgtttagatccgagctgaacaagtattatatttgtaccatatatgaaatttttggttcatatggtacaagcttatacattcctaccccacggaattagattcaaggttatatgaggcagagtataagcttcgttctattcaaattttacaatatctaccccatagaagcaggctggaagctgtatagagcagatatgaggcttgaatccattcaaatctaaacaaatctaccccacgaaataaaactataagaatctatgatgcaaccgtgaggcttgaatacactcaaaccacaacaaatctaccccacgaaataaaactataagaatctatgatgcaaccaggaagtttgtttccgctcaaaccaaaactcatctaccccacagaatcagactggaaggcaatatgaggtgtgccaagtttgttttgcttatttttataacttttgtcacaattcaagcctgtataggggctggaaggcatgttgcatatgctgttttgtacaattttgtctgcattatgtacaagaaaatacaaaaaatatgcaaaatat

SEQ ID NO: 12699 - DNA, 52040 bp, Unknown
  gut microbiota DNA sequence
aatctatataatgttaaatataaacaaaagagcaaacaacacacaaaaaaccaggaggtagaatttatgagaaagaaattattaagcattgcactttgtgcaacaatggtagccggtattttcactggctgcggaagctcttcagacacatctaagaaagatgaaggaaagtcagcagacggaaagataacattaaacgtaatcaactatcacgttggtacagactatgcagcagattattatgaatatttatttgatgcatttaagaagactgaagaaggaaagaatgtagaattcaaattcgaagaaattcctacaacagatgcttacaaccagaagattaaattattaatctcaagtggtgatcttccagacatcgtattaaatggtggtaacaacattacagcattagctgctaagtcaggaaaggttacagacattacagaataccttgataaggatcctgaatggaaagcaatgttcagtgaccaggatcttgaattcaactcatatgaaggaaaggtttacggtattccggtatcaaaagaaatttcatatatttactacaacaaagacttatttaagaaagcaggacttgaagctcctgacgtagcttacgaaacatgggatgatttctacaaagcatgtgatacattaaaatcaaagaacatcactccagtaagtatggatacagcagaccttggttggttatctaacctttggtatagtggtttaattggtacagctggtgaagaaggaaacaaattcatgaacacaatgtacccaacagactacacatcagacttagttgtaaacgcaacagaacagttacagaagatgttaaagaactacacaacatcagatgcagcaggtggaaagtatgacacaatggcaacacacttcttcaacagcgaagtagcaatgcttcctaacggaccttggatgattcctgatttcaagagcacagacaaagctcctgaaggtttctatgacaaagttggcattatgcttcttcctggttcaggtatggaaagtgttccaacacctggtgacatggtaggtacaaaggatcctgaaaaggttaaagcagcagttgcattccttaagtttgaaacaacagcagaaaatcagcttaaagctttagaaatggcaggattacagccagtatcaagcaatatcgaagttccagacagcttaaaagaatcagacccattaatggcagaagtattagatattcagtcaaaggctaaatatacatatggtcagaaccaggcatattggtatcagaacgtaattgatacattctcaacacagttgccagaacttgcatatggtaacatgacagcaaaagaattttgccagaagttaactgatgcagctaagaaaaactagagcaaattgatgatgggtgctgcactagagaatagtgcagcgctctttttttgaaaggaaataggaaaaatatgagcacaagaggaaaaaaaggttggatattagcattctcattaccttgtttagtactgttttgtttagtatatgccattccatttgtaatggttatcactacttcattttgtgattactcacttacacagtcaccggtatttgaaggcttaaagaatttcaagacaatatttgcagatcctgatttttcagtatctatagttaacactttgaagtgggtattaattcagtcaacgcttcatgtaggatttggtttcgttatggcacttatcttacgtagaaaaccaaagggatggaaatttgcaagagttgcatatgttattcctaacattgtcccgacagcagcaacagcagtaatgttttcattattattaaacccatcttttggtgtaatcaagattatttacgaaaagttcggacttgacacaactcaggtattaaacttattcggtaactcaaaatatgcatttatgacagtgacagcaacttgggtattttactcaggatttaatatgttaatcttcatgggtgaaatgggagctataagccctgacatctacgaagcagcaatggtagacggtgctacacctgcacaggcagacagatatattacaattccattaatgaagaatgcatttggcacttgtgtagttttagcatcagtagcaatggtatcacagttcgatattatttatatgacaactaagggtggtccaggtaatgcaacacttaacttaccaacatacttgtacaagattatcactcttgaaaacaactatggtaaggctaacgcggtaggtgttatccagattgcattaggattagtattagttatcttaattcagaaattatttaaccagaaacaggaaatgaaggaggtataaaaacatggctaagaaggaaaaagacataccaatgcctatgcagcttggttcagtaaaaaaacagccggttggtgttcgcgtagtttgcggaattttaaaatatctctttcttgctttgattgtagttatttcaatcggacctattatttgggctggtttaagttcgtttaaaacatatgcagaaattaatacatctgcaattgcacttccaaagtcatttaattttaagaactatgccgatgcattcaaatatgcacctattcaggaatattttttaaacagtatcattatcgtattagtcagcgtagctgttacagtttgcttcgtagcaatgtgtgcatacgttgtagcaagatataactttaaattgaaaacaatcttagtgcttttaatttcagcatcattgatgcttccagcacaggccatatcacagccattgtttgcaattttcaaaacattaggtttatacgatacaaaatttggactgattatcgtgtatgcagcaatgggtattccaatgtcattcttcgtaatggtaagttactacaagactattccagtagcgcttgaagaatcagcatatattgatggcgcaacatttattcagtcatttacaaaggttgttttaccattggctaagcctggtttggcaacaatcgcaatgttacagtttattaatacatggaacgaattctacttcgcattaatgctcacaagtggtgatacagctagaacagttccaatcgcacttaactattacttaggaacatttgctaataactactctgcactgtttgcggcggtaataatcacggttcttccaacaattattatctttattatcttacagaagcaagttatggaaagtatgacagcaggtgctgtaaagggttaaagaaaggaatagagaatggaaaaaaatacatatccggtagaagaatggaaagttaccgaagaaaagtttgttaaagactggaattatagaaacgagacaacatttgcactttcaaacggctacattggtactcgtggtacatttgacgaaggatatcctttcacggtagatgaaggtctggaaggaaacttcattaatggcttttatgaaagtgaacatataagatatggtgagtggaactttggtttccccgaaacaagccagtcattacttaatttacctaatttaaaaaagaccactattgaagtaaatggtgaaatgttcgatttaaaagcaggagaaatagttgaatacagcagaagccttcttatgaatgaaggtattgttgtaagaaacgttgtttggaaatcacctaagggcaaggaagttaaagcaacatttaagagattggtttctcttgctgataagaacattatggctattcagattaagattacacctattaattttgaaggcacagttaagtttagttcttacgttgaagcaggcgttgaaaaccacacaagaaagactaatcctttagttgactatggcccatttggtaaacatcttgtggtagaagaattaaaatctgatgaagattatattttataccagggagaaacaaagaacagtaaactttcaatggcttgtggtagtgttgttgttacagacggtcatatgactgaatgtgttattggagaagaagacggacatacttcatatgaagtttatgctgaagaaggcaaagaagtaacatttgaaaagatgattgcttacacttcagaacttgatatgcctaaagaagaaattcttccatttattagagctaaactttcagaagcaaaagtattaggttatgacaaatacgaagcacttcagaaagaaaagatggatgaattctggagcaaagccgacattaagattgaaggcgatgaagaattacagcagggtatcagatttaacttattccatattatgcagtctgcaggtcgtgatggcagaacaggtatgggagctaagggacttagtggtgaaggatacgaaggtcattatttctgggatacagaaatgtatgtacttcctgtattcgtttacacagattcagaattagctaagcagttattaaattatagatatgacactcttgatgatgcaagagacagagctaaagttttaggacatatgaaaggtgcattgtatccatggagaactatcaatggtaaagaagcatcaacatattttccacttggaacagctcagtatcatattaatgcagatattgcatatgcatttaagctctaccttgatattacaggtgatgaccagtacttaatcgacagagcagcagaagtattagttgaaactgcaagagtttgggcagatgtaggatgcttcgcagaatgcaaggataacaaatattgtatttgttcagtaacaggacctgatgaatacaacgcaatcgttgataataacttctatactaacttaatggcaagagaaaacattcgtagtgctatgtgggcattagacagaatgaagagtcttgacgaagatgcatacaacaagttagttgaaaagttagaacttgaagacgaagaactagaatactgggaaagaattattaacaatatgtatttcccatttgatgaaaaattacagatttatccacaggatgacggatttatgatgagaaagccttgggatgaatctaagattccggaagaaaagagacatttattatacgaaaattatcatccattgtttgtctacagacagaagatgtcaaaacaggctgatgcaattcttggaatgttacttcatagtaacttctttacagaagaagagcttaagagaaactatgatttctatcagacagttacacttcatcattcatcattatctacttgtatttttggaatccttgcaagccagattggatacgatgaagaagcttacaagtatttctcacagtcagcaagaatggatcttgatgatatgcatgataatttctatgcaggaatccatgcagctaacatggcaggaacatggcagggtattgtatttggtttcgcaggtgttcgttctaacacaggcgaacttacaattcatccaaaacttcctgaacagtggaagtcatacgaattctgtgttgaatatcatggtagcgatatgagaatcaaaattgaacagggtaaggttacatataaattacttaatcaggttcctattacatttaagagtaatcatgaacctatcactttaaataaggaaggagaagaatatgtccaagaaatataaggcaatatttttcgactgggacggaacagccgtaatgtcaagacaggctcctgttgaggaagctgttgcagctatgaagcctttacttgcaagtggagtaaagcttgtaattgtaagtggtacaacatatgacaaaattgccagtggaaaaattcatgaacatttcactccagaggaagcttcaaacctttatttaggtttaggcagaggagcatacaactataagatggttaacggtcagccggagattttcgctgactgtatacctgacacagaaggattattaaagattcatgatgtatgctacaaaatccacagagagttacttgaaaaatataacttcaaaactgatgttgtattttcaagaccaaactactgcaagattgatttacaggtagaaaatgagcgtggcgatcagttatttatgcaggaagatgaaatgtcacagttaaaggctatgttagaagaacatggtttagaaaacggaataatggatttagtttcattatctgaaaaggttggagaagagtttggacttaaggtatccgcaacatgtgatgctaagtatcttgaagttggtatttcatgtaagagtgacaatgtagacacaatccttgaatcatttaaggatgaaggaatcgaagcagaagattgttctttctggggagacgagttcgtaggaatacaggaaggtctttacggaagtgacagctttatgcttacaccaaagacagaagcaggagatttcttcgatgtttcttcattagaaggtgtaagacctgaaaagattcagattttaggcggtggtgtagacagattaattcagttcttagttgaccagagtaaataaaaaataaacattctaataataaaaagggagtttatcatttcaatacatatttaatatgcaaggaggaaaataatgaaaattataatagctaatgattatgaagatatgagcagaaaggcagctaattatttatcagcacaggttattatgaaacctgacgcagtacttggattagctacaggtgaaacaccaattggtacttataagcagttggttgagtggtacaacaagggagacattgatttttcacagacaagtactattaatcttgatgaatataagggcttaacaggtgatcataagcagagttatagatatttcatggatactaacctctttgacttaatcaatattaagaagtctaatacataccttccaaacggtatggctaaagacgaagaagctgaatgtgcaagatatgaaaacattattaaggagcttggaaatattgatatgcagcttttaggtattggcttaaacggacatatcggtttcaatgaaccgggtgaatcttttgaaaaaactacccactgtgtacagcttacacagagcacaattgatgctaatcagagacttttcgatgaaggtgatgcagttcctgaaaaggcattcacaatggggattaagtcaatcatgcagtctaaacatattttattaattgcaaatggtgagaagaaagcacagattataagagatgcattcttcggtccggtaactccaaaggttccggcttcaatcttacagttacacaataacgtaacagttattgttgataaggaagcaggaaagttaattaaagatgtgctttagtttctaatatattaataggaactacaaataaagttgaaagggtaaccgacaagaatcggttaaataaaaaggaggtactttatgaagcagaagaagatgcttgccctattgttgtctttggcaatgatagttactacagtacttggcaacggtacattcgtatcagcgtcagctactaaggcaacaacaggcattagttattacgtggattccgtaaacggaaatgacgataatgacggtactagtgaaacaaaagcctggaagtcacttgaaaaagttaatgcaactactttcaagccgggtgataagcttagatttaaaagaggttgctcatggagcggtcttttaagtccaaagggttcaggtgaaaaaggaaaccctattacaattgacgcatatggtgacgttaaagacggcagacctgttatcaatggtgatagctggtgtggagacaaaggtgatgatttagagaatcgtgtatttaacacagcagtatatttctataatcaggaatactgggaaatcacatctattgaagtaacaaaccatacaaaaactaaagatgatcatattaagaaatatggtatcttgattatgggacaggatgcaggaacacttcatgaaattaatgtaaagaatacatacgttcatgacgtaatttctattccaatcggtcagcaggcaggtatcggtcgtggtggtattgtatatgctatccgtggtaacaagaaagctactaattgggaagacattactgtagaaggaaactatgtaaaaaatgtaaaccattacggtattaactttatttcaacatggggaagctcaacattccctgatgaaagtggaattactgaaggtggcggtggaacatatagaagtaaaaatcttgtaattcgtagcaattactgcgaaaacgtaggtaacgcagctatttgtccatcagattatgaaaatgcacttattgaatataatgttgcaaatggatgtaacagtggtcctaacggaaacgttcctatttggtgggaacatggtcagaaaacaatctgccagtacaacgaagtgtttggttcaggagcttccggtgataaggaagattcacaggcatttgacgctgacgtttatgcagacttaaattatgttcagtacaactatacacatgacaatccatcaggttcattctttgaatgtgcattaggaacatcatatcagacatactacagatataacatcagtgttaatgatggatatggtacaaaccgttatggcggtggtgctgtattaacattatgtcagggcggtaatggaagcttggatgcatataacaacttgatttatatggatgcagaccatgatggatctattacacgtagctgggatgatacaacagcagtaacttctactgatagatttaaaattagaaataatgtcattataacagaagctcaaaagatagatgacaacggagtaaataaggcacaggcttgggattcacgttatatgggtgttgtaaataacaatgcttacggtggagcaaaccttaacaatagaagagctgacgatgaaaatgccagggtagcagttaagagcgactatgttaagttagaagaaggaacaagcgcaacagttgaagacgttaacggcgaatttaagattacttatggtactgttgacggatacaaacttaaagatggagcaacagttattgaccagggtatttcagttatcgacaatggcggacaggatttctacggaaacgaagtaaaatcatttgttaagccaaacattggtgctgataacagctacaacagtggtattaaagaagaccttggtgaaggaaagattttattagattttgatgattgcaataacggagcattaacaggtgtatattctaactgtgacttcggtaaccgtggttggaacgtaacagacggtaaattatgggctacttcatatactaatgaagaacaggctaacaaaatagctattcctgacaagtatgctttaacaagttttgaagcatattgtgctaaaggaacagctactgtaaaggttgaagcaggagaagaaagcgagacatttacggtaacaggcaagaagcagacatttacaactaactttaagaaaaaggttcctgcaacatacatcgtgattaagtcagataatggtgtagatcaggttaagtttgataacattgttttatcaaagaagaaaagaatttcagatacagaaactaatatttcacttgataagactgtaactacatcatctcagagtgattgggatcctggatgcgtaggatcaaacattgtggatggtgatgaaacaacaatgtggatttcaaatggttggtcaaatcagggtgatacagttacagaagacagagcaaactttgttgtagatttagacggaagttataatatcgaaaaattagatgttactttcggtggtgataaagctaaatcagcatggaaatataaagtagaagcttcaacagacaagactaactgggatgttatctgggatcagacagcaaatgaagaagttgcatctacacagaaagtaactttagatgaatctataacagaaaagaaatactcatatgttagatttacatttggagatactattgaagatgcatggcctgcagtagcagagtttaacgtatacagaccaaaagaacttactaactttgcacttgatggagaagcaacagcttcaacagtaagtagagatcctgcaaatgcaattgacggaaacgacggaacactttgggtaggcgacggagattcagaaaaagaaggtgcttggtggatggttgaccttggtaaggctcagcagattcaggcatttgacttagtatttgaacatgaagtacttcctacacttgaagatgctcaggcggcaacaacaccggcttacggtcaggcatggcagtataaggtagaaggttcaaatgataagagtagctgggatatgttatgggataatacagctaacactgatttctcaaaggaacagtatggtaagattgcagcagaatatgcaaataacaaataccaatatgttcgtgtaacattaacacagttaccacttcacaaagagtcaagagtagcagtttggcctgcaattggtgaagtaaaagttttaggtgaagaagtaatcaatcctgaagaagaaaacaagattgttcttactgaaaaaggacagaacattgatattgacttggcatacagccagccggtaacagtttcatcatctaaggatggagaaaatgttacagatagagatgcaaacacaacatggacacctgatgctgatgatgaaaatccatcattaacaatcggtttagacagagaatacaatattgaaaacttcagcgttgattttgaaggcgaagctgcaccatacaaagtattggttaacacatctgaaggatgggttgaagcaggttcatgtgattcaaaagattcaggaaaagttgtatcagcatcaaaagacgaaattacaggaattaagttccagttcgaaaagggtatgactgcaaaagtttcagaagtacactttgacggtgttgacgcaaaagttaaacatcataagagaatcttagtaatggcacctcacgaagatgatgaaatgttaatggcaggtggtgttatgaacagagctgttgcaaatggcgacgaagtttacgttgtatatgcaacaaacggagattacagtggtgtagaccatggtaaattaagaatcagagatacagtaaatgcattaaatacaatcggtgtaccaacagatcacttgtacttcttaggctatgcagataacggtggtatgggtgttggacagtacacaacagcatttacagacagttttgtatataatattttcattgcagatgataataaagttatatcttcaagaaatggtgtaacaaaaacatatggtgatgaaagtgtaagaaatgattatcattatcttatgacaggagaacatgcttcatacacacgtgctaacttcttagcagaccttgaaagtgtaatgaagagtgttaacccaacagatgtttatatgacatcaagatacgatatgcattatgaccatgcatactttggattattcggtaatgaagctattaagaatatccagaaggaaaacgataaattccagccaacagttcacgaagctattatccatagccatatgactgatgaagtatatcctaaagatcagggtaactacggttggggcaaagaacttaacacatatttaggagcttggcagcaccttgatggtcttgaagaaaagacaatgcttaactggagcgaaagagaaaacgtattaactccatacagcatgcgtcagggaccatttaagtataacttaaaggatcaggcacttcgtaagtattcaacagaatactacaattggattgcttcattctcaaaggttaatgaagtattctacaagcatgaaacaaacagtattggttcacttgctacagtaacagcatcaagtgaaaacagcagtgacagcagatgggatgaccagagtgcagttaaggcagttgacggtattgcagatggttatgcaacaggacttgctaacaagcatacaagattcccatgggctgaatgggtaacaaagaatgaaggaaaaggtgcttggttaaatcttgcatacgatgaagcacagaaagttacaacaattaaactttatgacagacctaatacagatgaccacatcacaaaatctcacttagaatttgaggatggaacaacacttgaagttggagaacttccaaatgatggtgcagttaaggaaatcagtcttggcgaaggcaaagaagttaagaacattaagttcgtagttgacgaagtttcagaatcaacaacagcagttggtcttgctgaaatcgaagtaatcaaggcagaagttaagaagcctgaagaaacaactacaacaccaggttcagaagaaacaacaacacctggcacaggtgaagaaacaactacaccatcaacaggcgaagaaacaacaacaccagctacaggtgaaacaacaacaaaaccagccgcaggcgaaacaactacagcaccaactacaacaacagctaaggctaatgaaggaacaactacagtagcagctaacaaagatacaccaagtggtgctacaggattaaaggttccaacagtagtttcaagcaagaagttaagcgctaaggctacatacaagttacgtcttaagaatactaagggtgctaaggtttatacttacacaagcaacaagaaagttgcaacaattagtaataagggtgtaattaagacaaagaagaaaggtaaagctaaattaacaatctgcatccagaagggcagtgttgtaagccagtactacttcaatgtcaaagttaagggcaaagctaagacaagcttcaaagtaagcaagattagcaaagcaggaaagaaccttgcagttgcagacgaaacagttcttaagaaaggcaaatctaagaagattaaattagcaaaccttgcaagtggtgctacagttaagtatgcaacatctaacaagaaggtagctaaggtttctaagaagggtaaagttaaagctgttaagaaaggcaaagctacaattaagattacagttacaagtggtggtaagacatacacattatatcatgtagtcaaagtaaaatagcctgataatattgaaaagcattgctttctcatattctcatagccccggaagattgggtaaccaatcttaccgggactttttacgcgtaactttaagcggtgtatgactgaaataaaattgcgttatgagcttgctcaataaaagcatttttaattcaggaatatatcgcgctagcgcgatatgagtatggaacgaagcggaatacgaatactgcttatgatgtaactatttatctaatactattcaaaaaagttaataaaaagctggttagaaagttagatttaaagtttaatactttccagttggctttttatataaggtaaacatcacataaactgactccgaaacacataaataaaatgttgacagaagcgcatttattatttaaaatatatttagatattaaataaacaagggaggataagataatgggaaaacaatatgaagaattaggaataacagatgcatttatgtttgccaaagtaatgtctaataaagagatatgcaagccggtgttagagcagatattaaacattaagataagggacattgaatatcttgattatgaagaaaccattcagattgcaccgggttcaaagtcaataagactggacatctatgttgaagatgacaaaaatactgtttttaatcttgaaatgcaaacgacaaattatgaggagctaccgaagaggtcacgatattatcaggacataattgacttgaaattaattgaaaaaggtcaatcttatgatatactaaaaacaagctatgtaatatttatttgtacctttgatttttttgaaaagaatagaagtatttatgaatttgagaatatatgtgttgatgattcggatataaaattaaatgatggaactcataagattttcttaaataccaaaggtaacagagatggcataagcgaagaactacagatgttgttagattattttgatggcagagaacctgaaagtcaactagcaaaggacatagacaggaaagtgtttgaagccagaaacaataaacagtggaggcgagagtatatgtcatatcagatggaattagataggcagtatagaaatggtagagaagaaggaataaaagaaggaatggagaaaggttcagaattagcaacagaaaatattaataagttacttaaaattttgatagtagaaaagaaatacgatgagattgaaaaaatatcagagaataaagagtaccaaaaagaactaatgaagaaatataatattattgaagattaatagtgaaaagaaatcagttgtccaccagcaattggtttctttcattatatgggagaataagtatatgaagaagattttgattgtggaagatgataatacaataagcaatgaattgaaggaattgttaataaactcaggatacaaagcagaggtgcttgaagattttcaaaattctaaagagaagattttggaaagtcaggcagatttgattcttttggatattaatattcccggaattaatggggagattcttttaaaagagataaggaaggtatcggatgtaccaattattatggttacaagtagaaccagtgaagtggacgaggtgcttacaatgtcctatggggcagacgattttataaccaagccttatagtcctacggttttacttcttagaatccagaatatttttaaaagaatggagcctaagtcggacagaatcagatataaggatttggaaataaatataggcaagggttctataagtaacggcagcaaagagattaatttgacaaagaatgaaatgattattttttcttacctacttaataaccgtgaaaaaatagtaaccagagatgagttgatgacggacttgtggaataatgaagagtatattaacgacaatgcattgacggtaaatattagcagattaagaaataagttgtcagaagtgggatacgataaagccatagaaacaagaaaggggcaaggatatattttagtatgaaattagacaaatacttgtgggacaaaaaaataaatatatccattttggcagtaggatatttcattatagtggcaatgcttgttgcgtttaaggctcaaaacagtctgataattggaataacaattgtgtatattgcagtagttgtggcaagttttcttattgattttttcagaaaaaagaatttttatgatgaatttacagctaacaccgaaaaactggacaagaaatatctagttttggaaatgcttaaagagcctgaattttatgagggaaagattttgtatgacaatctttatgagatagataagtcaatggctgaaaatgtaaacaaatataatcatagcattgaggattttaaggaatacatagagatgtggattcatgaggtaaagattccaattgccagccttgtgctgatgtgccataaccataaaggtgagattgacgaaaaatatattaagcaaataagaaggttggataattatacagaccaggttttgtattatattagaagtaactattccgagaacgattatctaataaaagaagtgggacttaataaggctgtgggggaagttttgattaagaacagagatgatttgcttgaaaacaaaattaatattcaggtggatttgaataattattcagtgtttaccgattctaaatggtttcagtttatattaaatcagattattaataatagtataaaatataaaaaagcaggagttgaatcgattataaaaataaccgcaagtcagacgaaagatgagactactattgaaatttttgataacggaatcggaataccaaggaaggatttaaagaaggttttcaataagtccttcacaggcgaaaacggaagaatcggggccaagtcaacgggaatgggtttgtatattgccgatagattgtgtaagaaattaggacacagaatagaaattgagtcagaacaaaatgtggatggaacatctgacagttatacaaaagtaaaaattgtttttggcagaaatgattatctaacattacaaaattgtaatgttaagtaatgttagaatgacgaccgaggaatcaaaacagagtaacatagtatttgcaaagagaaattaaaggagttaatactatggaaaacattttaaaaattgaaagtattgaaaagtattatggaaacaagtctagtctgactaaagccataaataatatctcccttcaggttgaaaaaggtgagtttgtagcaattatgggagcttccggttcggggaagactacattacttaattgcatttctacaattgacaaagttacatcaggtaacatttatgttgcaggaagaaacataactaatttaaatggtaaagaacttaacaaatttagaagagaagaattgggatttatttttcaggattttaacttgcttgatacacttacagcttatgaaaatatagcgttggcgttatctattcagggcgttaagccagacgagatagatgcaagaatcagagaagtggcaagagagttagatattgaaagtgtgcttaaaaaatatccttacgaaatgtcaggaggacagaagcaacgtgtggcaagtgcaagagccattattactgagcctaaattgattttggcagatgagccaacaggggcacttgactcaaaatcatcaaaaatgttgttagaaaaaatcagctatttaaatattaagaatatggcaacaattctgatggttacacatgatgcctttacggcaagttacgcatcaagagtaatatttatcaaggatggcagaatctttaatgaacttctcagagaaggaagaaacagaaaagagttttttgatgatattatggacgtggtaacaatgttaggtggagagttaaacgatgctttttaaattatcattaaaaaatattgtaaagagtattaaggattacgccatctatttctttactcttgtgttaggtgttgcaattttttatgtgtttaatgccattgagtcacagactgtaatgatgaaggtttctgataatacagctgaaattataagattgatgacaaatgtattgtcgggtgtaagcgtttttgtatcatttgttttaggatttttaattatttatgcttcgagatttttaataaaaagaagaaacagggagtttggaatatacttaacgcttggaatgggaaaaaggaaaatatcttttattctttttattgaaactttgactataggtatgatttctttagttacaggacttatagtaggtgcaggattatcacaacttatgagtatttttgtggcaaatatgtttgaagcagacatgacaaagtttaagtttgtattttctctaagtgcatgtattaaaacattagtttattttggaattatatacattctcgtaatgttgtttaatactattataattggaagatgtaaattaatagatcttattaatggaaatcgaaaatcagaaaaggtcacaatgaagaatcctattgtgtgcatctttgttttcataatttctatggcttttataggctacggttattacggtgtaatgggtggatatagtaatttagatgaccaaatgttatttaaagtaatttttgcaggaagtgtgggaacattgtttttgttctggtcattatcaggtttgattttgaaaatagtaatgtctgttaaaaaggtatactacaaagatttaaacagttttgtattaagacagattagcagcaaaattaacacaactgtagttcagattacaattatatgcttaatgttatttgttactatttgtattttttcaagtgcattatctataaaaacttccatggataacaatattaaggaactggtacctgttgacattcagttgtcaaagaatgttaacagcgactttagtgataataagaaaatagctaaagataacaagatttccattgagaatactttgacaaataatggttttgattacaaaactaattttaaagacattgtgaaattcaatacttacgaagcagataagtttacaattaaggatacacttggggacagttataagcaggtggcagaacagtataagtttttggctgttgacaataatgaagtcataatgaaattaagcgattacaataagattgcaaagcagtatggtcatacaacttacgaacttaaagatgatcagtatatgataattgccaattttgtaaatatgatggagattagaaatattgctctaaggaacggggaaaagataacgataaatggaaaggattatagtcctaagtttaatcaatgcaaaaccggattcgttgaaatatcaggaagcgtgtctgaaacaggagtcttcatattgcctgataaggcagtggaaaatttagagttacatcaaatatggctaaatgccaattataatgcatccacaaaagaacagcgacagaaggttgagaatgaaataaacaaattaattgaaaaaacatggcttaaaacatcaataatgacagtaaatacaaaaaatgatattgaacagtcatgcataggattaagtgccatggttacttttattggactttatcttggaataatattcctgatttcaagtgcggcaatacttgctttaaaagaattgtctgagtcaacagacaacagggaaagatatgtaatgcttagaaaacttggtgccgatgagaaaatgctaaacaaagcattgtttaaacagatagggctgttcttcggatttccgcttttcatagcaatcatacattcaatcgtaggaataaaattctgcaatacaatacttctatcaattggccgaacaggactgttaccatcaataataatgacaggtgcatttcttgtggtaatatatggaggatactttgtgataacgtattggtgtagcaagaatataataaagtagaaataatattacaagattaatataagataatatagtattagaatattgtagctgaaaagctggttatcagtataataaagatatagaacaattgaataaagaaagattaagaaagcagttacatttgcggtgggacgcagatgtggctgctttttctacaatcaagctaagcggcaattccttccagccggaactatatgaaatcttcaataattccaaaaacctcattgacaaattgtatatactgtatataatgaaatatatacagtatatacaatgcattgattagaactggaggtaacaatttgaaaattattatatcgaatcaatctgaacttcctatatatgcgcagataagggagcagattaaggaacagattcttaacggacagattaaagaaggagagattcttccatctattagaagtttagctaaggatgttggggtaagtgttattacaacaacaagagcttataatgatttggagaaggaaggttttatagcaactatgcagggaaagggcagtgttgtcttatccagcaataataagattttgaaggaacaatttattatgagaatagaagaaggaatagaaactgccgtggaatcggcaaagcagattggtatgacaaaagacgagataattgccattgttgattcagtatggcagcaggattaaaaaggtacaataggcactaatattaatatccgtgaaaggagtagaaaatgaatattttggaagtaagaaatttaaataaaacatataaagattttcaattgaaagatgtaaatctgacaattccaaagggatatataatgggatttgtaggacaaaacggggcaggaaaaacaagtaccattaatctgattaatcatatatgtaagtgtgattcgggttcaataaagatagatggaatatcatatgcggatgatcctgtaagatacaaagaaagcatagcttacgttggtgatgaatgttattttacaaaaggtcttaaggtaaaaaatgtaaaacagacattaaaggaattttatcctacatttgatagcgaaaagtttgacagcttaattgaaaaatataatcttccaataaacaaaaacattattaacttttcaagaggaatgaaagtgaaattaatgtttgctacagtattttcgagagatgccaaattattgattttggatgaagcgactaatggacttgatcctgttgtgagggaagaattaatgggggaacttcagaaatatattgaaaatggtgaaagaagcattttgttttcaacacatgtgttaagtgatttggaagaaattgcagattatattacttttatagataacggtagaattattcttcagaagcctaaagatgaaatgcttgaggaatatatgattataaaaggtgattatggtaatttaacagaacaacagaaaaaatatttaattggagtagaaaataaaaattacggatttgaggcattaattgaaagcaataatgcacataattttgacggtcagtttgtttttgaaaagccaaatgtgtcacagattatgttacatacaattaaagaagggagaatgtaataatggcaaagatattatttatgaaatatgattttagaaaaatgaaattattatacttggcatccatagttctgtttgcaccattaggatatgttatggcatattcaactgagaacattctttctgcttattcatatatgctccttatttctacaatagtaccaacgtcactatttacatatgaacaaagagcagattgtggttttgatttaatgctacctgcaaaggaaggtgatagaattgcaggaagatatcttataagtgcagtgacgattatatatgaatttttattgggaacagtaattgcatttattttgacaaaaacaacacaggcagtttggtttgacatatcagttatatttaaattttttgtaggtggaattttaatatgtatgtctatagaattgtgcatattatacattataggaagagggataaacccacaagttagaagcgtaatgattatgcttcctaatatgataatatgggggattgcttatgcagcaataaatatttttagcgataaactatcaagtgcaaagggaatatttagcaattttgaaatgcttggaaatatagtgttaattgttagcctgatcttttatattgcttctatgtatgtatcgacatatatagtaaagaaaaaggattttcgataaaatttacagtccaaatttgtaatataaataattaatttcaaagttagttcatttcatagaaaaaacatatttttttacaagaatatttaacaaaaataatgagtttgcagtataatatatttatagttatttagggtataactatattgataaggactaaaatttaaatcagtagtaactgattacttaggaggtaatattatatgagcaaatacgaaggaacacagacagaaaagaacttggaagcagcttttgccggagaatcacaggcaagaaataaatatacttattttgcttcaaaagctaagaaggaaggatttgagcagattgcatcattatttttaaaaactgctgacaatgaaaaagaacatgctaagatgtggtttaaggaattaaacggaatcggcgatacagcacagaatcttgaagctgcagcagaaggcgaaaactatgaatggacagatatgtatgaaggttttgcaaaaactgcagaagaggaaggtttccctgaattagcagagaagttccgtatggttggtgaaatcgaaaaacatcatgaagaaagatatagagcacttcttaagaatgttgaaacatctaaggtttttgaaaagagcgaagttaaagtttgggaatgccgtaactgcggacatattattgttggtacaaaggcacctgaagtatgtcctgtatgtaatcatccacagagctattttgaagtacatgctgaaaattactagaataagataataaagtttgttatgataaaggagcagcttaatagttgctcttttttcttatgcattgaaaattataagaattaagaatagtatgaatataaatagaaaataaaaaattaaatagaaaaggtttagaaagttgacaataaaatgaaaaatagattttttaagtacgtatctcagaatattttggcaatgataggattgtcattatacattttggcagacacttattttatttctaaagcagtaggtgccaacggcataactgcgctaaatatggcattgcctgtgtatggggttatatttgcattgggacagatggtaggtgtaggttcagcaattagatattcaatagtaaaagaacagtacaggaattctaataaggatggtagtaatgaatgcgacaaatatttctcaggcgctttgttttgggggcttgttataggtgtgatttttgccgttttgggcctgattttcccagacaaaatcgtagaaataatgggtggagacgaaacaattgtagcaattggagttccatattttagaatatttatgtcattttcaccattttttatttttaattatacatgtaatgcttttgtcagaaatgatggtaatccgtcggtaagtatggcagctacattaataagtagtctttttaatattgtttttgactatattttgatgtttccacttggaatgggaatgccgggtgctgcccttgcaacagcactttctcctgtagttggagttatgatttgtatgattcatttcctatctaagaaaaatacagtaaagtttaaatggtttaaaacatccctgacacgacttttccattgctgccaggttggaatgtcagctttcgttggggaaatgtcaggagctgttatagttatggtttttaattttataatattaagactaactggaaatattggtgtagcagcatacggggttgtggcaaatacagcactggtggcagttgcagtttttaacggtgtagcacttggttcacaaccgttaatcagcgaaagttatggcaagcataacataaaggatattaagttaattgaaaaattaggcgtggcaacggcgttgggacttgcagtaattattgtgataatgatatggggctttacagatacaatagttggtgtgtttaacagtcagggcagtgataggcttttaagccttgcaagagtaggacttagaatatattttattggttttctttttgcgggaattaacatattttgctcaagtgcattaagcgccatggcttcagttaaatgggcattcgttctttccatacttaaaggttttgtggtagtaaatgtatgcgccgcaattcttgcaccaatctttggaatgaatggtgtttgggtagcatttcctttatcggaatttattttgttaattatttcagggtttgcgatgaaaaaatcaattggtgccttggaaagtgaaagataagatttgccataaatggcagaaaggtggtacaaatgaaaaaatataattgggcaacacttggatgtggagttatagccaacgaattggctgcggcaatggagaaaaaaggcgaaaagctttattcggtagctaaccgtacacatgagaaggctgtgcagtttgcagaaaaatacgggatcgaaaaagtttatgataatattgatcaggtttttgaagacgaaaatgtagacattatatatatttcaacgccacacaacactcatatagaatttttaagaaaagcattaaaggcaggaaaacacgttctctgcgaaaagtcaattactcttaacagcgaagagcttgaagaggctattaatcttgcaaaagagaataatgtagttcttgcagaggcaatgacaatatatcatatgcctatatataagaagttaaacgaaattatcagttcaggaaaactgggggatttaggtcttatccagatgaattttggcagttacaaggaatatgatatgactaacagattttttaacagaaatcttgcaggtggggcaatgcttgatattggtgtatatgcactttcttttgtaagatggtttatgacatcagtgcctgatcaggtggtttcacaggtaaaaatggctcctacgggagtggatgaacaggcaggaattttacttaaaaataaagaagaggaaatggcaacggttatgctttcgcttcactgcaagcaacctaaacgcggaacaatcgcttttgacaagggatatattgaaatctttgaatatccaagagggcaggaagcagtaattacttatactgaggacggtcacaaggaaacaattaccggtggaaatactaaagatgcactttattatgaagtggaagatatggaaaaaacaattgatggaataggagatttcacatatcttgaatatactaaggatgttatgcagattatgactgacataagaaaacagtggggcatgacatatcctgaggaagaaaaataagttaaaaaattatatacattttttcaaaatgtgctatactttagttagataagactaaccaaaaagtatagcatttttttgaaatgaggtgattataatgttaaacttaacagcaacatctttgtttgacggaacattagccacattccttgttgtatttactttgctattaattttaataacaaaaaataatattaggaaaagacttatgtaaaattttaacaaaagtaacaaaagacttactaaacttgttgacaactaatggacgttagagtatactaactatcgaaaatgaaattgattatcaataatcagtatgattacgaaagaaggtataaaatgatgccattaacagtagccggtgtaggcgtagctagtacaattaaaaagattggtggaaaagaagaaacaagaaagttcttagaaaacctggggtttgtagtcggtgggactgttacggtcgtatcagaaatcggtggaaacatgattgttaatgtgaaagattcaagagttgccattggaaaagatatggctaataagattatgatctaagatacggttttggtactgattatagttaaaatccggttttatattaattaagcttttaatatgatttaaaaaagatatgtatgtcatatatctttttaaatataaatacaataatgaaataaggagcacattatgaaaacattaaaggaagtaaaatgtggccaaacagtaaaggttacaaaacttacaggctctggtcccgttaaaagaagaattatggatatgggtattactaaaggtgtcgacatttatgtaagaaaagttgcaccacttggagatcctgtggaagtaacagttagaggatatgagttatctttaagaaaagctgatgctgagatgattgaagttgaataactttttttataagactttaagcaacagcttattatttttaacctagggttagctaattctaacaaaagtcagcaatgacagataatagttaactacgtatgcctataattaggtggaacatattaacaattttaaaatttaagaaagagggaaaaaagaaaatgtcaattaagattgctttagcaggaaatccgaacagtggtaagacaacactttttaacgggttgacaggttctaaccagttcgtaggtaactggcctggagtaacagttgagaaaaaagaaggtaagctcaaaggacataaagatgtaacaatcactgacttacctggtatttattcactttcaccatatacattggaggaagttgtagcaagaaattatcttattaatgagaagcctgatgtaattttaaacatcgttgatggtacaaatattgaaagaaacctttatttgtcaacacagcttatggaattaggtattcctgtagttatggctgttaacatgattgatatcatggaaaaatcaggtgacaagataagcattaaggacttaaaagaaagtttaggctgtgaagttgttgaaatctcagctcttaagggcaagggaattaaggaagcagctaacaaggcagttgaacttgctaagaaacctaaccatgaaatggtacataagtttgataaaaaagtagaagatgctattgaaaaagtagaagaaaagattgctttcgatattccaaaagaacagcagagattcttcgctattaaacttcttgaaagggatgacaagattaaaggacagatgaaaactgttccggacgtggaaaatgaaattaagcagttagaagatgcttttgatgatgatacagaaagtatcattacaaatgaaagatatacatacatttcttcagtaattggaaaatgtgtatcaaaaggaaataagggtgaacttacaacatcagacaagattgataagatcgtaactaacagatggttagctcttccaatttttgcagttgtaatgtttattgtatattacgtatcagtaacaacagttggtacatgggctactgactgggctaacgagggtgtttttggtgacggatggcatttgtttggcataggaacaagttcttatgaagatgcatcaggcgattatgaaaagcagacagcagcagttgatgctttcattgaagcagctaaggacaaaggaatcagcacagataatatcgaagaagttcttgggaacgaagaagcaagtgaagctgataagacagcagcagttgacgcatttgttgctgaagccggagtatcagacattactgcaaaagcagaacttgaagatgaagatggaaaagtaacagacaagtttgacgtaacagttaatgattttaagacagcaacagaagctgaagaacctgatcctgcagattatggagtttgggtaccaggtgttcctgttttaatcggaaacttacttgactcattaaattgtgcagattggttatcaggacttattcttgacggtattgtagccggtgttggtgctgtacttggtttcgtaccacagatgttagtattgtttatattccttgctttcttggaaagctgtggttatatggcaagaatcgcatttattatggacagaatttttagaaaattcggtctttcaggaaaatcatttatccctatgttaattggaagtggttgtggtgttcctggcatcatggcatcaagaacaatcgaaaatgaccgtgaccgtaagatgacaattatgacaacaacatttgttccttgtggagctaagttgcctatcattgcattaatcgcaggtgcattctttaacaactcaggttgggtatcaacaagtgcttactttgtaggtattgcagcaattatttgttcaggtattattttaaagaaaacaaagatgttcgcaggagatcctgctccattcgtaatggaacttccagcataccactggccaacattaggaaacgttcttagaagcatgtgggaaagaggatggtcattcattaagaaagccggaactattatccttctttcaacaatcattctttggttccttatgagcttcggttgggtagacggaaagttcggaatgttagaagcagaacagcttaacgatagtattttagcatcaatcggtagtgtaattgcaccaatctttactccacttggatggactaaagcaggtgaaggatggaagatggctgtggcagctattacaggtcttatcgcaaaagaaaacgtagtagcaacattcggtatgttattcggttttgcagaagtagcagaagacggtacagaaatttggggaaatcttgcacaggttatgactccaattgcagcatacggattcttagtattcaaccttctttgtgcaccatgtttcgcagctatgggtgctattaagagagaaatgaacaatgttaaatggttcttctttgcaataggataccagacaattcttggatacttagttgcattatgtatctatcagattggaacattagttacagcaggaacatttggatttggaacagcaattgcattcgcattagtaatagtatttatttatctcttattcagaccatacaaagagagcaatacattaaacgttaacatgaaaaaagcaagtgcaaaataataagttttaatataagggacctgcaattatttgcaggttcccatgtttttttgggagaaaataattggagcagaaaaaaagtgatgaactaaaatttcaaagaacaagaatgcagaaggaatcagttctgaagactttaaaagacaagggatgtagaattacaaaccagagaaaagttctcttggacgtaatccttgacgaagaatgcacttcatgtaaagagatttattataaagcagtggaaattgatcctaacatcggggcagctacagtgtatagaatggtcaatcttcttgaagacattggagctattagcagaagaaatatttataaaatttcatgcaaccttgactgcgtaaaggaaaacgcctgcactatagagttagatgataatatggtttaccacttgtcccggacggaatggaattctgtaataatgaaaggtttaaaagcctgtggttacttagataatcaaaaggtgaacagaattgttattgaatcagagaagaatacgtaataaagcataagcttattgataaaaaatatcaatagtgaaaaaatagtggaaaacttaaaaaaatagatttaatataatacaaacaaaagacaatggaggttgaaactatgttagattttattaagaaggttgacgttaaaaagacaggaatttttgcagcaggtgttgcttttggaacagcaggaattaagattttatcaagcaaagatgcaaagaaagtatacacaaattgcacagcagcagttcttagagctaaagaaagcgtaatgaagacagctacaaacattcaggaaaatgctgaagatatttatgcagaagcacagcagattaatgaagacagagctgcagcagaaacagaagaatttgaagatgtagaagaagtatctgaagaaacaactggcgtagaagaagatactgcagaataatatagaattatttgattttaagaacacctgtattttatacgggtgtttctttgcagtaaagatttccggaaaagaggttactttatatgaaatttgtaattaaacatgaaattaaaggtagaataaggattcatatattgcaaagccgcatgactttcgaacaggcagatacgttggaatattaccttagtaataataagctggtaacatcagtaaaggttagggaaagacttcaagatgctacaattagttatattggatcaagggaagatattataaaattacttacatcatttaagtataataatgttgaagttcctgatgtgtatttgcaaaattcaggtagagagttaaatagggagtattgggataagcttgttaacaaggtatttttgtatggtgccaacaagatattcctgccgaatcctattagggaatgcattactcttacaaagtctgttaaatatctttggaatggtgtaagaacacttgcaagcagaaagattgaagtgccggttcttgatgcaacggctattggtgtttcagttgcaagaaataatatgaacacagcaggttcaattatgttccttcttggaatcggtgaaattttggaagaatggactcataagaaatctgttgatgacttggcaagaagtatgtctttaaatgttggaaaagtttggctttgccagggtgaacaggacattcttgtgtcaacttctgatgttaaggcaggagatcttgtaagagtacatatgggaaaaattattcctttcgatggcactgttgtttcaggtgaggcaatggtaaatcaggcttctttaacaggtgagtcaataccggttcagaagaatgcagaaggtattgtttacgcaggtactgttcttgaagaaggtgaacttgttataagagtggaccagactaacggttcaagtcgttacgagaagattgttactatgatagaagaatctgagaaattaaagacttctatggaaagcaaagcttctcacttagcagacaaattagttccttatactttgcttggaacagggcttacatatgctttaacaagaaatgcaacaaaggcattatcagtgcttatggttgatttttcatgtgcattaaaacttgcaatgcctatatctgttttgtcagcaattagggaagcaagtttacataacattactgtaaaaggtggaaaatatttggaggcaatggctgaggcagacacgattgtttttgacaagacaggtacccttacaaaagctaatcctacggttgtagatgtagtgtcgtttaatggtcaggattctgatgaattattaaggattgcagcttgtcttgaagagcattttccacattctatggcaaaagcagtagttgatgctgcagcagagaagaatcttgaacatgaagaggttcattcagaagttgaatatattgttgcacacggtatttcatctatgatagatggtcagaaggttgtaattggaagtcatcattttgtatttgaagatgaaaaatgtacagttgatcctgagaagatgggtacttttaatagtttaccacctgaatattctcatctgtacatggctattaataacagacttgcagcagtaatatgcatagaagatccacttcgtgaagaagcttcggcagttatccggtcattgaagatggcaggaataggtaaggttgtaatgatgacaggcgacagcgaccgtacagcaaaagccatagctaagaaggcaggaattgatgaatattattcagaagtattgcctgaagataaggctaatttcgtagagaaagaaaaggctaaaggcagaaaggtcataatgataggtgatggaataaatgattcacctgcattatcagcagccgatataggaatatcaattagcgatggtgcagaaattgcaagagaaatcgctgatgtaacaataggcgcagataacctttatgaaatagtaacattaaaggcattgagcaatagcttagttaaacgaattgacaagaactacagattcatagtaagcttcaatgcgggcttaattgtactaggcgttgccggaataattccaccaacaatgtcagcattactccataatggatcaacacttgcaataggaatgaagagcatggaaaacctgcttgactagacagaatgataggaatgaagagtattgataatctattagactagtcaggatgagctgattgatatatagaattaataaattaaatacatcaatacacaaacacccccgatactaaaaaatgaaacttttagtgttgggggtgttttgctgaggtggaggggaaacaagaataatcgctaaaatctatataaattaaggatgtttccaatgggtgtcaggtggaaattacaaatatcgcaataaatttcaaataaaaacattgacatatgaatatatgtgcatataatagaattaaacatatgaataaatgttcatattataaaataacaattaatagtaccaaacaattttataacaataattgttgtagacacattagattgatgtagaaaaggaggtgcctatggtagataaagataacggcgagtttttggcagttcatgaagaagttgttaaaaaagttcttgaaactttaccggatgaggaagagttatatgacttagctgaattgtttaaagtttttggagattcaacaagaattagaattcttcatgcattgtttgaaagtgaactttgcgtaggtgatattgctcagattttgaatttaagtcagtcagcagttagccatcagttgaaacttttaaaggatgccaagttggttagatttagaagagagggtaagattattttttattcattagatgatgaccatgttagaacaattttaagtatgggaatggaacatattgaagaaagataagatgcgtaaatgtaagtaaaaaaaattaaagtttagattatatattaaagaaaaggagataattattatgaagaagacatacaaagtagaggtagattgtgcaaattgtgcagcaaagatggaagaggcagttaaggctacagcaggagttaaggatgcaacattaagctttatgacattgaaattaaaggttgaatttgaagacggagcagatgtagatgtagtaatgcaggaagcagttaagaactgtaaaaaagtagaagatgattgtgaaatcttcttataagaaattgcaaattataaaatccaaataacaaatttaaaataagaattgtaaattttaaattgttattttaatgcagattaagaagtgaaaaaatcttttctacagaaaacagttttagaaaggatgagaaaatgacaaaaaaacagaaaacagttttgtatagaattattgcatctgcaattttaattttaggtatttcaatattgtgtgaatttgtggatgtgaatatttggggacaggttgttttgtatcttattccatattttgttatcggatacgacattttgagaaaagctttcaagggtattttgaacaagcaggtgtttgatgaaaactttcttatggcgatagcaacagtaggtgcaatgcttttgggagaatttaaagaaggcgtagctgttatgttgttctatcagattggtgagttattccagagttgcgctgttggaaaaagcagaagaaacattgcagcacttatggacataagacctgattacgccaatattatagttgacggacagattgaacaggttgatcctgatgatgtggaaataggtacagagattgttgtaaatccgggagaaaaagttcctattgatggaattattacagaaggaaatacaacattaaatacaagcgcacttacaggtgaaagtgtaccaagagatgcaaaagtaggggaagaagttataagtggatgcatcaatatgacaggtgcaattaagcttaaaactactaaagaatttggtgactctacagtttcgaagattttggatttggtagaaaattcaagtatgaagaagtcacgttcagaaaacttcattacaaaattcgccagatattatactccggcagtttgctacggagcattagcattggctattttgccaccaatagtaagacttattatgggaatgtcaccggattttcctaattggattataagagcattaacattccttgtaatcagttgtccttgcgcattggttatctcaataccgttaagcttctttggtggtatcggatgtgcctcatctaacggtattcttgtaaaaggttccaactatttagaggaattatctaagacaaaatacattgtttttgataaaacaggtacacttacaaaaggtgttttcgaagtaaataaaatatatcctgcaaaggattttgatgacaaaacgttgttgtattttgcagcatatgcagaaagtggttcgagtcatccgattagtcagagtttgaagaaagcatatggtaagaaaattgaccttgaaaaagtaaataatattgaagaaattgcaggccacggcgttcaggctgacgttgacggcaagaaagttagtgctggaaacattaagcttatgaaaaaacttggaatcaatccaagtgacgaacacgatgaaggaacaatagtttatgtggctgttgatggcgtgtatgccggttgcataacaatttcagatattattaaaccaacaacaaagatggcaattgctgaattaaaaaagaatggaatgaagaaaactgttatgttaacaggcgattccaaaaaagttgccgacaaagttgcaacagaaataggcattgacatggtaagaagtgagcttcttccgggcgataaagttgagcaggttgaaaaattacttgcagaaaaaggagacaaagaagcccttgcattcgtaggcgatggaatcaatgatgcccctgtattatcaagagcagatatcggtgtggcaatgggagcccttggctcagatgcggcaattgaagctgcagatgttgtacttatggatgacgatcctgcaaagatagcgttggcaatgaagatatcaaagagaacacttgaaatagtaagagaaaacataatcttcgcattggcaataaaggcaatctgtcttgtacttggagcacttggtatagccaatatgtgggtcgcaatatttgcagacgtaggtgtaatggtacttgcggtgctgaatgcaacaagagcattaagaataaaattgtagaataaaaattaaataatgataaatatataatatggtacaaaaagggaatctttgcaaacaataggcagatttttgaaattttgtgagcatagcgtacagcgataaacttactgtttgagccgaaggcgagtttaagttttcgctgtacaataggcggcggagcaaaataataaaatcaacgtgtttgcaaggttccctttttggactacatataaacaaaattaattcgtaaatcctgtagtaaatttttcccacctatgatagaattaaaaataattatgggtttctatacgaaaaagttagagattcaattttaaggagatttaaaatgcttaataatgaaaagattatactaatgacaaagctgtcattatatgagcagaaaaatcaaaaaaaagagattaaaacaagcaagtatttcagaggtgattatatgtcactaaaaatgcttaagtcttttttatatataacagttgcatatttgctttgtttggttttatggtttatgtataagtctgacaaggttatatcaagtcttacaacaacaggaagacttacagctttaatagtaatgcttgtggttttatatattgtatccgttgttttatatatgatttttagttatgcttttttctcacacaagtttagaaatataagaaagcatttaaaagaatataatggagatttgaaaacactgcaccgtattcaggaattggaatatgatgccattattgatgaacttggagagggaggcgatgaagaataatgatgggattacttgtatataaggagaaattaaagaatttttacgcggaacatgagttttatgttaatccgattattaaatttatcagtgcgtttatagcattaactctaataaaaaagaatgttggatataatgatttattaacaatgtggcctgtaataatgggaatatcagttattatggcctttatgccttggacaattataatagcagctttaacggctattatgtgtattaacatatttacattatcaatagaacttggggcattagtggtaattattttgctaataatgttacttttgtattttagatttacaccaacacagggaatattcgtactttttgttcccatggcgtttttcctgaaaataccatatattgttccgattattgcaggattaatatgcacacctgtatcaatagtatcggttacatttggaacaatagtatattatatgatagccgtaataggcaagaatgcagacgcaattcagaatgttgcatcagagggaactaacgcagcaaatcttaatacagtattaaaaatgattagtgttaataatcaattatttttggttattgcagcatttattataactacattagtagtttattttataagaagatcatcagttaacaatgcctggattattgcgattatagtaggcggagtggtagattgtgttataattttggttggagcacttattttgaacacagagtattcaataattgaggttattcttgggagcgtaggctctatattgttaggatgcattattcagttcttcgtattttcagtggattattcaagaacagaacatactcagtttgaggatgacgaatactattattacgttaaggcagtgcctaagattaacgtggtagcacctgaaatgaatgttaaaagaattaatgcccagagaaagaaaaagaagaattggaaatagagtttgcaataaaaatcaaataaaaaacgttattcttaattgaagaggttttcgacattataaagcagagtattatggaaaggggaaataaagtgagcacagtattaaattatatttcaaattttatagaaaaatatttaacagtgccggaaatttatgcaagtgacattgttgaaatagttataatgtctgtagctatttactatgtggtcttatggtttagaaaaagccgggcatgggtattattaaagggtatttttgtgcttgtaatctttatgcttgtggcttctttatttcatttgacaacactgctatggatatttaacaagacattaagtgcaggtattatagcacttgtaattatatttcagcctgaacttagaagggctctggaagaattaggtagaaagaatgttattttcaaagtattaaaatttgaaaatggcaacaatgaatctaattttagcgacagatcagttgaagaaataacaagagcaactcttgagatggcaaaggctaaaacaggagccttaattgttataagacagcagcacgatttaggtcagtttattgaaacaggaataaagatagacggacgtatttcaagccagttgttaattaatatttttgaaaaaaacacaccattacacgatggtgcagttattatagatgaaaacagggtagtggcagcaacatgttatctgccactgtcagacagctcttctttaagcaaggatttgggtacaagacatagagcaggacttggaattagtgaagtttcagactgtatagttgttattgtgtcagaagaaacaggaagtatttccattgcaaaagaaggcaagttaattagatacgcagatgcttcaattctgaaaaatgagcttataaaggctcaggataaagaggaagttaaaccaagaagatttttgaaaggaaggggacgcaatgaaaaagatgttaacgaaactaaagatgtctctgacaaataatattggtttgaaatttcttgcagtattaatagcattggttttgtggctggcaattgttaatgttaacgatccggagaaaaccattactgtatcaaatattccaatatccgttacaaacgaaagtgcaataaccagcagagatatggtatataatgttaagtctgaacagtacttgaatattactgtttcaggcaaaagatcaattgtaagtaacttatcagcagaagatttcagggctactgcatctttaaaggaattgtcaaaagtcaactcaattcctgttgatgtaacaactaagaatgcttctctgggaagaaagattacaattgtaaaacagtcagcccagactattctggtagacgtggaaaatgttgaagaaaaagattttacagacttggttgttgagtatacaggaaaggttgctgacggctatgtggcagggcttagctcaatgtctacagacgaagttacagtaaaagctccaacatcaattattgacaaaatcaaaaaggtagcagtaagatgtagcttggatggaacaaacactaatatttcaaaaaaatgtcctgtaatactttatgataagaacgacaaagaaattaaatcggatgaaattgaattatcagataagaagataagggtaaatgttaatgttttaagagcaaaacaggttccaatttcaactataaataaagatgaattaggtaagccggcagatggttatgttgtggatgatgtgattctttcaagtgacagtattacagtttacggtagtgaagaatctcttgacagcattgaatcattagatatacaggatgatatagatgtgtcagatgccaaaggtgatgtgacacagaatatagatgtaacaggcaaattaccaaaaggattgtccgttagcggagaatcaactataaccgtaaaggttctaattaagaagcttatcacaagaacatttgaatatgatgcttctgaagtatctcttaatgacttaagcagcgacttggatgtacagctagttacaaaaaaggttaaagttactttacagggagaggaagaagtaatcagccaattaacaaaagatgacatggccattagtgcagatttggggaaagttaaggaaggaacaacaacggtacatgtggacgtagcagtgccggataacactacactgatgaataatgttacaataaaaattaaagcgaaagctaaataatggaggtagaataatgagcactattttagtaacaggtggagcaggatttattggaagtcatacttgtgttgaattattggaatcaggatatgacgtggtagttatagataacttaagcaatgcttgcgaagaatcacttaagagagtggaaaagattacaggtaaaactttaaaattctacaaaggtgacattgcagacaaggaattaatggataagattttaacagaaaacgatatttatgcagttatccattttgcaggcttaaaggctgtaggcgaatcagtacagaagccacttgaatattacacaaataacatttcaggaacattagctatgtgcgatgtaatgcgtaaacatggagtaaagaatattatctttagttcatcagcaacagtatacggagatccggcagaaattcctataacagaaaaatgccctaagggacagtgtacaaacccatatggctggacaaagtcaatgcttgaacagattcttacagacattcagtttgcagacaaggaatggaatgtaattcttcttcgttactttaacccaattggagcacacaagagtggacttatcggcgaagatcctaacggaattccaaacaaccttatgccttacattacaaaggttgcaacaggagaacttccaagagttaatgtatttggaaatgattatccaacacctgacggaacaggagttagagattacatccatgtaatggatttggctacaggtcatgtaaatgcaattgataagattaaagaaaatccgggagttaaggtatataaccttggaacaggaaagggatacagcgtattagacgttattaagaatttcagcgaagcaagcggaattgacattccttatgtaattacagacagaagacctggtgacattgctgaatgttattcagatgcaactttggccaaggaagaattaggctgggaagcaaaatacgacattaaggaaatgtgtgctgattcatggaattggcagaagaacaatcctaacggatacagataagattaattataagttactaaaaagaagatgattggagaaaagcatgagttctaggagaaaaacgaaaagctcagagcaacagttaaaaacagtaaaacgattaaaaagatttgtaacaacaatggaagttatttttggactacttatagttatgatggctgtgattttatttgtgccatcagtaaagacccaggttgtaaaggctatggcaaacacagcaataggccagaaaattataacctggtggggaaataacagttacaacgagagtgtacgagatcttaattttgatgataacagtatcaaaactaacaaacttaaatacaattattcagaagaatatactaattttgtattgtttggtgtagattcaagagaaggagaagttgatgcttctaacagcgattccatacttattgttagtgtacataacactacaggcgaagtaaaaatggtatcagtgtatagggatacttatcttggaatttacggaaaagatggaaccatttataagtactttaagattaattcagcctatgcaggtggtggacctgaagcggcgattaatacacttaacatgaatcttgaccttaacattactgattatgttacagttaacttttcaggtgttgctgagattatagacacattgggaggaataaaagttaatcttacagatgatgaattacagcagcttaattatcatatgagcagtacttgtagctcaattggtgtaaaacccaaatatgttaagaagagtggaaagaatattaagttaaatggtattcaggccacaacatattgtagaatcagaaaagctactttctatgatccaaaaacaggggaagaggttagagacgattttggtagagcagcaagacagcgttcagttatgatgaagttggtagaaaaggcaaagagtgcaagctttagcgaattgcaggaaatggtttcgggtgttatgaatgccaacactaacaaaaacaaaattatttccacaagttttacttttaaagaaattgttaatatgattccaattatatttgattttaaattatcgggaagtcagggatttccgtcaaaccttgaaacgggaactattagtggaaccagttatgttatgccaaaaggcttaagtgataacgtatcagagcttcatgagtatcttttcggtgaaaagaattaccagccaacaagcactgttaatactatcggaaatcagatacagactgatacaggtgtgtattcggatggctcaacaggtatagacatgagtggagatgctaaaaagaataaggaaggtgagacagaatccgtaagttatgattatgatgatggcggtaagagccagttttattaaaaatgtaggagttgcaaattgcgactccttttttctgcatatagtcgccgaaaatggcagcctgcaaacaataggcagattttcgcaattttttaataagtagaacacaaaatcaacacaactagccgttaaactatacctataatcaaataaggaatagatgaggtaatacaaaattttgttctttattaaaaaaaagagcctgaaaggagaaaaggaagatgtacgataacgagaatccaaatggatttggttcaaatccggagggaaacaacgatgacaatatatcaggtacagaaaacaataattttgaagaggtaaacagccagcaggtttcacaggatgctgtgaatagttcagaacagaatacagagcagacagctgaacaggaaagcagtgtttacagacagtcatatgtaaatgatgagcatcataacgcagatgatgtaagtggaaatggtacttattattcgcagggaagcaacaatagtagcaatgatagtacacagaatggcagctattataatagcaattctaataattcacagaataatggatattattattcaacaaatgattctcagacaaacaatggttacaattataacagtaacaacaataacaatggtaatggtaaaaagaagaaaaagaagagaactttaatagccgttgttgcagtttgtgtagttttacttgcaggaacaattggtatttcagcaacttatatttcaaagaataaagattcattaacaaatgttttggaagacggaacattaagcaacaatgataacaatagcaatagtaacaatgacaatagcagtgattcaggcaattacgaatcaatcggctcaacaaacacacagaacgatgctaattcttcatcgacatcaggcgttacagtaacagatgtttcaagtgttgtaagcagtgcaatgccaagtgttgtagctattacaagcaagacattagttgaatcaagaaacgattattcacaggatatttgggaatactattttggtggtggaaatagcggaaacaacaagagcaattcatatgaagaagatgcagcaggttcaggtattattgtagaccagacaagtacagaacttcttatagttacaaacaatcacgttgttgaaggcgcagacagcttaaagattcagtttgccggaacagaatcaaaggattcagttgatggatacattaagggaactgattcaacaaaagacgtagcagttgttgcagtaaaattaaaagacattccatcagatgtattaaaaaatattaagaaagctacattaggcgattcagataaagttaacgttggtgaaggtgttattgcaattggtaatgctttaggatatggacagtcagtaacaacaggcattatcagtgcaaaagacagaaaggttcagcttgaaaatcagacaatgacattacttcagacagacgcagcaattaacggtggtaacagtggcggagcattattaaatgccagtggcgaagttatcggaattaacgttgcaaaatattcatcaagcggaagcagctcaaatgccagcgttgaaggtatgggctttgcaatcccaatttcatctgtaaaagatattattagtaaccttgaaacaaaagaaacaagaacaaaagtatcagaagatgaaaggggttaccttggaatttcagggtttgatgtagatgagcagacatcacaggcttactcaattccacagggaatccaggtacagagcgtagtaaaaggtggccctgctgaaaatgccggaatcgcagcatcagatgtaattacaaaatttgacgggcaggatgtttcatcaatgacatcattacagagtatgcttgaatactacaagaaaggcgaacaggttaaagtaactatagaatacagagacggcagagaatacaagacaaaagatgttacagttacacttggcgacaagagcgtaattgaaacaacacagaatgccgcaaactaaaaaagttaaaaatttctttctcataaagtgttttgtttataacaaagaggcaatccggtagagggttgcctcttttgaaatgttaaaaaatatgtaacatttaagtcagaatatggtcaattttgtatgttttaattttagttaatatatgttaaactaagccatgtattaaatggtgtttcatattaaattactgatgttcgcagagtatgttgtggattagtatgtaggattaaatgtgatatactttttttatttgtgaataatatcgcagaatggagagatacaatgaacaaagatgaatttgaaaacaagactttagatgaaaatgatttccgagaggttgtagctgaaaacaatcaagttatagacaataactcaaaggaaaatgataataaagtaatagtaaatgatgataacaattctacagacaataacaatgttgataaaagtgagaatggtgattcatcacacaagagtaatgaagatgaatacgagaagatttgttatgtttgtagacgacctgaaagtaaagcaggaactatgattgatatgccgggtggaatttgtgtgtgcgcagattgtctgcagaagagttttaatagtttccagaactttggcatgaatatgagcataagcaaggatgaattagaagagttgcttaatactccgggaattcatatgatgactacggatgattttagaagagaaattccaaagaaacagaaacttaaaaagaaaaaatcttcagaaaagaaagaaacacctgttttggatattaacaagattcctgcacctcatgttataaaaggtaagttagacgattatgttatcggacaggattatgctaagaaggttatgtctgttgcagtttataatcactacaagagagtggcaacaaacacaatggacgaaattgaaattgaaaagtcaaatatgttaatgattggacctacaggttcaggtaaaacataccttgttaagactttagctaagttattagatgttcctcttgcaataacagatgcaacatcacttacagaggcagggtatattggcgatgatattgaaagcgttgtttcaaaacttttggcagcagcagacaatgatgttgaaagagcagaaacaggtattatctttattgacgaaatagacaagattgcaaagaaacagaatacaagtagcagagatgtaagcggagagtcagttcagcagggaatgcttaagcttttggaaggaagcgaagttgaagttcctgttggtgcaacaagcaagaatgcaatggtgccacttgcaacagttaacacaaaaaatattttgtttatttgcggtggcgcttttccggatttggaagatattattaaggaaagacttaacaagcaggcagccataggcttccaaagtgaattaacagacaaatacgataatgatcctaatattatgaaaaaagtaacatcagaagatttgagaaaatttggtatgattcctgaattccttggaagacttccaattgtatttactttggatggattaacagaagacatgcttgtaaagattcttacagatccaaagaatgcaattatcaaacagtatcagaaattgcttgaacttgatgaagtaaaacttgaatttacggaaggtgctcttagaacaattgccaagaaagcaatagaaaagaaaacaggggccagagcactaagggcaatcattgagaaatttatgcttgatataatgtatgaaattccaaaagatgacaacattggaactgtaaaaattacagaagaatacattaatggaacaggcggcccggtaataggaatgagaggccaggaccttatagaaggttagaagaacttaaaaaaataatagaaatataatacccggagttgtgtaaaattaattatctaaatttctataactccgggtatttttgtattgatttatattgtttgcattgtttatgtcctggaatacttgctatcgggggacgcattgcataattccgttcatatcttccaccgcttctacataaacttatattaattttatttcaagggcaatcaatgaattgtaataatattattttgtcggaggaatatggtgatttcattggcaggtataacggtgacattagtgaagccttaacggagcaggctgaatgtactcaggttatagacgattcgtacttttgtgcatattacaggcttgatatgctacctactataaatgttgctaattttacatacaatgttattccaaagttgtatggtttaatggatacaactgccgtggcggcaacaggttccataaggttgcagaaccagtcggggtttaatcttacagggagagatgtgataattggctttattgacacgggaattgattatacaaacaagctgtttcaaaagtccacagggcaaacaagaattttgagtatatgggatcagactgatgttaagggaaatccgccagagggctttagttatggaagtgagtatacaagagaagaaataaacagggcgcttcaggcagacaatccgttagaagtggttccgcacagggacgaaaacggtcacggaacttttatggcagggatagcctgcggaagttatgatgagcagggggattttataggggcggcgccggatagcgaaattgttatggtaaaacttaaggaggcaaaaaaatatcttactaattatttttatgccatgggaagtcagcctctttatcaggaaaatgacataatgcttgcagcttcttttttgaaaaatgtggcaataaaacaaaaaaagccaatagttatagttgtaggattaggatgtggaaatggtggaagagcaggaggctcacctttagatgaagtgcttaacagaataggaagcaaaataggcaactgcgttgtagtggcagcaggaaatgaaggcaatgaaagacttcattatagaggtacaataggaatagcaaccgaaaacaccacccacaacgtagaatttcgtgtaggcgataatgtgccgggctttgttttagaactgtggggtaacgctccggatatattttcagtaggctttgtgtcgcctttcggggaaagcgtgccaagaatcccggtgcggcagggtagcgtagaaaacattaattttgtgtttgagcaatcttcaattgaattagcatatgaacttgtggagtcggggacaggaggacagttgatttttatgagatttaaacagccaagccccggtatatggactattaaagtttacggaaataatattctagatggaaactttaatatatggggcggacttagacaatatacaccggaaggaaactattttctaacacctaatccggatatgacattaacagtgccggccgcgacagagaatgttataacttttggaggatatgacaatgtaaccaatgccttctatcccaagtcggggagaggcttcacaagggagaatagaatcaaaccagatttgacagctccggcagtaaatgtttacggtccgggaatttcaggagggtatacaagaaggactggaacgtcagtggcgtgcgcattaggtgcgggagcctgtgcacagatacttcaatggggaattgtggaggacaatgagccatatatgaaaaacaattacattaaaaactaccttataagaggggcagaacgaaacagagacattaggtatccaagtgaacaatggggatatggaacaattaacgtatttgatagctttttgattttgacaagaacataaatatgtaaaaaacaaaaaatcactgtttataattgagatagcagtttgtttagtatataggggttccgtaacacaatattaaactttggtgttaaggagccatttacttaggataaaggtaaaaaagctggaaggagaaagaaaattttacaattctatttttctggaggaagatagcttctatatacatattgatgaacagtattatatttctcagatagaaaaacttatcgaaatatcaggagttacaggtgaatacgttaaaccaatggaattgtatgcaatattaagtgtaaaatatactgaaatagaacaggacgaatatgaacgcattatactgttatttgaaaaattcagatttggtggaaaaacattaagagattacgaactttatgtacttgaatgttttaagaataagtttattaaattgttatacaaaaagagcaaaatacataaaaaattaattttaagatacaagtatttgctttaatggggtatacaaaaaacaaattagtgatatgataaagtccgtaagataaatatagggaggtactcatgaaaaatttatttaaaagaattattacaacgattttagttctaacaatggttatgggatttaacgttccgttttcagcaacaacagtaatggcagcatcaattacatacaatgttagttctaccataaaaggcgtacttacagatgatggtgtgcttacaataagtggaacaggggctatgcctgattatacaaagatagccaacattccatggtacaaggacagagacagaataagtgaggtaagagttaacagcggaattacttctattggagaagcaaactttaactcatgctataatatgacaaaagtagcagttgcatctactgtaacaagtattggtgatggcgcttttgcagacactaaattacagtcttatacaggaatggaaagagtaaaaacatttggagattatgtatttcagggaacagatttagatgattttgaatttccgggagcaacaacagaaataggaaattacattttttataacagttcagtaaaaagaatagttattcctaaaagtgtaacaactattaaagatggcataggatataaggctgaaaatcttgaaaaaatagaagtaagtaacaacaataagaattatgttgctgaaaattatgttctatataataagaataagaccatattagaaagctatcctgcagctaaaacaggaacagaatttactattccatctacagtaaagaaagtaacggcatacggttttagctatggaaagaatttaaaaaagataacaataacaagcggtgtaacaactttaggcgatggagctttttatgaaatgaaagcattagatgaaattgcaatacctaaaaatataacttctataggttcatttctattacagaattgtacagcccttaaaactttgaagttttatgcaaaagtaaaaacagtgccatatcttttatgtagtggatgttctaatttgacaaaggtggttatggataattctgccattgaaacattagaacctagagtttttatggattgtgttaagctttcaagtgttacattacctacagcactaaaaacaatacaggtttatgcatttaagaactgcaaagcattgtcaacaataagctatccaaaatcaattacattaattgaaagtggagcttttgaaggctcatcaataactaaatatccaacatggctttcaaagggaaacaatggagattatggtatttttacaaaaataaaatataaaggtacagacaagtacagtgaagcctataaggttttgaaaatagttaacaaagaaagaaagagcaaaggcttatcggagttgaaaatggataaagaccttcttgacgcggcaatgcagcgagcagcagaagtggcactgtatttttcacatacaagacctgacggatcgtcatgctttagcgcaacagacaaaatggaagcggaaaatattgcaggtggtcagtcaagtgcagctgcagtaatgacatcatggatgaacagtgcaggtcatagagcaaatattcttacaagctattttaaaacaataggaattggttgctttactcagggtggaacagtgttctgggtacagtgttttggaacagacacaccggcaacaataagtcagccggcagataagaacgtagtggttacagtaacagtagacggagacttcttaagcaagacaaaacttacattagacagtagtagctataaccttaaagtaggaaacaaaaaaacaattaaactttatgtacaaaaccctgaatgggcatcacaaaatgtattgttagacaacagtaactttacttttaagtcttacaatacaaagaaagccacaataagtgcaacgggaaaaataaatgccaaaacagttggtaaatataaaataaaagcaacacttaaaaacgcaacaggaaaatctgttacaaaaagtggaaagataactttcccacagcctaaaatcaaagtaacagtaaagaagaaaaaagctattgttacatggaagaaattaaaggctgcaaagggttactatgtatatagaagggaagcaaaaggcaaaaagtatacaaagtggaaaaaagttaagaatataaagaagaatacaactgttaagtacaaagacagcaagcttaaaaaaggcaagacatatcagtacaaggttgtagcttataatagaaagaacaaaggaacatcagcaattaagaagatagttattaagtagcatcagaatgattatacggattgctatgtgcttagcacttttgacactgtaatcatacaaaaatcaacgcatattaaggcttatgcgttgatttttgttttaatatgtattaaaataattcggatagtaggtgttaacaacatagatgttgacaagagctacactaaaaaataaataataggagaaagaacatgaaattatcaaaacttgttggggacagatttaaggaaaaaccggctaactgtcttattgacagccatgcattaatggtaagaggaggatatatcaagaacgtagctaatggtatttactcacagttcccgccgatgaaacgtatttctcaaaaaatagaaaatataatccgtgacgaaatggataaacttgatggacaggaagttttattccctgtagcattacctggaagtctttgggaagaatcaggcagatatgaaagcgttggttcagaacttttaagatttacagacagaacaggaagcaagatggttcttggtatgactcacgaagaagcatctgtacagcttgttagggaatatgctaacagctatgctaaatatccatttatgatttatcagattcagactaaattccgtgatgaagcaagaccaagagcaggacttatcagagtacgtgaatttacaatgaaggatgcttattcattccatacatcacaggaagatttggaacagtattatcagaaagtttatgatgcatacagcagaatttttgcaagatgcggtattcctgaagttgcaatcgtaaaatcagactcaggtatgatgggtggtagcatttctcacgaatatatgcttttaacacctgtaggagaggattcaattgcaatctgtcctgaatgtggatacagtgctaatgtagaagctgcaccaagcattattaagaatgaaaacaagattccaaaagaagaattaaaagaagtttcaacacctggtacaggtacaattgaagaactttgcgatttcttaaagatacctgcagaaaatacggctaaggctgttgtataccagaaaaatgctgatgacagctatattgttgcatttatccgtggtgaccttgatattaatgaaacaaaattaactaatgcagtaggtgaagacattcatcctgctgtaattgaagatgacagtattttaacagcaggctttatcggacctgttggaatttcagacaaggttacagtatactttgacaattctcttgaaggaattgattatcttgtaacaggagctaacaaggttgatactcactacacaggatttaatgtggaaagagattgcccggatgctaaatacgttgaccttgcaaaaatcacagaaggaggtatttgtccaaactgtggcaagcctgttattaatatttcaagaggtattgaagttggtaatatcttccaacttggtacaaaatattcaaaggcaatgaactttacatacacagacgaaaatggtaaggaacagtatcctattatgggatgttacggtataggtgtaggtcgtatggcggcttcaatttgcgaagtaagacatgatgattatggcccaatttggccaattacaattgcaccttggcaggttcatttgtgttgcttacgttcagatgatgctgaatgtaaggaaaaggcagatgaaatctatgaaactcttcagaatatgggaattgaagttatttatgatgacagaaaagcaagacctggagcgatgtttgcggatgctgaccttttaggtgtacctgtaagagttgtggtaagtccaagaaatcttgcagaaaatgtagttgaaatttcaacacgtgacaagtcaattgacaagcagaagactccggttgaccaggcggtaacagaagttcaaaacattattaataaacttacagcagacattaatagcaaagttaataaataaaacattatgtgccacgtagaattgcgtggcacatagttgttatgcattataaagattagggtgttaaaataacaaagttttagtacaccctataattattgttacaaaagaaaaatcacatagagaggattggaaaatgagcgaatataaattaattggattggatatggatggaacattgcttaactcaaagaaaaagattacaccggaaaatatggctgcaattgagaaagcatttagtcagggcaaggaagttgttttatccacaggaagatcagtggcagaattaagggaatatacggatattattaaaggactaaaatatttagtatgtataagtggggcaatggtatatgaccttgaaaaagaagaaataatatattgtgctcctattccaaatgaagttatagacaaagtatcagaaatagcagaaacaagtgatgttgtggtaattctacagacaacagaggcaatagcgaaaaaaacagacttggataatcttgaacatttccatttgaatgtttataaggagttgttaaatagtgtagcaacaaaagtagataatgtttttgaatattgcaaacaaaaaggacagtctgcaagtaaaatcaacatttaccattctacacctgaggcaagggaagcaacaaagaaaatattatcaaaatatgatttggtatttaattatgcagaaggaaactctcttgaagtatcacctgccaatgttactaagggaacgggcttaacatggctttgtaaccatttgggatttggaattaataaagcaatagatgtaggtgatgcagaaaatgatatggatgcaatagcgaccgcaggtcttggcgttgcaatggcaaacgcaattgacaaagtaaaagaaatagcagatgttgttttggaaaatgattgtgatcatagtggatgtgcggaagcaatagagaaatacttgttaggataagaatgaagtaatacaaagtataaagcgattggctttaaaaagtgttaataagattactctacgaaaagtggggtaatcttaatttatggaataatattatagaaaaaagagaatgctgtgaaaaaatcttaataaggaaataatgagaatatatcaggcaaaaaaagccataatacctttgttaaaaaaatcaaaaaaaatcaaaaaaagttgttgacagacaaagaaaattatgataaattattctggctgtcgaaaaacgacagaaattc

SEQ ID NO: 12700 - DNA, 331 bp, Unknown
  gut microbiota DNA sequence
aaaggtgaaaaggaccccgggaggggagtgaaagagaacctgaaaccctgtgtttacaagctgtggaagtgccttatgtgcacaaccgcgtactttttgtagaacggtccggcgagttacgtttactggcaaggttaagtactataggtacggagccgaagggaaaccaagtcttaagagggcgtgaagtcagtaagagtagacccgaaaccgggtgatctacccatgtccaggctgaagctgccgtaagaggtagtggagggccgaacgcacatccgttgaaaagggtggcgatgaggtgtgggtaggggagaaattccaatcgaacccg

SEQ ID NO: 12701 - DNA, 257 bp, Unknown
  gut microbiota DNA sequence
catccttttccacttaacacgtactttgggaccttagcagcaggtctgggctctttcccttttgactgcccaacttatctcgtgcagtctgactcccgatgagcatctttacggcattcggagtttgatatcccttggtaagctttgacgcccccttagaaattcagtgctctacctccgtaagactccatcgaggctagccctaaagctatttcgaggagaaccagctatctccgggttcgattggaatttctccc

SEQ ID NO: 12702 - DNA, 341 bp, Unknown
  gut microbiota DNA sequence
aagtagattcctgcaaaggtcacaatctgtagaaaagcaatcaaaaagaacggataaccagccgataaggtatagagcatggttgaaatactaaatgctgtcgtaataatcaatgtgattccagctcgtgtcaaaatggtattaaagagctttgttatggctcgttttgacataccatcaaatgatggaatcatgcttaaaataaagctcacaggcagaaacatagcatagatgataaaaagtacctgcgagaaaatcatgattcctgttaataggaatacaaatatggaaatcccaatattgaagacaaataggaagaagactgtacctaaacggttaat

SEQ ID NO: 12703 - DNA, 17084 bp, Unknown
  gut microbiota DNA sequence
gttctggctcgaaaatctcaatcttcgaggcggtttcaaaaagacaattatggattatatcgccggaaaatatcctgatcttgtaccactttacgacgagatctataacaagcataaccgcagctactttgaagcacttgaagtaaaagctgagaaaatggctaagaagtatgattgtgcctttgtggataatgaaatgccttatggcagagtcccgcagggacatccggtgatcgtagattatttctatcatgaggaaatccgtgggacagagaataccggaaaaagaaatcgctaactttcaagtttgcagaactgacccaaaagagctcgaaggagctctttttccttttttataatagtatcattatggtataatagatacattaaaatcggaatttgtagatgcaagataaccaagagtatttaattgacaagctatgaatcatttgctatcattgaatggtatattaataagacagttcgtttgtaccatcctgtctctaaataaaaccagggctattatttttataatttataattggaattttttagaaaaataatctattaaggcacgggtacagatggatccgtgtttttttatgcaatattagcaaatggagaaaaggtttatgtatattttaaaaacggaggcaagttttgactcagcacattttcttgcaggatacgatggaaaatgcagcaatcttcatggacatagatggaagattattcttgaagttcaagctgaggaactaaaggacgacattcagcataaggggatgtacgtggattttggagaattgaaaaaagatttaagagaccttgcagactcaatggatcacgcattaattatagaaaagaattcattgaaggaaactacacttgaagctttaaaaagcgagaatttcagaattattgaacttgattttcgtccaacagcggagaatatggcaaagtatttttatgaaaaaataaaaaaacttggatataacatgaaagctgtaacggtatatgaaactcctgtcaatagtgcaacttatatggaataattataaataattttctaatgtgaaaggagttgtatatgagtaaatatgaagtggttgaaaaatttgtaagtatcaatggtgaaggaactaaagccggacaacttgcggtttttatacgttttaaaggctgtaatcttaagtgtaaatattgcgataccaaatgggccaatgagcaagatacactttatcaacccatgacggaagaagaaatacttgattatgttttatcaacgggagtgaaaaatgtcactcttaccggtggtgaaccattattaagagacgatattgaaaaagttataacagctcttgcagaaaacaatctgaatgtagaaatagagactaacggtagcatttttcttgacaaaatccgtaagcttcataaagaaaatgtaacttttacaatggattataagctttcctgtagtggaatggaacagtccatgaatctaggaaattttgatattttaaatagcaatgatactgtcaaatttgtagtaggaagccgagaggatcttataaagacaaagcagattatggaaaaatataatctgtatggaaaatgtaatctttatataagtccggtatttggaatgatagaaccagaggaaatagttgattttatgaaagagaatgtaatgaatgatgttaatatgcagattcagttacataaaataatatggtcaccagataaaaaaggagtctaacatggaaaagcataagaaaatagatactaaagcaatcgaatatcatatagctggtattcttaaagctctgggtgataaccctgaacgagagggattaatagacacacctaaaagagttgcaaaaatgtacgaagaagtttttgagggaatgaattatacaaatgaagaaattgcagatatgtttaacaaaacatttgcacttgatagactggaagaagagttcgaaaacgtggaatgtaaaagtcaaaatggaaattctgatatggtagtggtaaaagacatagatattttcagttattgtgagcatcatcttgcacttatgtatgatatgaaggtaacggttgcctatattccaaagggaagagtgataggtcttagtaagatagcaagaatagcagatatggtatcgaaaagattacaacttcaggaaagaataggaagtgatattgcagatattatgcagatggttacaggagcagaagatatagcagtacttattgaaggatgtcacagctgcatgactgcaagaggaattaaaaaaactaacacaaaaacatatacacaaacattaagagggagatttaacaatgaaagcaatggttttgttcagtggtggaatagatagtacaacatgccttggtatggcagtagaaaaatatggtccagaaaatgttattgcattatcaatagcatatggtcagaaacatacaaaagagatagaagcatcagataaaattgtaaaatactataatgtagaacatatttatcttgaccttgcaaaaatttttcaatatagcgattgttccctattatcacattctgataaggaaatacctaaagaatcatataatgaccagattaagagtacaaatggttcacctgtttcaacatatgttccatttagaaatggattattcttatcaagtgctgccagtatagcactttcaaaaggctgcagtgagatatattatggagcacatgcagatgatgcagctggaagtgcatatcctgattgtagcagcgattttaataatgcaataaatgaagcgatatatcttggaagtggaaaacagattaaggttgtagcaccatttatcaatgcaactaaagatcaggttgttaaaaagggacttgagataaatgtgccatataaatacacatggagttgttatgaaggtggagaaaaaccttgtggcaaatgtggaacatgtatagacagagctaaagcgtttgagttaaacggaattaaagatccggcaatggaataaaaaggagaagaattatgacaggaagaagcaaagaagagacagcagacataacattattaggtaatcagaaaacacagtatccatgcgattatgcaccggagatgttagagacttttgagaataaacatcagggaaatgattattttgtaaaatttaattgccctgaatttacaagtttgtgtcccataacaggtcaaccggattttgccactgttacaatatcatatgtacccaacattaaaatggtggaaagtaaatcattaaaactatacttatttagtttcagaaatcacggtgattttcatgaagattgtatgaacataattatgaaagatttgataaaacttatggatccaaaatacattgaggtatggggaaaatttactccgagaggtggaatatcaatagacccttactgtaattatggaaagcctggaacaaaatgggaagaaatcgcatttaatagaatggcaaatcatgatatgtatccggaaaaggttgataatagataagaataatagggaaaatagtgatataatgaacctatcaaaataaaaattgagataggaggattacataatggaacaggtagtaaaattttaaaaggaagcagaaacatattatttggcaacagtagaaggagatcagccaagagttagaccttttggaacagcccatatttttgaaggtaaattgtatattcagacaggtaaaaccaaggatgtttcaaagcagattcacgcaaacccaaaggtagaaatctgtgcatttaaggatggagagtggctccgtgtggctggagaacttgtagaagatgacagaagagaagcaagacagtctatgcttgatgcatacccatctttacagaatatgtactcagcagatgatggtaatacagaagtattctatttcaaaaatgccacagctacatttagttcatttacacatgaaccacaggaagttaaattctaataacaaaggattagtgctggaggtattattgtgaaacttaagttagtaaaagcaacaaataaatatcgtaatcaaattgtagatatgttagatgagtggaataattctggtgaagaaattattccatatgtaattggtcgtttagattacagtgattttgattactattgtaacaatctggaagtaagagacacaagtgagggattagttcctgattctacatttttttgcttagatgaagaacgaaacattgttgtaggtgctgtaaacattagacattatttaaacgaagcattgttattaaatggtggacacataggagatggtgttcgcccatcagagagaagaaaagggattgcaacaaaaatgatatcgttggctttgaaagaatgtagaaagctaggaataaataaagttctgatggtttgtgataaaggaaatattggttcggctaaaagcattgaaaacaatggaggaatactagaaaacgaagtcgtggttgatggtgttgtggaacaaagatactggattgatttggataaggttcgaagtgtagaatgattgacaaagagaatggaatctgtaggagggagtatcatatgataggtttaatagtagctcgttcaaaaaataattgtattgggaaaaatggaaaaatcccatggaaaattaagggcgagcaaaaacagttcaaggaacttacaacaggaaatgttgtggtaatgggacggaattcatatgatgaaatcggtcatccactcccaaatagagaaactatagttatttcaaaaagtaaaaaatatgttggaagaaatattcatacagcatctagtgtaaaagaggctatcgagttagcgaaaggaaaggatgtatatatagccggtggttatggagtatataaagaagctataccattagtggatgtaatgtacattactgaaattaatataaatatagagcaaggggatgtttttttcccagaatttgatgagaatgattttgatataacaattgaagaaatgtctgaggacaatgaacagtttacaagaaagatttatagacgaaaagtagcagtaaaaaatcgtaattttaaggagcaaagatatgaatactattgtacagctgtttcctcttgaatgtagcgatagagaacagtttattttggataatcaggaagcctttaattatggtgcgatggaagaatttggacttagagatgaccactttgaggaagagaatcaaatcatatcacgggatacgattgagcagtccattgacggcggagaagcctaccgtatcgtactggacggtcaaaaagtcggcggcatagtgatcaaagttgacggcgaaaaaggtgaccttgatcttctttttgtttctccggctgtccatagcaaaggtatcggatatgctgcttggtgtgctgttgaaaaactgtacccggaagtgaaggtgtgggaaacggtcactccgtattttgagcagcgcaacattcatttttatgtcaatcgctgcggcttccacattgtagagttttttaataaatatcaccaagatccgaatgatccggaaatgtgctccgaagaactggacgagcagttcccggacggaatattccagtttgaaaaggtcattcggtaaattccagtttgtatggtgtcttttgtgattaaacaggaaaatagtggtataatgaatttattcaaataaaaaacaggaggattacacaatggaacaggtagtaaaatttttaaaagaagcagaaacatattatttggcaacagtagaaggcgaccagccaagagtaagaccttttggaacagcacatatttttgaaggcaagttgtatatccagactggtaaggtaaaggatgtttcaaaacagattcatacaaatccaaaggtagaaatttgtgcatttaaagatggtgaatggctccgtgtagcaggagaacttgtggaagatgatagaagagaagcaagacagtcaatgcttgatgcatatccatctttacagaatatgtattcagcagatgatggaaacacagaagtattatacttcaaaaatgcaatagctacattttattcatttacatatgaaccacaagtagtgaaattttaatggaaagcaatttataataaatagtttgtctagacataaataaagactatggattttactgttttcgaacataacagtgtgtctatagtcttttctaagtttgtatgcttttttgagataaaagcaacggcatagtacgttatgagaggaatatacagtgtcgttatttttatggtataatgcagatatgaatttaacaaatggaaatttgataaagcaataataaaaaggtaatcagtatgaataacacagaaaatagattttttgaacaatataaaaaactagataatttatgtaaggatttattaaataataatcagggagtttcagcgtatataaaagagatggaaaaaattccaatttttgaaagacaattagttaagtcctgggatagcgattacaaaatgcttaagcatattaggtggattagaaataatattgcacatagtgattacagttcagagtgcgaagaaaaggatatcgcatatacaagaaatttttaccagaggattatgaaacaggaagatcctttttcggtaattaggaagaaaaaagcaattcaatctacaaaacataatgatactgttaatataggtgaattttggaaaaatgaaaattataagaaaaagaaaaattatatagaatatatagaaaataaaaaaataatattattgattttgattattatttttttagctattgtggcaaggttttgcttttaataagaaggttatatttaagggagagctagatgcttacagaaaagaaggagagtgtgtatgagaagattttggggattttataaaaatgaatcatattgtgtaggttgcaatggtgccactgtttacatatatgacaaagatgaaaatgaaatagcaaggtttaagaatatcccttatgcgtatactgtagcttttatgccgggaaggaatattattagcgtaaaatcaacagaaggatttttagctttttatgatcttgattcattgtcattattaaagaaaatcactgttacgcgagatggtgcacaggatgaaggctttgcgtttacacctgacggaaagttcttttacaatattgaaaaaccattttcttcaaccagaactcagcttggaatatatgaaacaaaaacatttaccaaagttgcaacattgtttgcggaagacaaaaatatggtattggattgtttggaatttgacaatgaaacaaatatatgctatgtaatgggatttatgcgtgctgataatggagtatttgattatggctttgttgcaatatttgataaggaaagccaaacaatacagaacattagagctattgaagagggtaagtataattatcttcatgagtataagcattgggaagctagtgggtttactgaaagacaacttcagtggtgttcgtttaaaagaaacaagaatatagaaaaaacaagtataaaagaagtttatgaaggggcggaaaagagagtttaatagcagtgttgtatatatggaaagtgatataaaatgaaaaaggtataattcaaacaataagttggaattttgtggaggtataatatgaaagattttatatttgttactagagcagtggagtgggaaaaactaccttgtgcaacggattgcttgcacactataaagcaacatgttcaaaattagaatatgaaaagccatctaaagatttgttttactcttggtttttgcaaatggattaagatgatttttagtgctctcgacgatgataagaatttaaacggataggtaaattttaaaatgatagaaaatattaaatatggaaacttagaaactagtttcaaaatggtaaattagtactaatgagacgataggagttatttatgacagaacatacgaaattaagtgatatacctgaattttgtgatgaagtagaaaagtagcttaaagagctatatggagaagttgaaggcattaaactttggaaggcaacaagcgaccaatataatgaatatttaaaagagttgccggatttttagtaagtcgcaagattatgaagttctaattctaaactgtccgggagttatgccataatttttatgaaaaagttcgcagtaataacttgtgtttgaaaaaccacaggcatatgctatttcagtaattgacatttccgtattttgaagaagaaaaattgacttctctaagcggtactgatttagatataacataggagatgtggttaaatattttttgaaaagttcagtacatttggttttacagcaatttccggcagttgaaatatctttaagcagaattttgttagagtaatttttttgtacgtaaccaatcattgcggtaagcgcaataacgtcatcattattttgcttattatcagaaaaagaatccatattgtcaaagagtaatcctaatatatgagaggttttttctaaaatagtaaacggatgtatcttttctaaattattttcgtaaagtgcttcaaggttgcaaagaatagaattttgccattgaatggcagggcttaatttctgataaggaaaattagtattttgcaccaaatgatttaagtaattttccacaaaataattattagtggaaagaagttgtggagatagtggaatgcaaataaagatacattccgtgtgtgaatcagaataaccataatgaaaacaacggctgtttacaaaaattccttctccggtctgtaaggaaatcttatgaccatttatatcataagacatttgaccatctaaaataagaataaattcaaaatcgtcatgccagtggctgacagcacgaaaatcaggatagcttgaaagttgtccttttttgatatatgcaggaaagttagtgatgttataagcaacattttcagatgcatctgaatttaaaataatgtttgggcatgattccataatattattctcctttgcgaacgattgttatattattatggctgattttggtataaaattcaattataattgtttatttttgtgttggaaagaagtctaaatgaataaaaattaacggaaatggagagttaaattatggttatgaaaaaaagaagaaatatgcaaatggcatatgttgcagatgaagctgcaatggaagaacaggctaaattcagaaagattttgcaaaaacttaattttgcagataggtctgattttgatggaatagcaaagatagcaaaagagctttttggcaaatcagaagacgcctgcattaacccacctttttattgcaattatggtttaaatattgaagtgggtaagaatttttacgcaaattataattgcacaattatagatgtggcaaaagtaataatcggagacaattgttttatagctcctaatgtttctatttatacagcagggcatcctatttatccggatacacgtaaatctatgtttgaatctgcttattatgctattgggagtagtgctttttgcccttggaacaggattttatgcagcagcttcccttggacgtggctcttatgaggcgctgactttttcacttgcagaaaagaacggatggcaagtaaaaatagtgcgaatgatattggatgccataatggtaattgttggagttttattggggggaaagtttggaatatgtacgattgtaacaattataatttccggaccgataattcagtttacagcagcgagaacgaaaaaattatttagaatttgaaaaaatagttagaataataacggtattgtgaaaaggtatacaaagatgttattttgaaaaaaacaaaaaaatgcggaaacgtgctaaaatagagaaataaaaaatgcggaaatagggtgaaacgggaaaataaaaaatgcggaaatgaattatcgtatatgatacaactcgaattatgcaggattgatatttatgctatataaataaaaaaggagaacattatgaatttagaagaacaaaagaattttattttaagtggaaagatgtacaatgatttaacagacgaattagtgaaagctcgtgaaaatacggtatttctaaccaatgaatataatgcaagttttggagaaaaagcggaagtgagggaagttattctaaagaaacttttaaagtctgttggtaatggagttcattttgaacccaatttcagatgtgaatttggatataatatttcaattggaaataatttttatgctaattttgattgtattatgctggatggtggaggcattgagattggagataatgtactttttggaccaagagtaggtatttacacatctaatcacgcaatggatgcatgggaacgtgttcacggagcctgctatgccaagcctgttaagataggaaacaatgtttgggttggtgcaggagtacatattaatcagggcgtaaccataggagacaatacaataattggttccggaagtgttgttacaaaggatattccggcaaatgtagttgcagcaggagtaccttgcaaagtgattcgtgaaataacagaagaggacaaaacagaatatcgaccataagagtttaattgacatttggacagcaatgttggatgttatgccatctatgttcgtaatcctagcaatttatgtagttgctttaattttaaccaatgtaattactattgcaaaagtcaataagaagtaagttataaagctaaatgcccaccactatgatgatacaggttggacgtagtaattatgagccagataagacgtaggtcttatctggttttcccttttttgtgtattttaatgtcaatgggcatattatttggagttggtggttcagggcagatgaggatccaaacagagcaatggcagctgttttgcttggtgagtggtaaatattgtacttgatattgtttttgtttttcttatgcaaatgggaattggaggagcggcacttgcgtcagccattggaatggtaatttaggtattagttggaattactcattttttgagcaaaaagaataagcttaaatttatcgctccaaaacatacaattttttaactattggagttatgggacttattttctcattatgcggagtcttattccccaatggagtttgctctgtatttatgaatccgaatgaagaaattattagtgttctgtttctgttgcagaataggaaaaattaaatattatggtataatatatctaaatttaattaaagaatggaggcaacataaattgcatttttgttattgcccgtattgtggctcaagacttatcggaaaagaaatcggagatgaaggaataataccttattgtgaaaattgtaatatacctttgtgggatatgtttaccacaagtattatcacagccgttgtaaatgaatataatgaaatcgctctattaagacaaaactacgtttcagcaaccaaatatgtatgtgttgcaggaataatgaaaatgggtgagtcagccgaggaaacagtgattcgtgaagtgaaggaagaaatcggtcaggacgtggaaagcttagagtttataaaaagttatccttatgagaaaaaagaaatgctaatgcttggttacaaggcaactgtaaaaaagaaagagtttaaattatcaggcgaagttgattcggttaaatgggttaagtttgaagaggcgttggctttattgagagaaggaagtgttgcatggcaattagtgaagcaggttatagaaaaatgataaaaataaaagcttacgcgtgttataaaggataaccatacataagcttttattattgaattgccctttcggcttaacattattgattcgacctttcgtctataattatgctaacatagaatttagagaaaatcaatcacaaaaataaattaatcaatttctattaatttattatattcaagttgaagagtatcatgttcattttttaatacattataattatgttccagttcggtatatttttgttgtaaagaagtaaattcattattaattttgtataagcggatattttctttaggaaaagctaatttaaaaagagtgtttttgatttctttaaataacgaatcctgaagattaatatttttaagttttccctttttggaaattaatcgccctgcacttataactttgatgtcggacaaaagaatggctcctgttttttcaaatccatcggatttgtcacccatatcatttccgtatactttgcgcatcattttgttaccatctggattatcaataggatggaaagcgttttttatgttgtcaggtgttgtggaaacaggaacaactaagtacattccgcctattttttcaagaatgacaacggggtgatggtaagaaaattcaggtttataattgattcctaaatctgcataaaaaatgtcacctatggaaatgcaaattttagtcgaagtaaaatttcttcttaaaaaccagttttgcaaactcataataaaatttgcagattcgtcttgtctcatctttcttatttcttcaacactgttaacttcgagattgagaaattcatttaggcatactgccgaatcagatgtatttttgtttttgttgtgtctatcacgaattatatttctaagtgattcaaaattaattttcaaaagtagtacctcttcttcctttaattagtcatttgtaatgttgagtttcataatatcataaaaataaatagatgtcattgtcaaaatggcataaaatgataaaattattacaacaatacttacaataagaattaagtatcaaaggagggagagaactatggctagaaataataacctgatgattagtgaaattaaaaaaaatttagaaatgacagataacaaggttaaaaaaattgaaagtaatttagaaaaaatcgaaacaaatgttaaagaaatcaaaaatacattagatgattctaaagccaaagaaacagttaaatcatctagaaaaattttaaagtatattctaacgtcgattgtaccaatagcctctttgggtgtggcaattatatctttgatagtagcaattaaggcgtttgaatcgagtaaaaaaataggaataaataattcagcactatctttttcataccaaagtgttaatatagaaaaattaactacaaaagagggaattgaaatagtaataggtggcagtaaaagaacaagaggaggtgcaaaattaaaaattgatgtaaaagttgagtcgggtcaaatggcgtccttgtatttgattgaaaaaaatggagaaaagctcgagtttgaacttttaaattcagaaaatatacagaatagattttcaggaataaaaacatacgaagtaaatgcatactttgatatggaaaagaaggaaaaaatcaaaaacataaaaatgggaatgggacaattgtatgtacttgcagaagatttaaatggtcaggtatatattgacgtaattcaaattattggtccgattatacaagaatctgatgagatgaatacagcacaagtttatgataattatgctgaatatagttttagatatttgaagaataataagttaattacgttgaatgaaaatgatgattttgataaagaatgggttgaattaacagatacatatccagaaagtttaaaagaaactaacatagaaaaaatagaggaggatatatcaatgataagagaaaaatattcaaaatacaaatattagtgatgatgaaaaatggtgattgttaaaaataaatatattattaaaaatagaagtttttagtaatagataatttataattagagattagaataagagggtataaatgaacaaaatgacaatatattttcatcttccgggcttgtttgaattttatgacttttatagtgtgtttttgcccttgtttagagaacatagagaatatttttatgattggtgtgaaattggttcgatatacggtgccccggcagactgtctttggggcggtggtcgtgcaggttttggagagtgtaatactaaagttgtattaaaacttatgaatgaatacaacatttctccaaggcttacatttagcaattcattgttaagagaagagcatctttcagacaagaggtgcaacgatttatgtgaaatattttataaagaaagcaaagcgcagagtggcataattgtacattcggatttacttttgaattatttgaaaaataaatatccgaatttttattttgtatcatcaaccacaaaagtaataacagattttgaagagtttaaaagagaagttaacagggaagaatttagttatgttgtacctgattttcgattaaataaagattttgaaaatttagaaggattaactaagactcagaaaaataaagtagaatttttgtgcaacgaatgttgttggtttggatgtaaggataggaagaactgttacgaagctgtaagccgaaaaaacttaggagaaaatcaaaaggagcatatatgtaagtcacctaccgctgaaaaggggtatcgcttttcagaagcaatgaaaaatccgggatttataagcataggtgacattgaaaataaatatgttcctatgggattttctaactttaaaattgaaggcagaagtcttggaagtgcgttgatattagaatttttattgtattatatgacaaagcctgaataccatataaatgttagggaagaaatatatctggataatatgcttgatttgttttaaaagtgaagtatatacaactaatatcattaatgctatgcttaggagcagcaggaaccaacaaaaacaaaaaagattcagagtagttcattaaatatacacagattactggtttaatattagtataaataatagaagataattgaatataaatcagccagagaaaaattcagtagcaaacaataggcagatttttgaaattttgcgagtatagtgtaaagcgataaacctactgtttgagccgtaggcgagtttaggttttcgctttacaatagacgacggagcaaaatgaaaaaatcaacgtgtttgcaataaatttttctcaggggattaggttttgccaattatctaaagtgctatggaggaatattatgaaacaattaaagattcttgttgtagatgatgaagatagaatgagaaagcttgtaagagactttcttgtaagaaaacaatatgaagtagtggaagcatccaacggtgaagaagctgtagatgtgttcgtggagagtaatgatattgaccttattattttggatgttatgatgcctaagatggatggatgggaagcctgcagggagattagaaagatttctaaggttccaattattatgctgacagcaaagagcgaggaaagtgatgagttgcttggttttgaacttggagttgacgagtacatttcaaaaccgttcagtccgagaattcttgtggcaagagttgatgcaatccttagaagaactaataatataggtcaggatcagattgaacaggctggagatattgaaataaacaaggcggctcatattgttacagtaaagggtgaacctattgaacttagttttaaggaatttgaattgttatcatatttcatacaaaataaaggaattgctttatcaagagagaatattcttaataatgtatggaattatgattattttggagatgcaagaactattgatacccacgttaaaaaactaagaaataagcttggagaatgtggcaaatacatagttacaatttggggcatgggatacaaattcgaggttaactaatgaaggatatagataagaataaaatgaaacataccatcggttacaagatgaccgtaattatagtggcaatcatgggattatccctgattgctgctagtatatttagcagctttttcttaagcaagtattataagaaaacaaagcaagattctattaagaaagtatataatgagttaataaaaataactcaggatgattcagatatagaaaacagtgatgatgtttccatacttaacaatatatgtgaaaaagccggagctactatgattgtagttgatagtgccggggaatctatttatgattacggtgccggaaaaatgcttgcggaccgttggaaggatatgatttttggtagtaatactaagcagaaggaagagccaaagattatagaaaaaaatgacaaatacactattcaatctacagtggacagattttctgccaatcaatactatgagctttcaggaggtgtatcttcgggaaactacgtagttataagaatgtcagtggaaagctttagggaaagtatagctattgcaaataagttttatttaggtgttggaatatcacttattcttgtaacaacaattattattattgggataacaagaaagtatacacagcctcttttgcagttagctgatatttcaaaaagaatgtcagaacttgattttaatgtaaaatatgcagatgagagagatgatgaaataggtgtacttggagaaagtatgaacgaaatgtcagataagctggaaacggcaatttcagagctaaaatctgccaatttacagcttcataaggatattgcaaagaaagaagaagtagatgaaatgagaaaggaattcatttctaatgtttctcatgaattaaaaacacctattgcacttattcagggttatgcagagggacttcaggaaagtataagtgataatccggaggatatggattattattgcgatgttattatagatgaagcaggcaagatgaataagatggttaagaatcttttaacgttaaatcaattggaatttggtaatggcagtgtaaatatggaaagatttgacattacatctgttatagccggtgtaattcattctatgcaaattaaggctaatgaaaagcaggttaatattgaatttaatcagatggaacctatctatgtatgggcagatgaattccagatagaagaggttataaccaattatttaagcaatgctttaaaccatgttaacgaaaaaagaataatccaagtgaaaattcaggaaaaaaatggtatagtaagagtgtct

SEQ ID NO: 12704 - DNA, 442081 bp, Unknown
  gut microbiota DNA sequence
gacaaagcaagaacaagagcttatggtggcaacggtataggattatctatagttaaagccattatggacagacacgaaaagaaatgtggagcaattaacagaccggatggtgttgaattttggtttgagcttgattgcaattcattagagaaagggactgaataaatgatagcaattattgactatgatgcaggcaacattaaaagcgtggagaaagcatttcagtatataggagaagatactgtagtatcaagagacaaggatgttattctttcagcagataaggtagttcttccgggagttggttctttcggagatgcaatggagaaattgagagattatgatcttattgatacaatcaataaggttgtggaaaataacacaccttttcttggaatatgcttaggacttcagcttttattcgaaagcagtgatgaaactccgggagtggaaggacttggaattttaaaaggaaagattcttagaatacctgacaagccgggatttaagattccacatattggatggaactctttggaacttactaataacggaagattatttaaaggcattgaagaacagtcttatgtttattttgtacattcatattatttggaagcagaagatgagcagatagttaaggcttcaacagattatgttacacatattcatgcatctgttgaaagtggtaatgtttttgcatgccagtttcaccctgaaaagagtggtgatgtaggacttcagattttaaagaattttgcggcattataatatagatttgggagagaaatatgcatacaaagagaattattccatgtttggatgtaaacaacaatagagttgtaaaaggtactaattttgtgaatttaagagatgcaggtgatcctgttgaagttgcaaaagcttataacaaggcaggagcggatgaacttgtatttttagatattactgcgtcttctgaccatagacatactgttacggatttggtaagaagagtggcagaacaggtttttattccatttactgttggtggaggaattagaactgtggatgattttaaggaacttttaagagagggcgctgacaagatttcaattaattcatcagctattatgaatcctaatcttataagtgaagcggctgacaagtttggaagtcagtgcgttgtagttgccattgacgctaagagacgtgaagatggtagcggctggaatatatacaagaatggtggacgtgtggatatgggcatggatgctgttgaatgggcaatgaaggttgataaacttggagcaggagagattttgcttacaagtatggattgtgacggagtgaagcagggctatgacattgaacttacaaagattatagctgaaaatgtttctgttcctgttattgcttcaggtggagctggaactatggagcatttttatgatgcattaacagagggaaaggctgacgcagctcttgcagcttcattattccattacaaagaattggaaattaatgatttaaaacattatttagatggtaagggagtgccggtacgtttgtagaaacgtagatacttaaagatgaaatattattttattattaatcctaacagtggaaaaatagacacaaatcagtttgaacagaggattttaaaggaatgttcaaaagaaaaaattaaatacaaaatattctatacacataatgcaggggatgcaaagaagtttgcaaaaaaaatacctgatgaagaatgtgttgttttttctgtcggtggagatggcaatttaaatgcagttctaaacgggttggcaggttctaagaataagattcttggaaatattccaacaggcagtggaaatgattttgaaagaacacttaaccaatatgatgacggaatacatgattttgattttggaattattaatggaagacattttattaatgttgcctgtgtaggacttgatgctgatgtggctaacaatatttcatggattaggaagaagaaatggattccggtaagccagcgctacaatgccagcattttgtatacttttattaaatataaatttaaaaaagtaaaagtacagatagacgataatcaaagtttcgaaaaccaatgcacaatacttgccatatgcaatggtcaatattatggtggaggttttagaatggcaccccacgctacacttgacgatggattatttgatgtatattttgtggaaaaaatgccaaagattaagattttgccattgtttgtgaaacttctaagtgcaaagcacgaaaagtcaccacagattaagaaatatcaaggaagaaaagtgattattgacagcaatcacagatacacttttaacgttgatggagaaatggttactgatactcattttgaaatagaaatgagaaaacatgccgtaaaggttttctgcaataaggaatttgtggaaagaataataggaaagtaacaggacaaagttataatgtagatacactggttagggtgtaatttaacaaaggataatatgaaaaataataccaattatcaataatgaaggtaatattgaaacgaggaataggaaatgtcaatgatagataacgattggcttgtgcctttaaagaaggagttttcaaagccatattataaagatttattcgagtttgtaaaaaatgaatacagtactacagtggtatatccacctgcagatgatatttttaatgcatttcattttacacctcttaaagatgtaaaagttttgcttttgggacaggatccatatcataatgtgcatcaggctcatggtttgagtttttctgttttgccgggtaacgacatacctccttcccttaaaaacatttatcaggaattgcatgatgacttaggttgttatattcctaataatggatatttaaagaaatgggcagaccagggagtgttgttgcttaacacagttcttactgtaagagcccatcaggctaactctcatcagggaaaaggatgggaacagtttacagatgcagtaattgaagctgtaaatgctcaggacagacctatagttatctttttgtggggcgcacctgccggcagaaaagctaagatgttaactaatcccaagcatttggtcttgaaagcaccacatccaagtccattgtcagcatataggggattctttggctgcaaacatttcagcaaggcaaacgaatttttaaaagctaacggtgttgaacctattgactggcagattgaaaatatatagttgaaaagatattaaataaatatcatgattgcataagtagaaactatttgtgcaagctaataaacagagaaagcaacatccttcttcttgacgagccgacaaaccaccttgacgtagatgcaaaggacgaattaaagcgtgctcttatgacatataaaggcagtgttttaatggtgtgtcacgaaccggacttctatgaagaatgggcaacagaaatcttggatgtaagcaagtggacaacaaaaatagatatgtaaaaataaaagggctatccatcgcggtagcccttttataaaatattaaaatactaatatatcaatttattcaattctaaacctataaagcctatttcttcccaatctttttgtttgctgttgcaagcattaatttgatacggttaagctggttaacttcactggcaccaggatcgtagtcaacggctacgatgtttgcttcaggatgctgtgcacgaagtttcttaataacacccttaccaacgatgtggttaggaagacaagcgaaaggctgtgtacaaacaatgtttggaacaccgtcgtggattaagtgaagcatctcacctgttaagaaccatccttcaccagtctggttacctattgaaacaacatcttcagccattttactcatttcccaaatatcagcagtaggagtaaagtgcttactttctataagagctttctttgcagaacctctcatccattcaatagctttaattccaaggttattcattctaataatactcttgtcaaaacctaatttttcaaccttaaatgttgcatttctaaatccataaaggaagaagtcaacaaggtcaggcataacagcctcggcaccttctgattcaagcaattcaactaagttattgttagctgtaggagagaacttaacaagaatttcacctacaataccaactctaggtttcttaatatcttttacaggaatagcatcgaattcttcaacaatcttcttcatattcttcttgaaacgatgaatcccaaaactattatctgaaagctctttgcaaagcttgtattcccattttttatgtaaagcattagtttctccaggattaacttcgtaaggtcttgttctgtaaacaacacgcataaataagtcaccatagaggcaggcttcaacagcttttagtgcaagctttggagtgattttgaaaccgctatgatgttcaagcccacttaaacttaatgacaatacaggaatttgggacataccggctttttccaaagctcttcttataaatccaatatagttagtagcacgacatccaccacctgtctgagaaataactacggcagttttgttcaaatcatatttgccggaaagaagagcattcattatctgaccaacaactataagagaaggataacatgcatcattgttaacatattttaaacctgtgtcaatacatgatttgttactttccattacctcaaaattatatccgcaagcattaaatgcagcctgtaacattgtgaaatgaattggactcatctgaggacaaagaatagtataattgtcatcacgcatctgcttagtaaattcaactttattaaatgatgaaggctgaatgtaacgttcaaaatgattttcgctacgttccctaattgcagcaagtaaagaacgaactctgattcttgcagcaccaaggttgttaacttcatcaatctttaatactgtgtaaatctttcctgattttgtaagaatatcacttacacagtctgttgtaactgcatccaaaccacaaccaaaagagtttaactgaatcaaatcaagatcatctcttgttttaacaaagtttgcggctttgtaaagacgtgagtgatacatccactggtcagaaacaattaaaggtctttcaacatcagcaagatgtgaaactgaatcttctgtaagaacagcaagaccatatgagttaatcatttcaggaataccgtggttgatttcaggatcaacgtggtatggacgaccggcaagaacaatacctctacgtcctgtttcttccatatatttaagagtttcttcaccctttttcatcatgtcattacgtgaagcaataagttcatcccatgctttgtgagaagcactcttaatttcatcttctttaatgccaagagctgtaaattcttcaacaagtcgttttgtaagaatttcttcatttgtaaatgccataaaaggattcataaaattaattgaagaatcttctaaagcttcaacgttgttcttaatattttcagcataagatgtaacaataggacagttgtaatggttgttagcatcaggtgtttcatttctctcatatggaatacatggatagaaaataaattttgcaccgttttgtaataaccactcaatatgtccatgagaaatcttagcaggataacattcagattcactaggaattgattcaatacccatttcgtaaatcttatgtgatgacttaggagaaagcattacactgtatcctaagtctttaaagaatgttgcccaaaatgggaagttttcgtacatatttagaactcttggaataccaacaacacctcgtggagcgttttcaggagccaaaggttcataatcaaacattctatgatatttatattcaaaaaggtttggaatgtgatctttgttcttaacaccaccaatacctttctcacatctgttaccactaataaatctacgtccgtcagagaatttattaattgtaagaagacatgcgttagtacatcccttacatcttgtcattgaagtagtgtaatcaaaagattctaactgttccaatgaaaggatagtagtttcctgtcctttatatctttcttttgcaataagagcagcaccgaaagcacccataatacctgcaatatccgggcgaatagcttggcaacctgcaattttttcaaaacttctaagaactgcatcgttgtagaatgtaccaccctgaacaacaaccttacgtcctaaatcctttgcgtcagaaattttaataactttgtataaagcattttttataactgaataagcaagacctgaagaaatatctgcaacagtagcgccttctttctgtgcctgcttaacattagagttcataaatacagtacatcttgtaccaaggtcagtaggattacttgcaaataaggcttccttagcaaaatcctgaacagagtaatttaatgatttggcaaaagtttcaatgaaagaaccacaacctgaagagcaggcttcattaagctgaacgctgtctacagagttgtttttgattttaatacatttcatatcctgtccgccaatatcaagaatacaatcaacctgtggctcaaagaaagctgctgcatgatagtgggcaacagtttcaacttcaccttcatcaagcaataaggcattcttaataagagcttcaccataacctgttgaacatgaacgtacaatgtgtgcgtcagcaggaagcttcttgtaaatatccttaactgcatcaataatagtctgtaaaggattaccgttgttaccactatagtatgagtaaagaagggttccatcctcggcaaccaaagcagctttagttgtagtagaacctgaatcaatacctaaatagcaattgcctttgtatgtagcaagatctccctttttaacacagtccttattgtgtctttcagtaaattccttatattctctttcgttattaaataaaggatcaagacgtttaatttccatagacatctttatacctttagataactgttcatataaatcagaaatgttaacttttacattttcagaatggttaagagcagaaccgattgcagcaaacaaatgagaatgttcaggtgcaacaatatgctcatcatctaattttaaagttctgataaatgcattctttaattcaggtaaaaagtgaagtggtccaccaaggaaagcaactgttccacggataggtttaccacaggcaagacctgaaatagtctggttaacaacggcctgaaaaatagaagcggctaaatcttctttagtagcaccttcgttaattaaaggctgaatatctgtttttgcaaaaacaccacaacgggcagcaataggataaatagcctgataattcttggcatattcatttaaaccactggcatctgtctgtaaaagagaagccatctgatctatgaaagaacctgtaccaccggcacaaataccattcatacgctgttcaataccgttagtgaaataaataatctttgcatcttcaccaccaagttcgatggcaacgtcagtctgaggtgcataatcttcaagggctgaagctacggcaacaacttcctgaacgaaaggtactttcaagtgatttgaaagggcaagtccacctgaacctgtaatcattggtgataattctatatttcctaatttgtctttagcttctttaagaagagaagccaaagtttcctgaatatttgcataatgtcttttgtaatcagaaaaaacaacatcattattcttgtcaaggattgcaatttttactgtggtagaaccgatgtcaataccaagactgtaatattctaattcattcatttttttcctcctaatgccttaataagccattaaagcatttataattgaaatctaatcattaaaatcagtaaagttattacaatgattttaattaaaaattttagttcaataacgtatctttttcatatttaataaaagtatttacgcgaatttctatattataatataattaataagaaaaaacaacccaacaaaaatagacaaaatgttaaaagcctatgtctaaaaatgaataaaatgtaatattatttagacattaaaacaaataaaaagaaatgtatggaaaatatgttgaaaatcccattaaaaacattgaaagtagtttgacaaacagtggtttggaaattatactgtaaattggtttattatttgaagagaagttgcagattacatattttttgcaatatctttttggtgaaaggcagaggagaatttatgatttctaattttgaaagaaaatacggcaagtatgctgtaaagaatcttaccttatatttaatagcaggatatgttattggatatatggttagtttaataaatcctacattgtatggtcttttaacatttaatccgtatatgattttgcacggacagatatggcgtatagtaacatgggttttaacaatgccggaggaattaagtatcttcacaataattatgctgattctttattatcagttgggacagactttggaaagaacatggggaacgtacagatataatgtttatcttatatcaggtctcatatttacagttgtaggtgcaattgttttatacgtagttttgacatttgtttataaagatacattttcaagtcaaacattaggaagctacattggtgcttatgtaagtacttattacattaatatgtccatattcttagcttttgcggcaacttatccggaagagcaacttatgttgtatttcattatacctattaagattaagtggtttggagtattgtatggagcatatatcttaattgacatttacaacgcttttagttatgcaagacagattgggacatatgtgattgcaattattacaacggtacttattgttatgtcgttgcttaactttatattatattttatttctcttaaaaagaatggaggagcctttagtgtggcccaggcaaagcgtaagaaacagtacaggcagcaggttaacagagcaagacagaatcagacttaccagaatggcgcaagacataagtgtgcagtctgtggcagaacggaattagatgatcctaatttaacatttagatattgttctaaatgctcaggcaacaaagaatattgccaggatcatttgtttacacataagcatatgtaattgatttttataatcattataatatacacaataacaggaggactgaaaaatcatggaaaagaaaccatttgtaacacttgaacagttaaaggagattgaaaagacatacccaacaccttttcatatttatgatgaaaaaggatttatggagaatgcaagaaaagtaaacgaagcgttttcatggaataagggttttagagaatattttgcagtaaaggctgaaccaaatccatttattattaaaaagcttaaagaagcaggatgtggtgttgactgttcatcatatacagaattaatgatagctgataagcttggatttagaaatgatgaaattatgttttcatcaaacgaaacacctgcaggagaatttaaatattgtaatgatttagggggaattatcaaccttgatgacattacaatgattgattatatggaagcagaatgtggaattcctgaaacagtaagctgtagatataatccaggtggagtttttgaagtatgtaacggtattatggataaccctggagatgctaagtacggaatgacccctgaacagatagttgaagcatttaagattttaaaggctaagggagttaagaactttggcattcatgcattccttgccagcaacacagtaactaatgaatattacccaatgcttgcaagaacaatttttgaacttgcagttaaacttgaaaaagaaacaggagcagacattaagtttattaacctttcaggtggtgttggtatcccttacagacctgatcaggaaccaaatgacattatggcaattggtgaaggtgtaagaaaggtatacgaagaaattcttaaacctgaaggaatggatgatattgctatttacacagaaatgggacgttttatgatgggaccttacggtgcattggttactaaggcagtacatgagaaacatatttataaagaatatattggtgttgatgcctgtgcagtaaacttaatgagacctgcaatgtatggtgcatatcatcatattacagtaatgggtaaggaagaccagccaaaagaccatgtatatgacgtggttggtagtctttgcgaaaataatgacaaatttgcagttgacagagaacttccaaagattgacatgggagattttatttatattcatgacacgggagcacatggcttctcaatgggatataactacaacggaagacttcgttcagcagaattattattaaaggaagatggaagtgtagaaatgattcgtagagcagaaacacctgcagattattttgctacattcgatttttcagacataatgaagtaaggagcaatccgggtaatacaaaaagtaacaaaaaataaggaaaaaaaagtgaaaaagatagtaggcgaattattaaagaacaaacacgtagatgaaaacttaaaagcatattgtggaccatttatggaaataaataacaaatatgcaaatatccgtttggcaatgaattattacacatattacacaatgactttagaagatgaaagtcttttaagtacagagaatatgtctggtcttgctacaattaacttaattattgaagaattaatgaatggggaaagtgagaagatttctgaaaacattgaaaagttagaaaaacttagagatggaattattgagaaggttcaggatcttacctgttatgttgacaagtttaacatctatgaacatgcattaaacagagttgaatacagattcagagatgacgattatccgtcaggatatagtgatgagaacattacaagaagattaatgcagtttattcttgaagatgaagataatatggcaattaacagaaagataagtcaggtaataggacagcttcctgttagacttacaaaaaataagtttttcgaaatgttatctaacggccttagcatttataagggtggaactaaggaaagtcttaagaatttcttatatatgttaaaaacaacagcaatgcttgaaaatacagaaacaatgactgttaattacccttacttagacgatttctttaaagaatttaaagaggttaagtttaagaaaataacaaaagagcagtatgatgaaatgatgactaatattgctaaagtttcagagtatatggaagatttaatgaactcaaatatgatgattcaggaaatcttaaatgatttgcttattgtcttatatacttatgaaaatcagttagatgataatattgttaaggggtgtacagagattataaaagatacaaaccttttattcttaggcaagtttagtcctaaatcattagaagaaatagaggatatgtttgtaatgcttgaggggattcaggaagaattatatcctaagttatcttcctatgatataacagaccagattatggaaagttatagtgaaaacattgaaaaacttggattaaaggatgtatatgatgtggtatacaaacttccaaggcttaattcagacagtatgtttatggaacttacagttgatgaggacaatgctacagccgatgaagaatatgtaaaggctaaggaagaagaactttacaaggaatatactgagttgtttgcagacaacgagaaattgattaacagagccgtaatgtcagcttcaattgcagaacttcctgtatttttcaataatattagtgaattacaggattatatttataatacattgtcagtatgtaatgataaggctgaaaaactagcttgtattgaaattttaaatggaataatggaagaataatcagttgtaatatatttgcagattgattattggagataagtatgagatggtatgatgatttgtatgttggatataatctgttagacaaaaagagacaggttatgtggaaaattaaaaggggtaaacaacagtttaataaatatgttattacattaccttttaatgattatgatgtacttgacatctatccatctaatgtacttactcagaaatggtataaggattcagatattgtaattgttggaattgccgaaggtagggaagaggcaatggatatggtacaattaataataatggattgtctaaattccacgggaggatgcaaagtgaaagactatatattgaatcttatgaatgaagaaagaagcaagagagaagagtagcctatggtacatatattattacttattttaaaaataattggtattattgtattatctattctggggcttgctttacttattttgttttttcctatagtatatgtaggaaaagtaaatggaaatattgaagagaaaaaaataaccggtaatataagagccggatggctttttcatctgctacattgcagattatggattgagaacacagagatacattataatatccgactattaggaataaaaataaaatcttctgaaacaaaagaaaaaaagaaaaaagaaaaaagaaaaaatcagtctgaggagcaatcaccgaagaatgaagaagaaaaatcacaggatgaattgaaagaggatagtgttaaaaaaactgacattaaacaaattggaacttccgaaaatgaaaaagagcaggaaattcaaaattccaatttggaagagactgatgtaaaaaatcaaaataatgagaatataaaaagtgaagattcaaagaaaactacagaaacaaataatagaaaaaaagaaaagaaatcttttataacaagaatgcagatttcctttaaaaaattaaaacaaagaataaagaaaattgtagaaaatataaaagataaaattcataatataaaagaaaatgcaaaaaataaaaagagcagtatagatgaaatgataaatcagattaaaaccgttaagcaatttataacttcaaagacaacaaaagaggcttatgcctatggcaaaaaaatggttctaaaacttctaaagcatttagcacctaacaggataaaaggcaatctatatatgggatttgaagaaagttatttaacgggagaggcattaggcgctcttggaatgatatatggaatatttaatattaatcctaaaaggtttaaggtttatcctgattttgaaaataaagtgtttaaaggtgacattatttttaagggacatatttacttaggcgtggttataatatattgtttgaaattttattttaatgaaaatataaagagaattataaagaaatttatttagggaggcattattatggcagataacaaaaaacctacagatgatttattaaaggcaatggaaaaatttattacaacaaagtctgttgttggagaaccggttgtggtaggagatacaataatccttcctatggctgatgtttcttttggaatgggaataggtactttttcaaaaggagaaacaggctcaggcggagttgggggaaagatagtaccaagcgctgttttggttattaaggatggttcatctaagcttatcagcattaaagatcaggatggattatcaaggattattgatatggtacctgatgtggtaaacaagttcacttcaaagaatgatgtaaaagatgattttagtgactttgaggaaatggatgaagatattaacgactaaaaactaattatatgcatatgctaatattataaaaaataaattaggaagagttatgcataaactatgtggatttgcgttattttggcttgcagttggaatgacgctttcattgttaatagagagtactttttttgtggtgtgcataatagtaatatgtcttttggcaggatttaatctgttttgctgcaaaccataaaaacaaaagaagaggagacagaaattaatgaacattgcagatttatttaaaaaagaacacacagtattttcttttgaggtttttccaccaaaaaaggaaagtggtatagaaacaatatattcaacattaaatgagttaaaaaacttaaaccctgattttatcagtgtaacttatggagcaggtggaaaaggcgttgcaaatgcgacaacaattgacttatgttcatatattaaaaacgaattaggtgtggaaacaatagctcatctttcatgtctttataatactaaagatagcattgacagaattttagatgaattagatgaaaaaggtgtaaagaatatattagctttaagaggggatgtaaatcctgattttgccattgaaaaagatttcaaatatgcatcagacttaacagaatatattatgtcaaaaaacagaggttttaatatttcaggcgcatgctatcctgaagttcatcaggaagcagcgaatatgattgaagatattcagaacttaaagaagaaagttgattcaggggcagaccatttgatttcacagttattctttgatgatcaggtattctttgattttcaggagaaagcaagaatagcaggaattaatgttcctattgaagcaggaattatgcctgtaacaaacaaaaaacagattgagagaatggtttcaatgtgtggcgcaagtattccggcaaaactttcaaaagttcttcagagatttggagataatcatgaagccatgcgtgatgcaggtatttcatatgcaattgaccagattattgaattggctgctcatggagttgacggagttcatatttatacaatgaatgatccatatgttgcaagaagaatttctgaaggtgtaaaaaatatattaaagagcggaaaataaaatgtcagagcagagaaatattattatagacaatatagattttagtgaagctttaagatatttaggttatggaaacagcactcctgatgagaaaacgaaagagattttgtataattgtgcagaccagcttaagtcagtaatggaaggcaaatatacatataaagtttttgatttggtagatggacaggttccggggattaattttacattggaaggaaagtctattgccaaccatttgaaaaattgtgaaaaagtaatatttatgtgtgctactctttcagcaggagttgacggacttataagaaagatgcagattaggggaatggctgatgccatgtttactgacagtcttgcgtctgctgtaatagaacaggtatgcaacaaagcggaagatgaaattcttgaagattttaaggaatatgaacatacatggagatttggcttgggatatggagattttcctttgacaggtcagaagcagtttcttgatatattagatgcaggaagaagaataggcgtatgcgtaaacagtggaatgactcttgtgcctactaagtcggtaacatgcataataggacttggtcataatttagaagtatctaatgttaaaagctgcgacttatgtaattttagagaaaaatgtacctttagaaaggatggaaaaaactgtggcaaataaaaatatatttgacaaagattttatattgttggatggtgcaatgggaacaatgcttcagcaaaaaggaatggagcttggaactgtacctgaaacattaaacataacaaagccggattggattatagatatacataaacaatacatagatgcaggttcggatgttgtttatgccaatacttttggtgcaaatagatacaaaatggctaatacgggatattcagttgatgaattaattggtgcagccattaataatgcaaaagaagcagccaaaggaacagaaacacttgttgctttagatatgggacctataggtcaattactagagcctacaggaagtctttcttttgagaaagcgtatgatatttttaaagaagaagttattgcaggaagaaatgcaggagctgatattatagttattgaaactatgacagacttaatggaaactaaggcagcaattcttgccgcaaaagaaaattcagaccttcaggttatgtgtacaatgacatttgaagacaacaaaagaacatttacaggatgttcggtttcagcaatgtgtcttacagtacaggggcttggagtagacgcacttggtgtaaactgttcacttggacctaaagaattaataccaattgtagaagaaatttctaagtggacaactgttccgattgtagtaaaggctaatgcaggtttgcctgatcctgttacaaatacatataatgttttacctgatgaatttgcagatacatgtaaggaaatggtaaaatacggagcaaaagttcttggtggatgttgtggtacaacaccggcttatgtagccaaactaaaagaaatggttgcaacagtaaacgcaagtgttgtgaaaaagaaaccaagacagcttgcagtatgtacacctttaaagactgtagttgttgaccagccaagaattgtaggtgaaagaattaaccctacaggaaagaaaagatttaaacaggcgttaagagacaatgatatgaattatattttgtctcaggcaattgaacagatagacgcgggggcagacattttggacgtaaatgtaggttcacctgacattgatgaaaaagaaatgatggtaaaggttattaaggctttgcaggcaatagtagatgtacctttacagattgactcaactaaaccggaagttcttgaagcggctctaagggtttataatggtaagcctattgttaactcagttaacggagaagaagaagttcttgatacaatccttcctattgttgcaaaatatggtggggcagtcattggacttgctcttgatgaaaatggtattccgccaacagcagaaggacgagttgaaatagcaaaacgtattagagataaggcaatgtcttatggaatcccaaaagaggacattattattgactgccttacacttacagtttcagcagaacaaaaagctgctgcagaaacacttaaagccatgaacattgtaaaaaatgaattaggcttaagaacagtacttggtgtttcaaatatttcttttggtttgcctaacagagaaataattaataaaacattcttaacaatagctatggctaatggacttgatcttccgattatcaatccaaatgtaccgtcaatggtatgggcagttaaggcatataaagtattggctgcaattgatgaaaattcaatggactttattgattattcaagtaaaattcagcctgaagttacaacaactaagacagaagtcgtaaaatcaaatgattccacagtaagccttggttcagaactggcagacaaaattcttaaggcgatggaaacaggaatgaaagatgatggaagaagttacacatctcaattacttaaagaaaaagaagctatggagattataaatcagattttgattccggcattggatgttgttggagataagtttgaaaaaggtacaatattccttccacagttgattttggcggcggatgttgcaaaagaatgttttgatgaaataaagaattatcttgcagatagtggagattcttctgaatcaaagggaaagattattgttgctacagttaaaggtgacatacatgacattggaaagaatattgtaaaagttattcttgaaaactacggatataacgttattgacttaggtagagacgtggattgcatggaagtagttaatgcggcaattgaaaatgatgttcatttagttggactttctgcacttatgacaacaacacttggttcaatggaagaaacaattaagcttttaagagaacacaatgttgattgcaagattatggtaggtggtgcagttcttactgaagattatgctatgaagattggtgcagattattatgctaaggatgcaaaaatgagtgcagacatagcaaagaaagttttaggataaaaaaagtacttgcaaaatttgtctgtatctgatagaatgctctttgtgtcgggtcgattgagagttcgacctaatttattaaaggaggtgctattatggctaaatgtagtatttgcggtaagggtgctcactttggaaacgctgtgagccattctcatagacgttctaataaaatgtggaaatcaaatattaaatctgttagagttaagactgaaggcggatcaaagaagatgtacgtttgtacttcttgcttaaaatctggtaaagttgaaagagcatagtttgttagagcatgtatgcacgaaataaaaaaagttatcatttatgaatgataactttttttagtatataaatgtaactctttcctttttctaaaaaagatagtataattattagaagttcgatttttaggaggaacatatatgaaaggtaagttaaacactgatttaggtcaggtattgattagccctgaagttgttgcaaaatacgcatcagaaacagcatatgaatgctttggtattgttggtatggcaatggtaagcatgaaagatggtcttgtaagacttcttaaaagagatagctcaactaagggaattaatgtaataattgatgaagataatgaaatcactatagattttcatattattgtatcttacggtgttaatattgcaacaatagcagacaatattatttcaaatgtaaaatacaaagtagaagaatttacgggtatgtcagttaagaaagttaatgtgtacgttgaaggcgtaagaaacattgattagtaccccaggaggatattattttggaaatgacaacaattaatgcagaaacattacaaaaaatgtttattgcaggtgctaagaatttagaagcaaaaaaagaatggataaatgagttgaatgttttccctgtaccagatggggatacaggaacaaatatgactttaacaattatgtccgctgctaaagaagtaggcgcaattacagaaccgacaatggaaacgattgccaaggctatctcaactggttctttaagaggtgcaagaggtaactcaggtgttattttatcacagctttttagaggatttacaagagagattaagaaggtagatcagattgacgtagatgttttgtcaagagcttgtgtaaaagcagtagaaactgcttataaggcagttatgaagcctaaggaaggaacaatccttacagttgctaaaggaatggctgataagtcatgcgagcttgtaggcgaaagtgatgaccttgtgcatgtaattgatgaaataattaagcatggtgattatgttttaagtcagacacccgaaatgcttccggttttgaaacaggcaggagtagttgactcaggtggacagggattgatgacagttattaagggggcttttgatgctcttttaggaaaagagatagattacacattagaacctgtacagacagcaggaactaaggttacagaagaagttcctatggatgacgttgaaattaaattcggttactgtacagagtttattattaatcttgataaagaaatgcctaagtcagaagaaaaggcatttaaagaatttttagaatcaattggtgattcaattgttcttgttgctgatgatgaaatagtaaaggtgcatgttcatactaacgaacctggtgtagcaattacaaaagctttaacatatggttcattgtcaagaatgaagattgacaatatgagagaagagcatcaggaacgcttaatcaagaatgcagaaaagatggctgaacagcagaaagctgacgaaccaagaaagaaatatggttttgtagctgtatcagtaggtgaaggattagatgaaatattcaagggattaaatgttgactatattatttcaggtgggcagacaatgaatcctagtacagaagatattttaaacgcagttgataagattaatgcagacaatatttatgtattgcctaacaacaagaatattatccttgcggctcagcaggcggaaagccttattgaagacaaaaatattattgttgttccatctaagactattccacagggaatttctgcaatgataggatttattccagataatagtcctgaagacaataaagaagccatgattgatagtatgtcatatgttaagacaggtgaggttacttacgctgtaagagacacagttattgatgacaaggaaatcaaagaaggcaacattatgggtattggcgatgaaggaatccttgcagtaggagaagaaatcgacgatacaacaattaatatgattaaagagatgcaggatgaagaatcagaaatcgtaagtttatattatggtgctgaagttacagaggaagcagcaaataagctggcagataagattgcagaagctttgcctgaaattgaagtagaagtatatccgggtggacagcctatttactactatattgcttcagtagaatagtaggagacttagcgtatggatgaaatttttgtagaaagaatagtaaaaagaaaagtagatataaagggaatgttattaagagtgttagctgttatattgacagttttgtcattatgcacaattttattcttgggaatgcttggggtgacattaactatattattcgcatatttaacatatcttgtgtgggcttacactagtgtagaatatgaatattcttttctaaacacagagttaacaattgaaaaaatcatgggacaaagaaaaagaaaacatgttgatgagtttgatataaaacaggctgaaattatagcacctgctgtatctgacgaaattaagagcagagcaggaaatatagtgacacttgattattcaacaggatatggaagtagtgatctttattctatgataacaaatactgacaagggagcagtacaggtcttatttaatgctgatgaaaagtttattgaggcaatgcgtcatatgagaccatcaatagtaaagagataaaataatatttttaagtaagcaattataatgtgcttgcgttaaaataaatcaggtttgtctcttgaaaaaatattgacaatactattgttttttgttagtatgttgaaaatacaaataaaagtgtcgtcttaacgtatcttgaaagacagatatacgggatggcactttctctgcaatgcagacaatacattaagaataaaaagagaaagagaggaaagaaccaatgggaaaaattattggtgaaggaattacatttgatgatgtgttattagtgccacagtactcaacagttacacctaatatggttgacttatcaacacaccttacaaagaagatcaaattaaatattccgatgatgagcgccggaatggacacagttacagaatacagaatggcaattgctatggcaagacagggtggtattggaattattcacaagaatatgacaatcgaacagcaggccgacgaagtagataaagtaaaacgttcagaaaatggtgttatcactgatcctttctacttatctccagaacatacaattaaagatgccaatgatttaatggcaaaattccgtatttcaggtgtacctattgttgtaggaaagaagttagttggtattattacaaacagagatcttaagtttgaaacagatgaaacaaaacttattaaggattcaatgacttcagaaggacttattacagcaaaagaaggagtaacacttgaagaagcaaaagcaattcttgcaaaatcaagaaaagaaaaacttccaatcgtagatgatgactttaatcttaaaggactcattacaattaaagatattgaaaaacagattaagtatccactttcagcaaaggattcacagggaagacttttatgtggtgctgctgtaggtattacagctaatgttatggaaagagttaaggctttagttgaagctaaggttgacgttattgttattgactcagctcatggacattcacagaatattttcaatacattaaagcagattaaggcagcatatcctgaccttcaggttattgcaggtaacgttgcaacaggagatgctacaagagatttaattgaagcaggagcagatgcagttaaagtaggtattggacctggttcaatctgtacaacacgagttgttgcaggtattggtgtaccacaggtttcagctattatggattgttatgaagttgctaaggaatatggtgttccaattattgcagatggtggtattaaattctcaggtgatattgtaaaagccattgctgcaggtggaaacgtatgtatgatgggttcaatgtttgcaggatgtgatgaagcacctggagatttcgaattattccagggacgtaaatacaaggtatatcgtggaatgggttcaattgcagctatggaaaatggtagcaaagacagatacttccagagtggcgctaagaagcttgtacctgaaggtgttgaaggacgagttgcatacaagggaacattagaagatacagtattccagttaatgggtggtcttagatcaggtatgggatattgtggagcaaaagatattgaaacacttaaggaaacaggtaagtttgttaagatttcagcagcatctttaaaagaaagtcatccacatgacattcatattacaaaagaagcaccaaactacacagttgaaaactaatttggttaaaataaatagcaacattaattgttaaaattatatgaaaaatataaaaaaacatatattaattaactgatttatgttaaaataagaaggaccttgtaataaggtcctttttctataaattaaaattgtagaataggaaaattgaaagagtttaatgttgcaaaaactaaaaaataaagtgccaaggagaggttatggaagaaacaaacaaggacttagaaacacagacagatgcaaatgaaagtgttgaaaaaattgaaacagttgaagaaactacaaaggaagaaacgattgaaacaaatggaaaaaacgggaatccgtcagataataaaaacgaaaagaacggttttaaattgggaaaaattgttgttccgggattaataattataattttggctgtttttgcaggtgttgtttattatcagaaaaaagtagaacctgagaaagagttgcttaaagagatgaattatggtgttagcagtatgaaggattactttaacaattatatttctttaggaaattataagggattaacttatgagataacacaggatatgtgggatgaaagtgtttcagatgaaactaatgaatataatacagcaaagaaagttgcagaagatactgatcaggttgagtataatttaacaggatatgttgatgataagaaagacagcaacattacacataaagatcaggaagttattattggtgaaaattcaaaaggagcattaaaaattatttcagatgccctaaagggacataaatcaggtgaagaagttactattgaaggtttaaatgcttcagattttgcaacagatggcaacgactattcaggtaagaatgttaagtttgtagcaaaaataaaatcagttagaaaattatacgtagaaaaggtaactgacaagtgggttaaagagaactactatgatgattatggattggaaaatgctgatgatttttatgaatggtgtaaacagagtcttatagaagatgcaaaagctgagttatggtcaaaagtacttgaaagttctgttgtaaataaatattcagagacagcatatcagagagttattgaagaagtggatggtgattacaattataatgctgaattttttggtatgacaattgatgaatatctggaaatgaatggtatgacagaagatgatatggaagacgaatatatgaatgcacttaagtctgaaatggttatgtgggcaattgttgaaaaagaaggtcttgctaacaagataacagatgaagatattcagaataagtgggatgagttatatcaggaaggtgattttgaatcagaagaagatatgaagtcacagtatacagacgaggaaatccgtcagggagcattaatggataaggcggtagattgggtatatgatcatgccaaagttaatttttcttataagatttcaaaatagtatttgacaacaaaaaaagcaatgatataatgagtggtgaacaaagcgttgacgagacgagtaggttatccggagggtcacagagagagatgcatagctgagagcattttacagaaggataattgaagactacctctgagcgactctaatcaagtccggtgattccgttataatcagaatgagaggcttttgtcagaatggattttgacagaaacaatcagggtggaaccgcgtattttacgtccctgtttatggaaacataaacagggacttttttaatacaaaaaacaaaataagaaacctgtatgtttcagaataaacattgtagaagtaaaggagaaaacactatgaaagttactttaaaagatggttcagtaaaagaatattcagaaccaatgtcagtaaatgatattgcatttgacattgcaggaggtttaggaagagctgcgtgtgcaggcgaagttgatggagaggttgtagaccttagaacaacaattgacaaggattgtacattaaacattcttacatttaaggatgaagcaggtaaggctgcatatagacatacagcatcacatgttatggctgaagctgttaagaatttgttcccagaagcaaaattagcaattggaccttcaattgatacaggattttactatgattttgaacatgaacctttttcaagagaggatttagacaaaatcgaagctgaaatgaagaaaatcattaaaaagggtgccagacttgaaagatttacacttccaagagaagatgcaatcaaatatatggaagatagaaatgaaccttacaaagttgaattaattaaagatttacctgaaggttcaacaatttcattttacagtcagggtgaatttgtagacttatgtgcaggaccacatcttatgaacacaaaatcaattaaggcatttaaaattatttcatcatcaatggcttattggagaggtgattcttcaaaagcaagattgcagagaatatacgctacagcttttgatagcaaagatgaattgaataaatatcttgaagaattagaagatgcaaagaacagagatcataataaacttggtagggaaatggaacttttcacaacggttgatgttatcggacagggacttccattattaatgccaaagggacagaaaatggttcagaaattacagagatggattgaagaccttgaagataatgaatggggctatgtacgtacaaagacgcctttaatggcaaagagtgatttgtataagatttcaggacattgggatcattataaagaaggaatgtttgttttaggagatgaagaaaaagacaaagaagtatttgcacttcgtccaatgacatgtccgttccagtattatgtatacaaagcaagccagaagagctacagagatttaccttgcagatatggtgaaacatcaacacttttcagaaatgaagattcaggtgaaatgcacgggcttacaagagttcgtcagtttacaatttcagaaggacatcttattgtaagacctgaccagatggttgaagaatttaagaattgtattgctttagctcagtattgcttacagactttagggttagaagaagatgtaacatatcatctttcaaaatgggatcctgaaaatagagaaaaatatatcggagaacctgaagtttggaatgaaacagaacaggatatcagaaacgttttaaatgaattaaatattccttttgtagaggatattggagaagcagctttctatggaccaaaggttgatattaatgcaaaaaatgtttatggaaaagaagatacaatgattacaattcagtgggatgctttattagcagaacagtttgatatgtattatattgatgaaaatggtgaaaagaaacgtccatacatcatccacagaacaagtattggatgctacgaaagaacacttgcatggcttattgaaaaatatgcaggaaagttcccaatatggttatgtcctgaacaggttagagtacttcctatttcagacaaatatgttgaatatgctgacaaagttgcggctgaattaaagaagaatggtattgatgttacagttgattcacgttcagaaaagattggctacaagattagggaggcaagacttgataaacttccatatatgcttgttgtaggacagcaggaagaagctgacgaaacagtatcagttagaagccgttttgcaggagatgaaggtgttaagcctttggatgaatttattgaacagatttgtaaggaaatcagaacaaaagaaatccgtaaagttgaagtagaagaaaacaagtaatgtttaattaaaagtaaataagcatactttagtttaaaattatttttacaaaaactaaatgaataaaaaataaaaaacactccacactaaatgtatcggataaaatccgaaataaatttaggtggagtgttattatgactaatttagaatgtaatgtaaaaaactgttattacaataagtcatcaaaatgttgtcgtgacggcataaatgtagaaggacaggatgcaactgttattgatgcaacttattgtggggattttaaagagaagactgagggcacaacagcacaagcatgtcattgcagcgcaggtccggaggatacattagatgtatcatgtgaagctaaaaattgtgtatttaatgataattctaagtgccatgcggacaaaattacaatttcaggtaatggagcaaagcatgaaagtcagacagaatgtggaagctttgaatgtggttgtaagtagaatcaacttatttttctgcaattgtgcaagcacatacgaaaaaatagagttgtagaatgtaaatatattgattacacggattgctacgtgctacgcactgccacaatccaccaccaaattcgcatatcgcaaagcaagagcttcgcttttatgctcatttggaacactgtaatcaaaaaagttataaaaaattgttgacatatggatgagaagatggtaatataaatgctgatgtgaaaaaagaaagcagagtatccgctctcaccaagacacttttgaagtgattccaggttaatatttttataacgattttattgtgtagaaataatagtgggtaatctgtgggttatccacttttctttttgaagaaataatttggaggtgcaatactattagcgatttaatgattaacgaacagattagagatagagaagttcgtgttattggaacagacggacaacagttgggagttatgtcttcaagagatgctcagaagttagcagatgaagcagaacttgatttgattaagatttcacctaaggctaagccaccggtttgtaagattatggactatggcaagttcagatatgaacagcagaagcgtgaaaaggaagcaaagaagaaacaacatattgtcgaagtaaaagaaattagattatcaccaaacgttgaaattaatgacttaaaaacaaaggctaacaatgccagaaagtttattgaaaaaggtgataaggttaaagtaactcttcgattcagaggaagagaaatggcgcacattagtagtaatgcacatgtgcttgatgactttgcaaagatgcttgaagatattgcatcagttgtgaaagcaccgaaattagaaggcagaaacatgacaatgtttttagaaaaaaagcgttaagcttttaagatatttaaggaggacacaaacatgccaaaaattaagacaagcagagcagctgcaaaacgtttcaaaaaaacaggtacaggaaagcttaaaagaaataaagcttacaaatcacatatcttaacaaagaaatcagctaagagaaaaagaaatcttagaaaagcaacaacaactgatgctacaaatgtaaagaatatgaagaagattttaccttatttataatctatagtaggaggaagaagaaatggcaagaattaaaggcggaatgaacgctaagaagaaacataatagagtattaaaactagctaaaggttatagaggagctagatcaaaacagtatagagtagcaaagcagtcagttatgagagctttaacaagttcatatgctggcagaaagcagaagaagagacagttcagacagttatggattgcaagaatcaatgctgcagctagaatcaatggactttcatacagcaagtttatgtatggtcttaagttagctggtgtagaaatgaacagaaagatgttagctgaaatggcagttaacgatgctgaaggatttgctaagttagtagaagttgctaaagcaaaattagcatagtttattaaatacattaacatacaaaaataggaactattcagatgagtagttccttttttcttgaaaggaaaaaattgtggaaagagaaaagttgaaatcacgtttgggctttattttaatttcagccggatgtgcaattggaatagggaatgtatggaaattcgcttatatggcaggccaaggtggtggaggattttttgtattactttatttattatttttggtaatgcttggaattcctatcatgtcaatggagtttgctgtgggacgtgcaagccagaaaagtccggctcaggcatacaaagctcttgaaaaagcgggacaaaaatggcatattcacggatatattgctttaataggcaattatttactaatgatgttttacacaacggttgcaggttggatgctttactatttttatcttacaagcacaggaaaattcgttggacttaatacagatggagtggcaaatgtattttcggaaatgttacaaaaacctgtaacaatgactatttgtatgcttattatagtagttgtgggattttttatttgctccattggacttcaaaatggacttgaaaaggttacaaaggttatgatggttgcattgcttgcaattatggttatccttgcaattaacagtttcttcatgaagggagcaaaggaaggtttaagtttttatctaattccaagcattgaaagagcaaaagcggcaggtattggcaatacagcagtaggagctatgaatcaggcattttttacacttagtattggaataggtgctatggcaatttttggaagctatattggaaaagatcgttcacttttaggtgaatctgtaacaattgcagctcttgatacttttgttgcaataacatcaggtttaattatttttcctgcatgttttacatttggtgtagatcagacacagggaccaagtcttgtttttattacattaccaaatatttttaataacataccttttggtagagtttggggaagtttgttctttgtgtttatgacatttgcagctttttcaacagtacttgcggtatttgaaaatattgtatcgtgtggtatggaacttacaggatttaacaggaagaaatcaagtatagttaatatgattcttgtggcattactttcaatgccatgtgtattaggatttaatctttggtcatttgactggcttggagtattcggtggttcattcctagattttgaagattttcttgtaagtaatatatggttgccacttggttcattaatatacttacttttctgtacaagtaagtttggttggggctggaagaattataaagaagaggcaaatacaggaaaaggtataaagattcataattggatgcgagtatatcttacatatatattgcctttaattgtattgtttatatttgcttttggaatatatgacaagttttgggcaaaatagactatatcataaatatgtattgattgaagaaagattatgaacatcggagtataatttaatattaaaagagaattacatgaaacttcgcgctgacacaggttggcgtggagtttttattatataggaaagttcttataactttcaatatataaaaatactttgcaggatagttcacattttcaacacaataaaaacacactttatacctataaaaatcacaattttaactaataaaaaacataaatgaaaactataatttttaatagttagaaaaaacagggaggtgtgttaatgagtggcatacaaatagaaaatctagttaaaacatatggcgataatattgccgtaaatgggttgaatttaaatcttgaaaaggggaaggtctatggatttttaggaccaaacggagcaggtaaatcaactacaatgaacatcattacaggctatattggagcaacaagcggaacggtaaaaattgatggatatgatatctttaaagagcctgaaaaggcaaagaaatgtgtaggatatcttcctgaaattccaccgctttatcaggatatgacagtaaaagaatatcttgtttttgtggctgaattaaagaagattccggcaaaagaaaaaatgaaaaatattaaagaagttcttgaaatgactaaaactacacaggttgaaaacagacttataaagaacttgtcaaaaggatataaacaaagagttggaatagctcaggcgttaattggaatgcctgaaataattattttagatgaacctacagtaggacttgatccaaagcagattattgaaataagacaactaattaaagaacttggcaagaatcacacagtaattttaagttctcatattttatcagaaataagtgaagtttgtgaatacatttttattatttcaagaggacaattagctgctgaaggaactgaaaaacagcttgttgaacaaatggcaggagagaataatcttgaacttgaaataaaaggtgataaagacaaagttaaggagatgatagaaagccttgaagatgtttttgaatatgaatttgctgaatcggagacagaaaatattgtaaggttgaaaattaaaagtgacagagatgttgatttaagagaaaaaatattttatatatgtgctgaaaatgatttacccattatggaaatgagttttaagcagaaaactttggaagatatatttattgaattaacaaaagattatgccgcgcctgaaaagaagagcagatttaagaagaaaaaagataaacaggaggaagaagacaatgttagcgatttatagaagggagttaaaatcctattttacttcagtaatagcgtgcctgtttattgcagttacaacgttaatagcaggaatattttttgtatattataatttgagttacggagtttcagaaatgtattccgtatatcagtgcctattgattttagtatttacagtgccgattttgactatgaaagtaatagctgatgagcgtagacagaaaactgaccagttaatacttacagcaccggtatctgttggaaaaatagttgtaggaaagttttttgcacttgaaactatttatgcagtacctgtttttgtaatgtgtctgtatcctttaattctttcaagttttggaacagtatcatttaagacatcatacacaaatatttttggattattactttatggtacagcttttatagcaataggcatgtttatttcatcaataacagaaagtcaggttatttcggcaattttaagcattgtagtgcttcttatgggatatatgatgcagtcgttggaaaatatgatttcatctaatgggaacattttaacaaagattcttggatgttttgatttgtatacaccggtacaggattttttaaatggagtaattagtctttctgcagttgtttattacatttcaattacagtgctattccttttccttacatgtcagtcaattcaaaaaataagatggaatgtatcaaagaaaactatcggtacaggagttttcagtatgggatttattgccattgttgtagcagtaactgtttttgcaaatatgattgccacaactgttacatcaaaagtcagcagtgcaacaattgatatgacatcaacagcactgttctcaatctctagtgatacaaagaagatgcttaaaaaattagattcggatataactatctacgtaatggcaccaaaaacaagtgtagattcaacaataaagaaaactcttgaaaggtatcagtctacgtcaaagcatattaaagttgaatataaggatacaactttatatccaaatttctatcagaaatatactgatgcagcacctacatcaaacagtttaatagttgtaaatgagaagacaagtaaatcaaaggtagtagattacaacgatatttatgtttcggattcctattcttactacacatccggttcaaacaatgcatcttcatatgattgtgaagggcagctaaacagtgcgatttcatatgtcagatcaaatacaacgtataaaatatatcagattgaaggtcatgacgaagctgtaacggacacaacaaattttggctcagacagtaatttaaaagatattgtttcaaaatataatgcagaaatagaatctattaaattagtaaatagaacagaaattacaacagacgagtgtgcagcacttcttattttgggacctaaaaaggactatacagaagatgaagcaaaaatagtaattaattatttaaataatggcggaaaagcaattataggtttggaaaatcttacaagtcagggcgttgacaagccaaactttaattctattcttaaagagtttggcattaatgttcagtcaggtgtagtggcagaaaataatacttcatattattcaacccagtatggcccatggtttgcttttgcagatggaataacaggttacgcatcagggctttcaagttatgtatttgcaccttatacatcagggttaaagcaggttaaagatagtgatgattcaattacttatacagcacttgcttccacatcatcagattcagttcttaagacgaatgcttctaaagcaacaacatacaagaaagagagtggggatgtggatggaccatttgatatagtagtttcagtagaaaaaactgtaacaacaactaaatcaaatgatgattcaaataaatcatcagatacaagtaattcatcagaggaaaatagtgactctacagatgaaacaacaactaacacagcaagtttacttgtatttggttcagtatactcattatcagacacaatggataatagtgtttctcagtcaaacactcagatagtaaataacgcattgaaagattacattgatacagaagttgaaacagtatcggtacccgcaaagagtctttcaagtgaacagttaacagtaacggaatcaggaagcagattatttggaattttaatttcagtggtagtacctgtaattatcctgttagcaggaattgtggtttgggttagaaggagaaagagataatgagaaaacaaaaaattcaatttatagttttggcagtgatacttattgtttgcataggtggatattttggaatcacatccttttacaaaaataaagagtcaaatgaaaaagaagcttcaactataaaagttttagaaatagaaaattataaggaccttactaaagtttcttataattatgaagatgccacaattaatcttgttaaaaaagatgacaagtggaaagatgaaagtgacacatcaaaaaatcttgattcaaataatataaatagtgaaatgctttcaacactggttgaaatagatgcatcaaccaagattgacagccctgaagatatttcacagtacggattcacaaaggattctgatgggaatataacaggtgaaacaaactcaataactgttacagataacgatggaaaagtaaataaaatatatattggtagtactaatccatatgattctacaaaatactatatgatggtaaacgatgacactaacgtatatgtggtagatagtacagtaaatgatgccttttcaaaagatgttgaagaattggaagaagaaacaacaacagtggaagagacaacagaagaaacaactactgtaagtgagacaacagcacagaaaacaactgcagaataggaaaatacaatcagaaattttcataagattacagaattgtagaaatccccgaatgagtaggcgatgagcctgcttttcggggattttataagtgttgtgaaaagtgtggaaaattaagatgttaaaaaataaaaaaagctttggaataacttccaaagctttcaatatgcggaagatgggacttgaacccacacgatcgcattgatcacaagatccttagtcttgctcgtctgccagttccgacacttccgcgtacatttcacacgcaagtaagatgataccatcaacttagctatgtgtcaacaacttttttaaaaaaattaaaattttttaaaaagttgttttttagtagaattatgtaagtgagatttgacaaccaaacacatattttctacttaaatgcagttgatgggacttgaacccacactcccttgcgagaacatgaacctgaatcatgcgcgtatgccaattccgccacaactgcatgtaacttagtaatttgcgttacctaaaagttttactacattttgaataaaatagcaagcaatatttttcaggtgacaaaagttctgtaatcaaaaatgtaattaaagctgtaattaaagctacaattgaagtttttggtgacagtcattgcattaatttcttaaaaaaagtaaactagttaaatgaaatagtaaaaatacggagcggaataaatgaaaaaagaacgggatttaactagtggcaatattacatcaggactttgggcatttgcggtaccgttaatgcttggaaatgtaattcaacaattctataacttagcagatacttggattgttggcagatatattggaaatattggattggcagctgtgggttcatcgtatacattaatgacatttttaacatatataattattggactttgccttggaaacagtacatttatttctatggaatatggaaaaaagaatattgaaaagattagaaatggcatttacatttcttttgtcatgattcttgcagttacagtgggaattataataattttctatggcttcttagatgaaattataaagatgttacaggttccaaaagatacggtggcagatatgaaagtatatcttgtttatgtttttataggattttttgccacatttatatataattatatttcaaatgtactaagagcaataggaaattcagtgattccattgatatttcttggagtgtcagtggtgttaaacgtttttcttgatattttgtttgtggcagttttaaaaatgggaattatgggagcggctgttgcaacggtaatttctcaatatatttcggctttgggaacattcggatattatttctttcagtatccgcagttgaaggtaagaaagagtgatataaaatggaataaaagcaatttcaaaagcatactttctttatcagggtttacctgtattcagcaatcggtaatgaattttggaattttaatggttcagggccttgtaaatagttttggcacaacagttatggcagcctttgctgttgccgtaaaaatagatacattggcttatatgccggttcaggactttggtaatgctttttcggtttttgtggcacaaaattatggagctaagaaaacggaaagaataaataaaggcataaaaagagcaattgtaagcatagttattttctgtgcaattgtaagtagtatagtatttattttttcgaagaattttatgaaaatttttgtaagtagtacacaggttatagatattggagtgggctatcttagaattgaaggagctttttatataggcataggaatcctgtttatgctttatggcttttatagggcagttgataagcctataatgtcggtggttcttactgttatatcattaggaacaagagttattcttgcttatgttttatcagcaattgattttattggtgtgacaggaatatgggcggcaattccaattggttggtttttggcagatttagtaggattaatatatatgaaaaaaacgaaaaatgtgctaaaatcaatataaatgctatgaacatattttcgactacatatgtacaaccattgtcactatggaggtgaagtcttatgaatattagagagcaaagtgaagaactggagagaaaatatcttagcccttatgcatctttaagctgcgaaagtcaggggagagaaagggaagaagaacaatgcgatattagaacggtttatcagagagacagagaccgtattatacactgcaaggcatttagaagaatgaagcataagacacaggtttttctggcaccaatgggtgatcattatagaacaagactgacgcatacattagaggttgcccagattgcaagaacaatatccaaggcgttaagacttaacgaggatttaactgaggctatagcacttggtcatgacttggggcacacaccttttggtcacgcaggagaatcagctcttaacgatgtttgcagtcagggctttgagcatttcagacagagcataagagtagttgaaatattagaaaataatggcaagggacttaatcttacaaaagaagtcagagacggcatagttaaccatagaacaagcggtcatccttcaacattagagggaaaggttgtaaggctatcagataagatagcctatattaatcatgatattgatgatgcaataagaggaaaaataattacagaaaaagatattccaaaagaatacgcggatatattaggtgatacaacgaagattcgtttaaatacccttatacatgatgtggtttctaatagtgttgacaaaaatgacattctaatgtctcctaaagtcgaagaggcaatgatgggactgagaaaatatatgtttaagaatgtgtacactaatcctttggcaaaaagtgaagaaacaaaggccaaggctatgcttaaaatgctatttgaatattatatgaaaaatatagaattaatgcctgaagagtttatatatctgattgaagaaaaaggtcaggatgaggaaagagttgtttgcgattatattgcaggaatgagcgaccagtattcagtggcaaagtttcagcagatatatgaaccgggtttttggaaaatgtggtaataagaaactaaaatagagaggcacaaatgttttattcagaagatattatagaacaggttagatcagaaaataatatagtagatgtaattggtgattatgttaaattacagaagaagggaagttcatattttggactttgtcctttccacaacgaaaaatcaccttcattttccgtgtcaccacacaagcagatgtattactgttttggatgtggagaagggggaaatgttatatcttttcttatgaaatatgagaattatacttttgttgaggctttagaggtacttgcaaaccgtgcaggaattgaacttccaaagatggaatattcaaaagaagcaagacaggaaaaggaccttaaatctaagataatagagataaatacagaagcagccaagtattatcattatttgttacgttcagacagaggaaaaacagcatatcattatttaaaaggcagagagttatcagatgaaacaattgtgaaattcggacttggctattcagacaaatatagcaacaacttgtatcagtatttgagaagtaaggggtataatgatacagagctaaaggaaacaggactttttacttttgatgaagtaagaggcgtaaatgacaagttttggaatcgtgtaatgttcccaattatggatgcaaataacagagttatagctttcggtggaagagtaatgggagatggcaagcctaaatacttaaattctcctgaaacgaaggtttttgataaaagcagaaatctttacggactaaacgtggcaagaagtgcaaggaaggaatatatgcttatatgtgagggctatatggatgttataagtcttcatcaggcaggctttaataatgcggtagctgcccttggaacagcttttacttcacgtcacgcatcacttataaaaagatacgcaaaggaagcagtattaacttttgacagtgatgaagcaggaattaaagctgcattacgtgccattccatatcttagggaatctggtcttgcaattaaggttcttaacatgaaaccttacaaagatcctgatgaatttattaagaatatgggaagagaagcttacgaggaaagaataaagacagcaacgaacttctttattttccaggttgacaatgagcgaaagaattatgatttgaatgatcctcaggagaaaacagcttttcagaacaaagttgcagaaatgttgcttgtttttaaagatgaacttgaaagagagaattatatagattcagtttgtcagacttttaacatttcaaaagacggtctttcaaggcttgtaaaaaagaaagccctgaattatgtaggcaaggaagaaacagttcaggaaagacagcaggttgaaaataagaagagtactaaagaagatgcggcaataaagacacagcgaatattgttggcataccttattgacagagataactggtttaagaaagttgctcaggttatttcaccggaggattttattgatccgttttatcacgatgtagcagaaagattttgggaacaaatggaatcaggaaaaggaaatcctgcacagattatggacagttattccgatgaggaggaacacaagaaagtggctgaactttttgtttctccaataagggctaatttaagccttgcagagcaggaaagggccataaatgatgcagttattaagataaaaaaatcaagtctggactatagagcttcaaaggctacggatattcaggacttacagaatataataaaagaacagaatcagttacaaaagattcatgtaacattggattaaaaatagactaaaagtaggtaatatatatgttatcaaaaagactggaacaggtagcctcaatggttacaaaaggaaatattatagcagatataggcacagatcatggatatgtgcctatttatcttgtagaaaaaggaatatgtcccaaagcttatgcaatggatattaatcaaggtcccatagaaagtgcaattaagaatatagaaaactatggtttaagtgaaaaaattcaggcaattaaatcaaatggattagaaaaacttgaacctgaaaaagcagatactataataattgccggaatgggcggagagcttattgttaacattcttgaaaatggtttggcaaagttagaaaactgtagtagaccggttaaagaacttgttttatcacctcataaaaggggagatttggtgcgcaagtatttagaagaacataagtggcacataacggacgaaaaaatgcttattgacatgaataagttttacacgataataaaggccgaaaaaggacaggaatcttatccttattcagaaacggaattattatatggtagaatattacttgatagacaagatgcaactttaaaaaaatatctggataaagagaatgctaaatttcaaaaaatcaaacagaaaatgattgagaatcaaagcaaagatcttttagaagttgaaaagattttagaatataacagagttgggagggaatcatatgattaaagtaactataggacaggacacataccaatatgaggatggaacaacactttatgaaatagcaagagagcaccaaagtgaatataagcatcagattattcttgcaaaatgcaatggaactttatctgaattatctaaagtattagttgaaaactgtaatattgcatttgttacaacggcaagttttgttggaaatgagtgctatagaagaagcacaacattccttatgcttaaggcattttatgcagtggcaggcagaaataacatagaaaaaatttctgttcactgctcagttagcaaaggatattattgccaggtgtttggtaacgttgagatagatgaaaaacttctaaagcaggtaaaggatgaaatgattaagctttgcaatagagatattctgattcagaaagaatcgattcctacatctaaggctattaagaagtttgaacgatatggaatgaaggataaggttcatcttcttaaataccgaagatcatcagcagttaatatttacagaattgaaggttttgaagattatttctatggatatatggcgtattcaacagggattcttaaatatttcgacctgattaaatatgatgagggctttgtgttgcaacttccaacaaaagaagaaccggaagttgtgccagagtttgtacctagaaataaggtttacaatgtaataaaaaaatcaacagattgggctgaaatgattggtgtgcctacaatcggatatctaaatgacaaaataactgatgggtcaatgaacaatataatgatggttcaggaagcattgcaggaaaagagaataggtgatgtggcagcagatattgcttcaagagaaaatgttaaggttgtaatgattgcaggaccttcttcatcaggaaaaacatctttttctcatagattatctattcaattaatggctcagggtttgaaacctcatcctatttcagtagataattactgtgtgaatagggaagatacaccaagagatgcagatggaaaacttgattatgaagtaattgaagcattagatgtaaaattcttcaatgagcagatgacagatcttcttgcaggaaaagaggtagaacttcctatatttgattttgtgtcaggaaagagaaagtttaacggagattatctaaaactgggagaagatgatgttcttgttattgaaggaatacattgtcttaatgacaagatgtcttatagtttgccagatgataaaaaatataaaatttatgttagtgcattaactccaattaatgtagatgaacataatagagtttcaacatctgatcttagattacttagaagaatagtaagggacgttagaacaagaggttcttctgcagaaagaacaatagagatgtggcaacgggtaagaagaggtgaggaaagaaatattttcccttaccaggatacagccgatgtagtgtttgatacggcaatggtgtatgaactttcggtacttaaaacatatgcagaacctgctttgtttagcgtgccggagggaacaccggaataccttgaggcaaaaagacttcttaaatgtcttgactatgtacttggaatgcctaaggacggtatccctaagaattctttggtcagggaatttgtaggtggaagtatttttccggtaggataaaacatttttattatatatttgactatatatagttttctatatataaaaacttctatataaaaagttgcaaaaaaaggtttaatatgctattttagttaattgtgagtagagcagatgatcgcagctgctattgccgaaaggacgcaggtgaggaaagtccgggcttcatagggcagggtgccggctaacggccggtggaggtgactcccaggaaagtgcaacagaaataaaaccgccagcttgctggtaaggatgaaatggtagtgtaagagactaccgcttcggtggtaacatcgagggtcagtgtaaaccccacttgaagcaagaccgagcagaaagcatatggttgcccgccagctttcgggtaggttgcttgaacatattggtaacaatatgtctagatagatgatcatccacgacataacccggcttacagctttactcatttataaaaaaacaggatatgtttatactactaaagtataaaattttaaacggtcaaggaggaagttatgacagttaatattactaaggaaatgacaatgggcgaattacttagcatcgacagaggcgttgctgttgtattaatgaatgcaggaatgcattgcatcggatgtccttcatctatcggagaatcacttgaagaagcatgtatggttcatggaatcgaagtagacgagttattaaagaacatcaacgagtattttgcaaacaaataaataattaagagtttaattacaaacactcttaccggattggttttgtaagaaataaatctggtattataaaagtctcctaaaatggttattcttatatagtcactatgaatatatactgagaaaaacaaatttttaggaggctttttattatggcagaaaatcgttatgaattaaacaaaaatttagcacagatgttaaagggtggagtgattatggatgttacaacacctgaacaggcaagaattgcagaagcacagattcttgaagcaatatgtaagtaagaagagcataagtaagaagatttctcttctcattttccacacaaagtcgtttggggcgttgcccacgccccggggagccaacataatttagatatttacggatgatatgatacttgttattgccaaaaccgtaatgactaacgaaaggacaagcttaaatcacatactcactacatttcaatcacaagattgtatagtattgtctcaagcttatcagctacattggcggcaacttcaacaacttctttatcatctaaaggttggcctgttattccggcagccatgtttgtaatacaacttattccacaaactttcatcccacagtgtacagctaccatagcctcacaagctgtgctcattccaacggcattcgctccaagaattttataggctctaatctcagaaggcgtttcatagtttggacctgttgtctgtaagtaaacgcctttctttaaattaagattatattttttgccgattgattcaagcttattgattaaatcggatgcataaatatgtgtcatgtcaggaaatcttgtgcctaattcttcgatgtttggtcccactaaaggtgatggaacaaaagaagtaatttggtctgtgattaccattaagtcaccgggtttaaaatcgctgtcaatgccaccggcagcattagtaagaataaggttctttgcaccaagcattttcataattctaatcggagttacaacctgctccattgaataaccttcatagtagtgaattcttccgtccattaaaactacaggtttactttcaatatatccgaaaataaaacgtcccgcatgcattttgttagtgctaatagggaagtcttcgatatcagaataatttatgatacaaacttttttgactttgtctgaaaaatttccaagacctgaaccaagaactatggcagtttcaggaatgaaatctgtttttgatcgtatttgtcttaaataaaaattaagcttattataagcagaagtttctacatttgttttttgaatattttccatggaatgcctcctttaaaaaaagaaaaatcagtattagtatatcatattttcagatatgaaaaaataaaaaataagtataaaaaaccattttatgaaaaagtagtttttagaagaaaaaatattcgaaaaaagtgaatttaatatgttattttctattgaatatttgattataataatgtatcatttctaatagcaaaaatcagtggcggagttctgctgttaaaaaagtaataacagaacttgcaccaaacagatttgctcaagactctattataagccttgaaattttacataagcagaatggaggatgaaatgagacatttaattagtccgctggattttacggtagaagaacttgatcagttgcttgaaactgcaagtgatatcgaaaagaatcctgcaaaatatcaggatgcctgcaagggcaagaagattgcaacattattctatgaaccaagtacaagaacacgacttagttttgaagcagcaatgattaacttaggaggacaggttttaggtttttctgaggcatcgtcaagctcagcttctaagggagaaagcgttgcagatactataagaattatatcatgctatgcagatatatgtgcaatgcgccacccgaaagaaggtgcagcattagtagcagctaacaattcttcgattccggttattaatgccggtgatggtggacatcagcatccaactcagacattaactgatttgatgacaattaagtccctaaagggtagactggacaatattactattggtttgtgtggagatttgaaattcggaagaacagtacattcacttattaatgcgttgttaagatatgataatgttaaatttgtccttatttcacctaatgaattaaaggttccggaatatattattgaaaatattgaaaaggccggtgctgaatataaagaggtaacaaagttagaggacgtaatcagtgagcttgatattttatatatgacaagagttcagagagaacgtttcttcaacgaggaagattacattagattaaaagatagctttattttagacaagaagaaaatgtcaatggcaaaagatgatatgcttgtgcttcatccattgcctagagtaaatgagatttcagtagaagtggacaaggatccaagagcagtttattttaaacaggttcagtatggggtttatgttcgaatggcattaatattaaaattgttggaggtagaggtatgattaatgtagatgaaatttttaatggttttgtattagatcatattcaggcaggacgctcaatggctatttaccattaccttaaccttgatgaacttgactgtcaggtggcaattatcaagaatgccagaagtggtaagatgggtagaaaagatattattaaggtagaaggtcctcttgatattgtggattttgatatattaggctttatcgatcacaatattacagttgatattatcaaagatggagagttggtagagaagagagaacttaaacttcctaagaagattgtaaacgtacttcactgcaagaacccacgttgtatcacttcaattgaacaggaactggaacatgttttcgtattaacagataaagaaaacggaatatacagttgccagtactgcgaagaaaagcagggcaagttgtgggaaaaattatagaatatttagaatgagaataaagccactgtgcaggagcatggtggctatttcaaaatatacactttgaaatagagcttacaagtgaaattttactcttaacattttgcaaaattctaatatatactttactatgtattcttgactttaatattatgtttttgtacaattatgcaaacaggcttttgcctgaaaaatattatcaataaggagatttatatgggacccagtgacatagcattgctatgtgtattagtagtgttacttttattttcggcatttttttcatctgccgagacagctttgacaacagttaacaagattagacttagaactcttgttgaggaagaaaataagaaagctattgttttaaacaatgtgctaaacaattcaagaaagatgcttagcacggtacttattggaaataacattgtaaatattgccgcttcatcaattgcgactatttttacacaaagtcttttaagtgacatatttatcagtgtaggagttggaatacttactttgttaattattatatttggtgagattgttccaaaaacagttgcatcaatgcacgcagatgaaatggcattaaaatatgccaaaccaattagtattttgatgtttgtgcttacaccggttatttttattttgaatatgttttcaaacataatacttaagctttttagggtaaaagtaaacttaaactcaaaatcaattacagaagatgaattaagaactattgttggtgttagtcaggaagagggcattatagaagacgatgaatacgatatgattactaatgtgttcgattttggagatgcctgcgcaaaggatataatgatacctaaggttgacataaccatggtgccaattgatacaacttttgaacagttattagatgtaatcaaaacagacaaatatacaagaattcctgtttataaggaagacacggacaatattgttggaattataaatataaaagatatgattattaatcaggtggatgcatctaattttgatattaataagctgatgcgtgaaccatattatactcacgagaaagaagaattaaatgatcttcttattgaaatgagaaataatgaaccgggaatgtgtatcgttcttgatgagtatggtcaggcagaaggccttataactttggaagatattgttgaagaaataatcggcgatattcatgacgagtttgaccaggcggaagaattggcagttagaaaaatcggagacaatgaatatattgttgaaggttcaattaacttagatgatttcaatgatgaattgggaacagacatagactcagaagattatgaatcacttggaggattgataattgaacatcttgatagattgcctaacaagggagatagtgttaagatatcaaattgcaaacttacagtaattaagatggatgaaaagagaattgaccttgtaaaagttcagattgatccggaagtggaaaaaacagaagatgaagaaaaatctgaagatgaggacaaagaacaaaaatagaaaaattaaaaaagttctgacaggaaactgcattggttattgctgatgcagttcctttttattttgatagaaaaactttttatatacataaaaatgttgaatgagaattaaaaaacaatcgtaattaattttgaaattactgaataatatagaatgaaagtgtattttacaggtttttatgaagaaaatagcaggcttgattttaaaagaattattagttcaaattattttaagcacagtgcttgtggtgattcttgcatttattgtttttgaactttctttaggagatggaataatcagaattatgattttagcaatttatgggatttgttcattggtaggaggtttaatacttggaaaaaatatacaaaagagaaagtttttgtgggggcttgttgcgggagcaatttatatagggctaattatgggtatttcctttataataagggacgaaacaggagggggagcaattggacttggcacaggagtagtagtagctttaggctttggaacttttggtggaatgcttgggtaaattcaatgagggaaacagaccacagaatatagtaaaaaaacgtttgaatttgtaccatattgtgttataatagcgtaagaattgtgcagataggcataaaagtatattaattttggaggataactatgaaacatattaaaacattaacaggaaagactttaaaggaaactatgaaaaaaggtggttgtggtgaatgccagacatcatgtcagtcagcttgtaagacatcatgtacagttggaaaccagacttgcgaaaataaataattaaaaattaaataattttaaccggaaagagcgccattggcgcactttctgcgttatggtaggaggatattacagtgattcatcagtataagagtaatggatacaatattgtaatggatgttgaaagtggagcggttcacgtagtagatgatgttacatatgatgttattgcattatttgaagatacagaaatctcaaagattgttgagcagttgtcagataagtatgacaaggcagacattgaagaagcaattagtgaggttaatcaattaaaggaagatggacagctgtttactcaagatatttatcagccttttattgaagaattcaaagataagagacagacagttgtaaaagcgttatgcttacatattgcccacgactgtaaccttgcctgcaaatattgttttgcagaagaaggtgaatatcatggcagaagagccatgatgagctttgaagtcggaaagaaggctttagatttccttgtggcaaattcaggaagcagagtaaatcttgaggttgacttctttggtggcgaaccattaatgaactgggacgttgtaaagcagttagtagaatatggccgttcacttgaagaacctaaccataagaaatttagatttactttgacaactaatggagtgcttttaaatgacgaaataatggaataccttaataaggaaatgtctaatgttgttttgagtcttgatggtcgtaaagaagttaatgacagaatgagaccgtttagaacaggaaagggaagctatgatttaatagttcctaaattccaaaaacttgcagaaagcagaaatcagagcaattattatgtcagaggtacatttacaagagacaatttagatttctcagaagatgtaaagcactttgcggatttgggatttaagcagatgtcaatcgagccggttgtaggaccggaagaagatccttattcaattagagaagaggatttgccaaagataatggaagaatatgacaagttagctttggaatatattaaacgcaagaaagaaggaagaggctttaatttcttccactttatgattgatttaaatcagggaccttgtgtttacaagagattatcaggatgtggttcaggtacagagtatttggcagtaacaccttggggtgatttttatccatgtcaccagttcgttggaaatgaagagtttttaatgggcaatgttgatgagggcataaagagaactgaccttgtaaaaacatttggaaactgtaacgtatactcaaaagagaaatgcaaaaactgctttgcaagattttattgcagtggcggttgtgcagccaactcatttaattttcatggaacaatcaatgatgcatatgagattggatgtgaaatggaaagaaagagagtagaatgttcaattatgattaaggcagcgttagctgataatgagaaagaggtttattaaaaaaatgaaaatgaaaatgaacaaaacaaagagtattatatgttttataatctctattgcagtagtcttatttttaggctacgttgttatgttcggtgtaggcggacgtcatacaggtagtgcacagaacgtaacacagggcttggacttaatgggtggtacaagcgttagttatcaggttgatgatagcaagactaaaagttttacagcaactgatttagaagacacaagattgaaacttgaaaacagagttcatactttcagtagtgaagcaacagcttacaaagaaggtgacgatagaatcactgttgatattccgggtgaatatgatgcagatgcagtagtagaagaacttggtaagccgggtgctttatacttctgtacagcaacaacagacaaaccaacagatgaacagattgataatcatgagtatttaaaagttggcgaaagctactacaaggtatggttatcaggtaatgaagtggcagacgctaagggtgttgcttcaaaaaacaaggatacaggaaagacagaatatgttgtaaatcttgaatttaattcgaaaggaacaacagctttcggtgaaatgacaactcagtatgttggacagttatcatacattatctataatgatgaaattttaagtgcaccaaaaattcagtcagctatttcaggtggacaggctgaaattaacggacagaagagtcttaaggaagctgaagaattagcttcaaacattagaattggtgctttaaaggtagaattaaaggaaatcagtcataaggttcagagtgctcagcttggtagtgatgcattatcaaagagtattaaagccggaatcattggtttcattatcattattttgttcttgttaatagtttatagaatcccgggacttgctgcaggacttgcattacttacatatgtagaattaatgttacttgcattaaacggattcgacttaacacttacattaccgggtattgcaggtattatccttaacattggtatggcagttgatgctaacgttattatttacgcacgtatcagagaggaaattgctgccggcagaagaacagaaacagctattaagacaggcttcaagaaagcagcctcagctattatcgatggtaacattacaacattaatcgcagctttggttcttctttggaagggttcaggtacagtacagggatttgcaacaacattaggaattggtattttaattcagttattcacatcacttgttatttcaagaatatttgtatggattctttactatatgggattccaggcacctaagttctacggaaaagaaaagacaagaaagaatatcaattttgttgaaaagagaaaagtattctttgggatcgctattgtttgtatcgcaattggtattggtggattaatctttaactcagctaacaacggtggtgcatttaactatagtattgaatttaagggtggtacatctacagaaattcagtttagtgaaaactatacaatggatgaatttaacagcaatgttaaacctgcaattgaaaaattattaaattcaactgatattcaggcacagaaagatactaacaaagacggacttttcacaattaagactagaaacttcaaagacaatgaatttgaagaaatgaaagatatgcttgtaaaagattacaaggcagtagatgacaaacagaactttactaatactaaaatttcagatacagtaagtaaggaaatgagaagtgatgcagtagtcgcaacagttcttgccacaatctgtatgttattctacatttggattagatttaagaacatccatttcgctcttgcagccgttatggcattaatccacgacgtacttatagttatcggattctatgcattatcaagagttacagttggtacaacatttattgcatgtatgcttacaatcgtaggttactcaattaatgctacaatcgtaatctttgacagaattagagaaaacaaggcagttatgaagcgtgatgacaagatgattgaaatagttgacagaagtattacacagacacttacaagaagtatctatacaactttaacaacattcgtaatggtatttatgattttcatcatgggtgtttcatcaattagagaatttacattaccacttatgacaggtatgattgccggtgcattctcatctgtattcattacaggttcattatggtatgttttaaaaggaaagaaatctgataaataataattgttagattttaggaagcggtattgccattggtgataccgtttcttaatcttatggagaaactatgaaagaaagatggtatctgcaaactaaaaaagcagatttcaatgaaataagcagaaaatttaacattagtcccattctggcaagattacttagaaacaggaatgttataggtgatgaaaatattaaaaaatatctttctcccgacattgaaagactaagttcaccatggatgtttaaagatatggataaagcagttgatattttaaaaatcaaaattgctgccggaaacagaataagagttatttgtgattatgatgtggatggtgtctgctcagggtatattttgtatagatcacttaaaaagcttggagcagtagttgatgttgttgtacctcacagaatagaagatggctatggtattaacgagaatcttataaaaaaagctttcgaccagggaatagatacaattttgacctgtgacaacggaattgccgcatataatcaggttgaatatgctaaaagccttggaatgacaataattgtaacagaccatcacgaagttccatatacggaaacagaacaggggcgagaatatattattccaaaagctgatgcagtaattaatcacaaacagaaagattgtggatacccttttaaggaattgtgtggggcaatggttgcccttcaactaatttcagcactgacagagtcctatggcatatcaaaaagagacgtttaccggttacttccatatgctgctttggcaactatatgtgacgtagttgagcttcagggcgaaaacagaatggttgttcaatatgggcttaaaatgataaagaactgcaaagatgtcggcttaaatgcattaatagatgcctgcgaaatagacaagaacaacattgactcataccatatagggtttgttttgggaccgtgcataaatgccagtggacgacttgatacagctaagaaagccatggaacttttaagtgaaacgaatagggaaaaagctgatattcttgccacgtcattaaaagaattaaatgacgaaagaaaagctatgactgaagaaggaacaaaaaaagcaattgaaatagcaaaagactatgatgataatgttttggtaatatatttaaaagattgtcacgaaagtatagccggaattattgcaggaagagttagagaaaggtgtaataagccggtaatagttctgacggatgccaaagattgtgtgaaaggctcaggaagatctattgaggaatatgatatgtatgaagaactttgcaaggttaaggatttgtttcttaagtttggtggccacaaaatggctgcaggtgtgtctcttccaaaagaaaacatagaacttctcagaaaaagattaaacgagaacagtactttgacggaagatgatttatgccttaaagtctggatagacatgcagcttccaattgagtatatttcaatgaatcttgttgaagaattaaaaacacttgcaccttttggaaaaggaaacgagaagcctatttttgcagacaaaaacttaaaaattaaaaaacttcaaatattgggaaaagccggaaatgtgctgaaattgacaattgaaaacagtacaaattacagaatgacggctataatgtttgacagaactcaagaatttatgggatttattaaggaaaaatttggacaggaagagattaataaagctttacttggtcaaaataatgcaattacatttatggcaactttttatcctacaataaatgagtttagaggtaacatagatttgcaaatagttattgatagattttgctaataagggtaaaatatttctatatatatttaaaatatgcaataaattatacagaagcatattttcataaaaataatattgggcagaatgcccgggttacattaggaggaaaaaatgagcacagtagaaaagtacattagaagcattcctgattttccgaaacagggaattattttcagagacattacaacagtaacacaggatcctgaaggattacagttagccattaaaagtatggaagataagattaaggacaaagattttgatgttatagttggtcttgaagcaagaggatttatgtttggtacacctattgcatttgacatgaaaaaggcatttgttccaattagaaagaaaggaaagcttccatggaaaaaaatttcagaatcatatgatttggaatatggaagtgctgaaatagaaattcatactgatgccattaaagaaggacagaaagtagttatagtagatgatttaatagctacaggtggaacagttaaggcagcaattaacttaattgagcgtttaggaggagaagttgtttcatgtttattcttaactgaattggcaggacttaacggaagaaaggctcttgaaggatataatgtagagtcagttgtagtttacgaaggcaaataattttttgatggagatactctatgggcgaaaaaaataacattaacgtaaaaattgaaaatcatggtgttataccgaaagaagaagaacatgctacaccggaggaattgtatagcagacttatagacaagattaaaagatatcatccttcagcaggtgatttgagtgcaattgacaaagcttacaatttcgcaaagaaatctcacggtgaccagaaacgtaaatcaggtgagccttatataattcaccctatccacactgcactgattcttgctgatcttgaattggataaagaatcaattatggcaggattgcttcacgatgtaatggaagatacaaaagttacaagggagcagatgattagcgagtttggagaggaagtaacagacttagttgatggtgttacaaaacttacaaaattagactatgatgctgacaaagtagaaaagcaggcagaaaatcttagaaagatgtttcttgccatggcaaaggatattcgtgtaattcttataaaacttgccgacagacttcataatatgagaactttgcagtatatgacacctgagaagcagaaagaaaagtcaaaggaaacaatggagatttatgctccaattgcagaccgtcttggtatttctaagattaagatagagttagacgatttggcccttagatatttagaacctgagaaatataaagatttggtagatggtgttcatttaagacttgaacatagagaagaatttatgagccagcttatagctgaagttgccggatatattgagaaggcaggaattaaagctacaatagatggacgtgtaaaacattatttcagtatttataagaagatggttaaccagcacaaaacattagaccagatttatgatgtttttgccattcgtattattgttgacacagtaatggaatgttatggtgcattgggcgttatccacgagaaatatactcctgtaccgggaagatttaaggattatattgcgatgcctaagcagaatatgtaccagtcacttcatacaacattaatcggacctaacggtcagccctttgaaatccagattcgtacaatggaaatgcacaaaacagcagaatatggtatcgctgcacattggaaatacaaagaaaacataacaggtgaaggtgacaatgaggaacagaagattagttggttaagacagattcttgaatggcagagagacttgtctgataatcacgagtttcttaaccttctcaaagatgaccttaatatgttctctgagaatgtatattgcttcacacctaatggagaccttaagagtctacctaatggttcaacaccaattgattttgcttacagtattcatagtgcagtaggtaacaagatggttggtgccagagtaaacggaaagatggtaaatattgattataagattcagaacggtgatcaggtagaagtcgtaacatctaacaattctaacggaccaagtatggactggcttaagattgttaaaagtacacaggcaaagaacaagattaatcaatggtttaagttacagaataaagaagaaaatattattaaaggtaaggaacttatagataaatattgtaagtctaaaggcattgtattgcaggatattttaaaacctgaatatatggaaaaagtaagacttaaatatagctataaggattggaactctttagttgcatccgtaggtcacggtggacttaaagaaggacagattgtaaataagcttgttgaggaatacaacaagacacatagaaaagaaataacagatcaggatgttcttaattcaacaataggcgaaaaggctgaaaataagacacatacatcaaagagtggaattattgtcgaaggtatggatgatgtggcagttagattttctaaatgctgtagccctgttcccggtgacgaaattattggttttgttacaagaggacgtggtgtgtcaattcatagaacagactgtattaatataattaatcttcctgattttgaaagaggaagacttattgaggcaagctgggctgctgatgaaggaaagcaggacggcaagtatatgacagaaattgttatatatgctcacaacagagtaggtattttaacagacctttctaaaatatttacagagaaaaacattgatgttaacagtattaacagtagaacaagtaagtctgaaatagccacaatatctatgtcatttgcaattcagggaactgaagaacttaatagtcttatttcaagaataagacagattgacagcattattgatattgaaagaacaacaggctgacaattttaaataaaaagttaaaacattaacagatatgtacagaaataaaattgaaatggagaatatatgggaaagattgaaattagaaatcttttagttagcgagtgctacactaattgttatttatgtaaaaataaagaaacaggtgaagggtttatagttgatccgggtgaaaacgaacttaaaatttccgtaaatatttcaaaaatggaaatgaaacctgtagcaattattttaacacacggtcattatgaccacattggtgccgtaaatgctttaaaggaaagatacggaattaaggtttatgtgtctgaagctgaaaaagagttaattggagataaaaaaatgaatctttcttcatattttgattcaccaatgacaattgaagcagatgagttccttaaagatggacagaagattacattggcaggaattaatatgacatttattgcaacaccgggacatacaccaggcagtggatgttattatttggaagacaatgaaatcttatttagcggtgatacattattccacggaagcagaggaagaacagattttccgggtggaagcgaatctgaaataatgaaatcaattagagaaaaattattaaagaaacttcctgatgaaacagcagttttaccgggacataatgacagcacaacaataggaacagagaaggtatattattaatgattgacattcagatagtaccggaagaatttcaatatgatgtacaatccatggttcaggctttttatatgggacatccatttaagattaacagtcaggttcaggattactatagaattttaaaagtcgtttatgaagaaaatagaataaatataatattgtcagacaatgaaaaaaagctttttgaagaacattatgaaatagactgcagtggtattgttaatcactgcgatttatctaaaactcatagaacagagttaaagaatgttttaaaaaagcttttgtacagtgttatgtcaaaggatacaggaaaggaattgccttggggcaatctaacgggaatacgacctgccaaaattccaggaatgttgtttgaacagggaatgagagaagagcaggtccgaaagacaatgaaggaaacttatttaatttcagatgaaaagcttaaccttgcaattgacatttcaagaagggaaagcagaatattatcagatattaattataaagaaggatacagtctttatgttggaattcctttttgcccaactacatgcctttattgttcgtttacatcttatcctatatcaatgtacaaggataaggttgacagttatgtagacagcgtcataaaagagattaaattcttaggtgagcaattaaaaggtcgtgaacttaacacggtatatattggaggaggaactcctacaacattggaacctgatcagatggataggttgattacaagtcttaaggagaattttgattttagcacagtaagagagtttactgttgaagcgggacgacctgacagtattactgaagaaaagcttaaaacattaaagaaacataatgtttcaagaatttcaattaatccccagacgatgaatcaggaaactttagatattattggaagacgacatactgtagaacaggttaaggaagcgtttaagcttgcaagacagtgtggctttaataatataaatatggactttattcttggacttccacaagaagatgaaaaaatggtaagatattctatggaagaggcaaagaaacttagtccggaaggaataaccgtacattctcttgcgttaaagagagcagcacgtctaaatattatgaaagataaatattctgacatgcatatggaaaatagttctgaacttatgaaagttacagaaaagtattcagaagagatgaatatgaaaccttattatctatatagacagaagaatatggcaggtaatcaggaaaatgtaggatattctattgaaggttgtgaaggcctttacaatattcttatgatgggtgactttcaggatgtatgggccgttggagcaggagcggttactaagcttttgtcaccggatagaaaagagggcaaaagaatagatactgtaaagaatgtagaccaatatattgaaagaattgacgaaatgattgaaagaaaaagaaaatactttcaatctatgggttgttaaaaataaaaaacaatagtaaaatttatggttgtgagaaaaataataaggagacatagaaaatggcattaagcaagaaacctgttacaggaatgaaagatattcttcctgaagagatgaaaataagaaattatgtgcagaatgtaattaaagatacatataaggctttcggttttacacagattgaaacaccttgtgtagaaaatatttctaaccttactaataagcagggtggagaaaacgaaaagttaatttttaagattttaaaaagaggcgagaagcttaatcttgaaacagcacagacagatatggatgttgttgacaacgggttaagatatgacttaacagttcctcttgtaagatattattcaaataatgccaataacttgccatcaccttttaaggctttacagatggggagtgtttggagagctgacagaccacagagaggtcgttaccgtcagtttatgcagtgtgatattgatattcttggagacccaagtaacctggcagaaatcgaattgattcttgcaactacaacaacacttggaaagcttggatttaagaattttcagattagaattaacgagagaagaatattaaaggctatggctgcttacagtggtttccctgaagaaagctatgacagcgtatttattattcttgacaagatggacaagattggtcttgaaggagttaaggaagaacttattaaatatgaattttctgaagaatcagtaaataagtacgtttctttatttaaagaaattgaacagcaggctaatcctattgattatttggctgaaaagcttggtgattatatggaagatgatgttaagcagtggatgaacgagattattgaaagcgttaaggctactaagtcatctgattttgaaattatatttgatcctactttagttagaggtatgtcatattatacaggaacaatttttgaaattgcaattcctgaatttggtggaagctgcggtggcggcggaagatacaataagatggttggaaaattcattggacatgatgttcctgcctgtggtttttcaattggttttgaacgtattgttttattattaatggaacagggctttaagattcctgaagaatacaataaggttgcttatcttattgaaaaaggtgttaaggaagatgcactttgtgatgttattgcacaggcgcaggaagaaagaaagaatggtactcaggttcttgtaacaagaatgaataagaataaaaagttccagaaagaacagttaaaagagcagggttatgaagaattcaaagaattctataagaacccattaaaataatatattttatttcacagtggatgaattaggaggaagaattatggcagagtcaatgcagggacttcatagaagtcacagatgtacagaagtatctaataagaatattggtgaaactgtaactgtaatgggatgggtccagaaaagaagaaatttaggaagcttgatttttatagatttaagagatcgttcaggtcttttacagttagtttttgatgaaaacaatggtgaagtttttgaaaaagctaaaaatcttagaagcgaatttgttattgcagcagaaggtgttgttagacagcgtagtggtgcagttaatgaaaatatggcaacaggtgatattgaagtaactgtaaacacacttagaattttatcagaagctgaaacacctccattccctgttgaagaagatgctaatactagagaagagttaagattaaaatatagataccttgatttaagaaagcctcatcttcagagaaatcttaagatgagaagtgatattacaacttttattagaaagtttatgtcaaatgaaggatttattgaaattgaaactccaacattatgtaagagtacacctgaaggtgcgagagattatttagtacctagtagagtacatccgggatgcttctatgcattaccacagtctccacagttatataagcagttgcttatgtgctcaggttttgacagatatattcagattgcaaaatgttacagagatgaagatttaagagctgacagacagcctgaatttacacaggttgatatggaactttcttttgtagatgttgatgatgtaatcgatgttaatgaaagattattaaaggcattatttaaagaaattcttgatgttgatgttcagttaccaattcagagaatgacatggattgaagctatgaacagatatggttcagataagcctgatacacgttttggaatggaacttattgacgtaacagacgttgttaaaggttgtggctttggtgtatttacaggagcaattgaaaacggcggttctgtaagaggtcttaatgttaagggacagggcgcaatgccaagaaagaagattgataagttagttgattcagcaaagggcaacggagcaaaaggtcttgcatatattgcaatgcatgaagatggaacaattaagtcatcatttgctaagtttatgacagatgaggaaatggataaccttattaaggctatggatggtcagccaggcgatttattagtatttgctgctgacaaaaacaagattgtttggaacgttcttggtgcacttagattagaattagctgaacagttagatttaattgataagagcaaatttaacttcttatgggtagtagaattcccacagtttgaatggtcagatgaacagaacagattccttgcaatgcatcatccatttacaatgcctatggatgaagacttggattatattgaatctgatccaggcagagttagggcaaaggcttacgatatcgtacttaatggttcagaaatcggtggcggcagtgttagaatccatcaggcagacgttcaggaaagaatgcttaaagcattaggttttacaacagaagcagctcacgaacagtttggattcttattagatgcatttaagtatggtgttccaccacacgcaggacttgcatacggacttgacagacttgtaatgcatatgacaggtgaagacaacattcgtgaagtaattgcattccctaaggttaaagatgcatcatgcttaatgacagaagcaccaacagctgtagatgcaaaacagttagaagaattatcaattgaaacaattgatgttgaagaagaaaaataaataatgagagatgtgaagaaatagaaacgattataggaatatataatagttggcaaggattcacatagcttaatacaaagataaaaggctgctcagttgggcagccttttgtgatgctagtttaatcttagtcgtcttatttgctcttgcatactgccaacgtagtttgaaagctcattgtatttgttgtttaatttctcaacatctctttttaagatattgtagttgtatacaagttctttgtatgaatttgaagtagatgaggcgttataagctttataattgttagtagtgttgctgttagtcatattattcagagaaagattaatttcctgcttacaaaccacattaaaattcaagtcgatttcataaagtgcattgtcagttgtaacaaaaatgcaattattatgtacaaaagcagatatatgatttgagccggatatgttttcgacaatacaatgtttctcggtaagattgtctgaacaaactcccataagtgaattatccaaataaaaaacatataatttattgttaaaaacaagtgttgcacaagatgttttaaggcaaagaacttcttgaaaactattttgtgttacttgggtaaggacgaatgaattatctacagagtagtaggaaacaagtggagaattgactgaataaacattaaagtcttttttgaaatctttaaaaacatagccctttgaaaaaacacgaccgttggctatcaggtaagatttgatttgccgtgctgactgctcgaaaatcattggctggccgttttctaattctataatatgatacataaaaacctcccacattagttgctataaaaatcatataacaaaatatgcaggaggtttaaaaattatttcataaaacgttaggtttaaagcactattatatgtacaaaataaattaaacctaaagagctatttattataaaaggattagatttaaagtattattcgctatacaaatcaattacatctaaagcgctatccacaatatgaataggaagctcctttaaagaatcatttggatattttaaatcaggaatgcagataacaggaatgccggctgcgtgtgcggctcggattccgttttctgaatcctcaaaaataacagcttcatctttgttaaaaggtgtcttcccaagggcttttaagaaaatttccggattaggttttgaaatttttacctggtctccgccaataatatgtttaaaataatcacgaataccggctatatttaaatatttttcaaccataggagttactgttgaagaggcaacacaacaaattgttccgtttcccttaaaaaactccaataattcgggaatgcctttcataatttccaaaccgttttcttcaacatcctttgcaactaattcacgagtttccttaaatatctgttcggtagaaaagtctttgccaaagattttcttgtgaacttctttaacagaagcaaatgagagccctaatgtttgggtaaaatcttcaattcttgaaggatagccatatttcttatgaaccatgctttcaaacttaaaaaactgacgctcagtattaaaaatcaatccatccatatcaaaaattgcaacttttggaatgttcataataaaattctccttagtatttggctttaaagctatttaataagattgcttataaaaaataataatagtgctgtgcatagcaactattaattactagtttaaaatatcatatatgtttgaaaaatcaagagggggaaaagaaaatattttataaaaatttgattttgaaagaaataaatgaataaatataagtaaaaagcttgttttttgactttcttaatagaaataattgtggtaaacttatgtttgataaatgtttgacaatatacaggaggtacaaaatgttttcatttgacgaaattaagaatgcagatattgaaatagcagaagctatgcaggacgaaatggacagacagcagagccatttggagcttattgcatctgaaaatatagtaagcaaagcagtaatggcagctatgggaagtcatttaacaaataaatatgcagaaggttatccgggaaagagatactacggcggatgtgaatatgttgacgttgtagaagaacttgcaagagaaagagcaaagaaattatttggatgcacatatgctaatgtacagccacattcaggtgcacaggctaacttagcagtatttttcgctttggttaaaccgggagatacagttatgggaatgagccttgatgcaggtggacatttaacacatggttcaaaagttaatatttcaggtacatattttaatatcgtttcttatggagtaaatgaagacggttatatagattacgatcaggtgttggaagttgcaaaagctaacaagcctaaacttatcgtagctggtgcaagtgcttacccaagaaagattgattttaagaaattcagagaaatcgctgacgaagtaggtgcttaccttatggtagatatggcacatattgcaggtcttgtagctacaggacagcatatgagcccaattccatatgcgcatgtaacaacaactacaactcataagacattaagaggaccaagaggtggacttattctttcaagtgaagaatttgctttggaacataagcttaataaggcagttttcccaggaatccagggtggaccattaatgcacgttatcgcatctaaggctgtttgtttcaaagaagctttatcacctgaattccaggagtatggcaagaacattgtggcaaatgcacaggcacttgcaaaaggtcttacagacagaggttttgaccttgtatcaggcggtacagacaaccacttaatgttagtagacttaagaagcaaaaacattacaggtaaggaatttgaaattgctcttgataaagcaaacattacatgtaacaagaacgcaattcctaatgacccacagaaaccgggaattacaagtggtgtaagaattggtacacctgcagttacaacaagaggacttaatgaagcagatatggatgtaatagcagaatgcatggcattaatcgctgctgatccggaaggaaacaatgaagcagtaaaggcaaaagtaaaggcgttaacagacaaatatcctttatatgcataaagaaacaaaatattaatatgactgttgattagaaagtagaatcaatagtgttgtaaaatccttacagtaaaaggactgattggtcttgcgagctgtaaggattttgttttttatggaatatgtttcctgtataattccccaatttttggaaataatgtaatggattagatttacagggggagttatgaaaagtgattttgtaaaatgtggtattttaggttggtgtattgaaattatatggacagcctttcatggaataaaaagcaaaaataataaattcattggttatacgtcaataattatgttccccatatatggcttggcatcagttataaagccaataagccttaagttaaagaaaatgaaaatgcctacaataatcagggggatagtttattcaataggaatttttatggtagaattaattacaggaagtattcttaagaaaacaaataattgtccgtgggattatagcgataaaaagtacaacataaacggtgtgattagaattgattatgcaccgctgtggtgcattgtaggtgttatttttgaaaaaatgcttaactcaaaatagtgcagaaatagagcaaagcaaaaaaatagaaaataaaaatcttccaaacagtatatttaaacatgcttggaagattatataaattaattatttaaagaattttataatattgtccattctggaagtcattgactggaatagtaaatcaacaatagtaatggcaaccattgattcgacaacaactacagctctaggaacaataataggatcgtgacgaccttttatattgatatcaatattttccatagatttatttactgtctgctgtgtcattgcaatagaaggagtaggcttgattgcggctctaagaacaataggtgagccgtcgcttatgccaccaagaatccctccggcatggtttgatgtttttgaaatatgaccattttcaactttaaaaccatcattatctttagaacctgtagatgtggcaactgcaaaaccatcaccaatctcaatacctttaacagcaccgatggacataattgcttttgcaaggttagcatctaacttatcaaaaacaggttcacctacacctgttggcatgccggctacaacacattcgataataccaccaacggaatccatttcagccattttctctttaagcatatcacctgcaagtttagcagcgttgctatcaggcatatacataggatttttctgaatttcgtctttattaaaattattgtaatttatagatacgttaccgatagatttagaataagtcataatggaaatattaagtgattctaaaatcttagaagcaatggcgcctgcggcaactcttcctatagtttcgcgacctgatgaacgtccgccaccgcgataatctctgaaaccatatttttcatcaaaagtgtaatcagcgtgtcccggtctgtagcattctgcaatctgtgagtaatcagcagaatgatgatctttattgtgtacaaccaaagaaataggagtgccggtagtttttccttcaaaaataccagacaaaatctcgaccttgtcatcttcgttacgctgtgtagtgtatgcagactgtcccggctttcttctgtcaagaaaaaactgaatgtcttcttcacaaagaggaactcctgcagggcaaccgtcaactacaacgccaacagcctttccatgagattctccccaagttgtaattttaaaaatgttaccatatgttgaaccagccattttaacctccgtaaataaaatccgtaaaaatttttgcctttcacgattataacaaggaatagggataatagcaaattgaaaatatctgcttgcgttaatactaataaaataatataataatacaatgcgttaaaaaaatgaaatcaatgaggtgttttatgtttaaggttttagcaaaagatggaaatgcaaaacgaggcgaatttacaacagttcatggcaagattcagacaccggtttttatgaatgtaggaacagcggctgcaattaaaggtgcagtagctgcagaggatttaaaaacgattaaaacacaggtggaattatctaatacatatcaccttcacgtaagaccgggtgataaggttgttaagaaattaggcggtattcataagtttatgaattgggacagacctattcttacggattcaggtggttttcaggtcttttctcttgcaggacttagaaaaataaaagaagaaggagtatactttaactctcatgtagatggaagaaagatttttatgggacctgaggaaagtatgcagattcagtcaaacttagcttcaactatagctatggcttttgatgaatgtccttcaagcgttgcatcaagacagtatattgaaaattctgttgcaagaacaacaagatggcttgaaagatgtaaaaaagaaatgaacagacttaatggtctggaggatacaataaataagaatcagcttttatttggaataaatcagggtggaatatatgatgatattcgtgttgaacaggccaaggctatagctgatatggatttggatggatatgccataggtggcctggctgtaggtgaaagccatgaagagatgtatagaattattgaaaaggttgagccgcatcttccaaaggataagccaatatatttaatgggagtaggtacaccggctaatatacttgaagccgtagaaagaggagttgatttctttgactgtgtttacccatcaagaaatggacgtcatggacatgtatatactaatgccggtaagttgaatttgtttaatgcaaagtatgaaacagattcaagaccaatagaagaaggttgtgagtgtcctgcatgtaagtatcactcaagagcatatatcagacatcttcttaaagctaaggagatgttaggcatgcgcttatgcgtcttgcataatttgtatttttataatacaatgatggaggaaataagagatgccattgaggcaggaaactatgccgaatataaagctaagaaattagaaggctttaaagaaaatgacaagaaataggaggaacgaacaatgccaattttagcagcaggttctcaggcagcaagctggggaataatggtcctttatgtagtattaattattggatttatgtatttccttgctattaagccacagaagaaacaggaaaagaaacagaaagaagttatggatgcagttgcagtaggcgatagcattttaacaacaagtggattttacggaatggttattgatgtaacagatgatacagttatcgttgaatttggtggaaacaagaactgccgtattccaatgcagaaatcagctattgtagatgtagaaaaagctgaatagttactatgatataaatacaataatattaaagattgaagtaaaggtgtttatgagatttaaggtctataaacaccttttttctgttttggctatgttgatggctatgctgatgatgtcacttggaatggcattcttctcaataagaaaaatcaagagataatatagtgttatattataaaaagaaggcaacggtgaacttgtaaaggcaaggttgttgccttcttttagtttattcttttagcaaaactattacggaaacattatttaagaaagaaaacaagtatgaaaaatagaaaaaataaagtagaatgtttattataaattatgaaccaggttaaatttaatcaagaaatatattatatatgtaggttgataaaatatatcatttacgatataatttaagaattagcgtagacttttgtacttaattatacagaagctacttcttattaatcacgatagaaaagaggatacatgatgaattttaatgttgcagtaattcccggtgatggaattggaccagagattgtaagagaagcacagaaggttcttgatgctgttggaactaagtttggtcatgtcttcaactacacagaagtggatatgggcggggtgtcaattgacaagcacggagttccacttacagatgaagcattagccacagcacagaaaagtgacgcagtccttcttggtgccgtaggtggtgtcgtcggaaaagacagttggtacgaacttccacctaaccttagaccggaggcaggactacttgccataagaaaaggacttaatctttttgctaaccttagacctgcatatctttacaaagaattaaagggtgcctgtccattgaaggaagaggtagcagatgccggttttgacatgattattgttagagagttaacaggtggtctttatttcggagaaagaaagactgaagaagttgacggcgtgcttacagcaacagatactttaacatataatgagaacgaaattagacgtattgcaaagaaagcttttgaaatagcaatgaagagaagaaagaatgtaataagcgttgacaagtctaacgtgcttgactcttcaagattatgggataaggttgtaaatgaagtggcaaaggattatcctgaggttacattaacacatatgttagtagataactgtgcaatgcagttagttaaggatccggcacagtttgatgttgttgtaacagagaatatgtttggggatatcctttcagatgaagctagtatgattacaggatcaattggaatgttatcatcagccagtcttagagaagataagtttggactttatgaaccaagtcacggtgctgcacctgatattgcaggtcagaacaaggctaaccctatagcaacaattctttcagcagctatgatgctgagatactcatttgatcttgataaggaagcagatgcagttgaaaaggcagttgagaaagtgttagaagacaatatcagaacagttgatattatgtcagacggaatgacacttgttggctgtaaagagatgggtgacgagatagtaaacagactttaataaagtcacttcatatgattttagattttaaagactataatagatagaccgattttaggaggaaataagatgaagagtgatgcagtaaaaaaaggacttcagcaggctccacacagatcattgtttaatgctctgggtatgacagaagaagaaatggaaagaccattagttggtattgtatgttcatataatgaaatcgttccgggacatatgaaccttgataagattgctaacgcagtaaagatgggtgttgccatggcaggtggtacaccaattatgttcccggctattgccgtatgtgacggtattgcaatgggacatgaaggaatgaaatattctcttgtaacaagagatttgattgcagattcaacagaatgtatggctagggctcaccagtttgatgctttagttatgattcctaactgtgataagaatgtaccgggattattaatggctgcagcaagagtaaatgtgccaacagtatttgtttcaggaggaccaatgcttgcaggacatgttggaggacataagaccagtctttcatcaatgtttgaagcagtaggtgccaatgctgccggcaagatgtctcttgaagaattaaatgaatatgaatgtaaggcttgtccaacatgtggttcatgttcaggtatgtacacagctaactcaatgaactgtcttacagaagcattgggcatgggacttaagggtaacggaacaatccctgctgtatattcagaaagattaaaacttgctaagcatgcaggtatggcagtaatggaattatacagaaagaatatcagacctcgtgacattatgacaaaagatgctattttaaatgcattaacagtagatatggcacttggttgttcaacaaacagtatgcttcatttacctgctattgcacatgaagttggatttgattttgatatttcatttgctaacgaaatcagtgaaaaaacacctaacctttgccatttggctccagcaggtcctacatatatggaagaccttaatgaagcaggcggtgtttatgcggtaatgaatgaattaagagaacttggtcttttacatgaagattgtattactgtaacaggaaatacaattggagaaaatattaaagattgtgaaaacaagaatccacaggttatcagacctcttgataacccatatagtaaaacaggtggtcttgcagtattaaaaggaaatcttgcacctgatggtagcgttgtaaaacgttcagcagttgtagatgaaatgatggttcataaaggacctgcaagagtatttgaatgcgaagaagatgctattgtagcaataaagggaggaaagattgtacctggtgatgttgtagttatcagatatgaaggacctaagggtggccctggaatgagagaaatgttaaatcctacatcagcaattgcaggtatgggacttggttcatcagtggctcttattactgacggacgtttctctggtgcttcaagaggagcttctatcggacatgtatctcctgaagctgcagtaggtggacctattgctttagtagaagaaggagacattattaaaattaatattcctgaaatgactcttgaacttgatgtttctgatgaagttcttgcagaaagaagaaagaactggacaccaagagaaccaaaggttacaacaggttatttggcaagatatgcatctatggttacatcaggcaacagaggagcaattcttgcaatcgataaataagacaagggagaggacaagattatggaattaaacggttcacaaatagtaatagaatgtttaaaagaacagggtgttgatacagtatttggttatccgggcggaacaatccttaacatatatgatgaaatgtataagcactcagatgaaattacacatatattagtatcccatgaacagggggcagcccatgcagctgacggatatgcccgttcaacagggaaagttggagtttgtatggcaacatcaggacctggtgcaactaacttggttacaggtattgcaacagcatatatggattcagttccattggttgctattacagctaatgttgccaagtcaggacttggaaaagattcatttcaggaaattgatattgttggtgcaacaatgcctattacaaagcacaactttatcgttaaagatattgaaaatcttgcagatacaattagaaaggctttccgtattgcaaagacaggcagaccgggtcctgtacttgttgatataacaaaggatgttacagctaacaagtataattacgaaaaacaggaacctgttaaagtggaaagaatttctgacacaattaaaaaagaagacattgatatagtagtagaaatgattaagtcatcaaagaaaccatttattttagttggcggtggcgcagttatttcagatgcagctaaggaagtaagagaacttgcagaattagttgacgcacctgtttgtgattcacttatgggtaaaggtgcaatggatggtaacagcgaaagatatacaggaatgatcggtatgcacggaacaaaaacatcaaactttggtgttacaatgtgtgatttattattagttcttggagcaagatttagcgaccgtgtaatcggtaaagctaaggcttttgctaacaatgcaaagattgtacatattgatgttgatccatcagaaattaataagaatattaaggctgacgcaagcatcatcggagacatgaaagaggttcttattagacttaatagtgctcttacaaaacaggatcatgcagattggatgcaggaaattaaagaaatgaaggaaaaatatcctttagctcttaacaaagatgttcttacaggacctgctgttattgattctttatataacattacaaatggtgatgctatcattacaacagatgttggacagcatcagatgtgggctgcacagttctataagtttaaagaacctagacagcttattacttcaggtggacttggtacaatgggctatggtgttggcgcatgtattggtgctaagatgggcaataaaaacagagtatgtgtaaacgttgcaggtgatggatgtttcagaatgaacatgaatgaaattgcaacagcaacacgttacaatattccaattattcagattgttattaataaccacgttcttggtatggttagacagtggcagacattattctatggcaagagatattcaaatactgttcttgacgatagcgttgatttcgtaaagattgcagaaggaatgggagctaaggcttacagagcaacaacagttgaagaatttgaaaatgcattaaaagatgctatagctctcaatataccatgtgttattgattgtcagatagatcaggatgaaaaggtattccctatggttcctgctaatacagcaattagtgaagttttttcagaagaagaccttgcagaaaaaggatatgactgctaatatagatatattagtatttactaaaaatacggaaaatgcctgttatgcaggcattttcctatgacataaaagggaggtttcaaatggctagagtatataatttctcagcaggaccggcagtattaccggaagaagtattaaaggaagcagcagaagaaatgcttgattacaagggatgcggtatgagcgtaatggaaatgagccatcgttcaaaaatgttccagcagattattgatgaagcagaacaggatattagagatttaatgaatattcctgataattataaagtattattccttcagggtggtgcttcacagcagttcgctgcagtaccaatgaacttaaagaagaatggtaaggctgcttatattgtaacaggacagtgggctaagaaagcagctgcagaagcagaaaagtatcttgaggtacagagagtagcttcatcagctgataagacattctcatatattcctgattgtagtgacttagatattgatgatgatgtagattatgtatacatttgtgaaaacaatactatttatggtacaaagtatcatgaattacctaatactaagggacatacattagtagctgatgtatcttcatgtttcttatcagaacctgttgatgtatcaaaatacggtgtgatttatggtggtgttcagaagaatgttggaccagcaggtgttgttattgcaattattagagaagatttaattcctgaagaagttgacagtacagttcctacaatgcttcagtggaagacacaggcagacgcaggttcactttacaatacacctccatgctacggaatttatatttgtggtaaggtatttaagtggattaaaaagatgggtggtcttgatgcaatgaagaagcgtaacgaagaaaaggctaagattctttatgatttccttgataacagcaaattattcaagggtactgtagttcctaaggaccgttcgcttatgaatgtaccttttgtaacaggtaacgaagaattagatgctaagtttgttgcagaagctaaggctgcaggacttgaaaaccttaaaggtcatagaacagttggtggtatgagagccagcatttataatgctatgccaattgaaggtgttaaggcattagtagagtttatggaaaaatttgaaaaagaaacgcataaatatatttgtggttaaataagttagtttgaattaattagaaccacttatatgaaggagaatagagatgactaaagttaattgcttaaatcctatttctgaacttggaacaggattatttaataataattacgaaatgacagataattttgctgatgcagatgtagcattagtaagaagtgcagcaatgcatgacttagatttacctgaaagccttttggcaattgcaagagcaggagcaggtgttaacaatatcccattggataaatgtgcagataagggtgttgttgtatttaacacaccaggtgcaaatgctaacggagtaaaagaattagtgctttgtggaatgcttcttgcatcaagagatattattggcggtaacaagtgggttgataataatacggacaatgaaaatatcagcaaagatatggaaaaggctaaaaagaattttgccggaaatgaaattaaaggcaaaaagcttggcgtaatcggtcttggagctatcggaagattagtagccaacgctgctgaatcaatgggaatggaagtatacggaaatgatccatttatttcagtcgaaggtgcattaagccttaagagagacgttcatcttgtaaagacaagagaagaaatctttaaagaatgtgatttcattacagtacatacaccattagtagatgatactaagaagatgattaataaagaaactattgcaatgatgaaagacggagttgttgttcttaattttgcaagagatttattagtagatgatgaggcaatgtgcgaagctttagcatcaggaaaagttaagaaatacgtaacagatttccctaacccaaatgtggcaggagttgaaggcgttattgcaacacctcatcttggagcttcaactgctgaatcagaagataactgtgcagttatggcggttaaggaaattatggatttcgtagaaaatggtaatattgttaactcagttaactatccaaaatgtgatttgggtgtttgtgacaagactacaagaattacagtttgtcataagaatattccaaatatgattggacagcttacatcagtagttgctgctgaaggaattaacgtatcagatatggttgataagtctaaaggtgattatgcatatgccattatcgattgtgatgatcctgcaacagaacagcttgtatcaaaattacaggcagttgaaggtgttattaaggtaagagttattaaataatacgataatactataaataaaacataattttattttagatggataaacatttatgtaagaatgtatttatctgaaatagtgcaatatttaagatgaaccggtgttataaatatataattttatttcaccggtttttctaatcaagattattatgcaattttacatgcatagaaggaataagactttttgaaagtgtaattagacaaataataaggagcaaaggaatgtttattttagccacggaggttcaacaaaatattgaacaaaatgtagaagaattggataagaaagtaagcagactttcgacagtaatagatgacggaattaacaaagctattgattttggattcgatttgtttcttgcaatagtaatatttattattggaaggattgttctttctcttgtaagaaaattatttaagaagattatgaataaatccaatatcgatgaaggagttgttaaattcttagattcaatgattaaggtatttggttatattgtgattattattacaatatgtggccagattggtattcagacaacctcatttatcactcttttaggtacagcaggagtttccataggtttggcattacagggaagtcttgcaaactttgcaggaggtatacttatacttataactaaaccttttgcgttaggtgattatattattgctgaaggtgttgagggtaatgttacaaaaattgatattatttatacaacattacagtctattgataacaaaagtattaagcttccaaacggtaaattagcagacagtgtattgactaatgttactcatcaggaagagagaagattagatgttgaaataggcatcggttatgacgatgacataaaaaaagcaaagcagattatggcagatgtaatgaagcagtcaggatatggtattaaaccggatgaagagattgtggtagttaaggaacttgcagaaagcagcattgttttagaaatgagaatgtgggtaaaaacagaagactattggaatgctaaattctatttaaatgaaaatgtaaaatacaagtttgacgaaaataatatttctattccgtttaatcagttggatgttaaccttaaaaatgttcagtaaaaggtatttataatgaatgtaattatatgtttagatcaaaataatggaatgctgtttaacaacagaagacaaagcagggatagaattgtaagaaagaatattttagaatatattaacggtgcaaaattatatatggatgaatattcgtttaaacagttttctgaagaaaaggcagacaatattattgtggataataatttggaaaatgccacagaacacgatttttgttttgttgaaagacaggaagttagaatagaagaaataaataagctaattgtctacagatgggacaaaatttaccctgcggataaatattttaatatggacgatattaaatgcaatctggtagaaacattggagtttcagggctattcccatgaaaagataattagggaaatatatcagttaatataatatggagtaagtcatgaagaaaagaataagcgcactttttatagcgttaatattaacaatgagtatgctttcaggttgcgatgatacaggtaacactgatagtgaaaaggttacaacaaccattgaaaacaatgaacagacatcagtaagtaatcagaatatatcagaaactacacagcaagaaagcaaaataagtgaaactacagctaaagcagaaagtaaggtaagtagcaattcatctaaaaaaagtaaaagtacaaataatgcaaaaaacacaaaaagtattaagacaacaaaaatacccgcctataacggaaatgcttatgtggaattaaataacaacgaacctgaatttacttccaaagaaataacagctaaatcttttgaaaaatacggaagcttagacaaacttggaagatgtacagtatgtgttgcaagtgtaggacgtgacattatgcctatagaaaagcgtggtgaaatcggaatgattaagcctacaggatggcacactgttaagtatgattttgtagatggaaagtatttgtataacagatgtcatcttataggatatcagttgacaggtgagaatgccaacgaaaagaatcttataacaggaacaagataccttaacgttataggaatgcttccatttgaagatatggttgcagactatgtaaaagaaacatctaatcatgtcatgtatcgagttacacctgtttttgaaggaaataatcttgttgcaaaaggtgtaaaaatggaaggatattctgtcgaggacaaaggagaaggaataagctttaatgtattctgctacaatgttcaaccgggagtaacaattaattatgccacaggggatagtgacggcaatggaaaaacagagtataattcaaactctaataacagacaaacagcttcatcctcaaataaaagcacaaagaatagtaattcgaataagaacacaaatagcagttcatccacaacaacagagtatattctaaacatgaatactcataagttccatactccatcatgtagaagtgttaagcaaatgagtaattctaataagggtgtatataaaggaaaaagacaggatttaattgatcagggatatgaaccatgtaagatttgtaatccgtaattgtaacgattagtaaattaaatagttataaaaaaatatcaaaaagccttcaccggaatgagttggtgaaggctttttatataataggaaatttaaaaaaattcttttaagctaaatattctttatagatttcaataactttcttcatagcatcaggtcccggagcaccaattgttgtacgcttatcaacgcatgtttctaagcttatagcatcataaatgtcatcttcaaacacaggactgatagctttatattcatctaaagtcatatcatcaagggcgattcctttttcttcacagaaaagaactaactgaccaacgattccgtgagcatctctaaatggtactccgtggtttacaaggtaatcagcagcatcagtagcattagtaaagccgttctttgtacttgcttccataatatctttgttaaatgtcattgtatcaatcatacctgtaaataaaacgatgcatcctttaactgtatcaattgcatcaaaagataactctttgtcttcctgcatatctttgttataagcaagaggaatacctttcattgttgtaaggatagaagcaagagcaccgtaaacacgtcctgtttttcctctgattaactctgcaatatcaggatttttcttctgaggcataatgcttgaacctgtgctgtatgaatcatcaatattaacaaaacggtattcgttagaattccaaatacaaatttcttcacagaatctgcttaagtgcatcataatagtagaaagagcacttaaaaattcaattaaataatctctatctgatacagaatccatactgttaagagttggaccatcaaaaccaagaagatttgcagtatattctctgtctaaaggataagtagttcctgctaaagcacctgaacctagtggacaaagattcattctcttatgaatatcatctaatctgctacggtcacgcttgaacatttcaaaataagcaccaaagtgatgagccaaagtaataggctgtgctttctgtaaatgagtaaagccgggcataaaagtttctgtgttttcctccataaccttcaataaagaattaagaagtgtttttaacaaatcattaatttcttcaacttcatgtcttgtgtaaagtttcatgtcaagagcaacctgatcattacggctacgtcctgtgtgaagtttcttgccggcatcgccaattctttcaataagatgtgcttctacaaaactgtgaatatcctcactgttatcaaactgaagagttccgttgtcaagatcaactctaatgctttcaagccctttaataatatcattcatttcatcagtagtaataattccctgtttgccaagcattttaacatgtgctaaacttccctgaatatcctgcttataaaatttctgatcaaaagaaagggattcgttaaagttgtgaactaactgattttcttccttagtaaatcgaccgccccataatttcatatgtataacctcgcttttaattatttttgttaaagcggttttgtgcataaatataaataaatccgcataaaacctataaaattataccacatactactggtttttgaaacatacttttgatatactgtgcaaggattaatagataagtaaggagaatggcatggaattttattttgcaccacttgaaggtgtaacaggatttacatatagaaacgcatataatgatttgtttgatgacgtggataagtactatgcacctttcatatccccatcgattaacgatagattaaaaggaaaagaaataagagatcttttgccggaaaacaataataaagggattaatttggtgccacaaattctggcaaatcgggcagattactttataaaggcagcaaatcagttaattgaattgggctatgataaagaaattaatttgaatgccggctgtccttcaggcactgttgtgtctaaaaacaaaggggcaggtttcctaaaatatacggaagcaatggacagattttttgatgaaacattcaactggttagagaataagaacagtgaaggtcataatttatcaatatctgtaaaaacaagaataggaatgtatgagccggatgagtttgaaaatatacttgaagtttacaatagatatccaattagccagttgatagtacatccaagaacaagagagcaactatacaaggaaactccaaacatggaagcctttaagtatgctttggaaaacagtaagaatccagtttgttataacggagatataaacacagtggagaattatcacagaattattgagaaaataaatgatgattcagaaatgaaaattggaagcatcatgataggcagagggcttattggaaacccaaaccttgttaatgaaatcaaaggtggaaaaaagttaactaaaaaaatgctagaggcatatcatgacagactatataatgattttgaaaaaataatgaaagcagacaagcatttgctgtttaaaatgaaagaaatgtggacatatatgtcacttaactttgatgattcgcataagtgtgcgaaactaattagaaaagcccaaaacctatataagtataacctggcagtaaatgaaatatttgaaaaatatgagttgaagtaaagtggaataaaaatgttctcttgtactgtaaatcgtccaatatattggagagttgggagtggacacctccgtggaaaagtgtaccaacatgtcataaaataaaaaataagaatgtaggtttctgacattgttatatgccataattcctacattcttattttgtaatttgcagtgacttaaaccattaattataaccagacttcaaactatcagttataaccggactttaaaccaacttccctatttttctgataagatttcaagtatcttattacttctttcaatgaatgctgtcattgattcaggattaagcggagtatgactaattactgcaaggtcatataactgcttacacataatatcagtgttttctccttcagggttagctaaaatgtatttaacaagagcattgttggcatttaatactaatgtctcacctgaaccaccaaacattgcagggtccataccagacataccatacatcttcatcatatcctgcatacgacggctttcttctgaaacagtaatcattgaagaaactttttcgtctttaattttctgaaccttaacatctaactgatcacgatttaaagctttcttaaatgtttctgttaatttttcagtagcatctttaagctcatcttcacttatttcttcagtaaatgaatcatttaagtcagcatcaattcttacaaacttaacattttcatttttctgctcaagctgtgaaatgaaaggctggtctattgcatcttttaatacaacagcatcaattccttcagccttaaacatatttacatactggctctgctgaacaggatcgtttgtgtagaaaatagtattttcatgtttatctttattttcttcaagacattccttaaatgtaagatatttgtcatcaagattcttgaataaaacataatcagacatcttttcgcagaacttagtgtcttttaaacaaccgaatttaatgaatgggctaatatcatcccagtatttttcgtattcttctttatctgttttacacatgccggaaagtttgtcagcaactttcttagtaatgtaatcagaaatctttttgacaaaaccgtcattctggagagcagaacgtgaaacattaagtggtaaatcaggacaatcaataacaccctttaaaagcattaagaattcagggataacttccttaatattatcagcaataaatacctgattgttataaagtttaattgtgccttcaattgattcatattctgtattaatcttagggaagtacaaaataccctttaagttaaatggataatccatatttaaatgaatccagaataaaggctctttgtaatctaagaatactttgtgatagaattctctgtattcttcttcagtacattcattaggatgtttagtccaaagaggagtagtatcactgatacttacaggtctttttaaaatttttacttttttcttttccggttcaacttcaacagtttccttagttccgtcttccttttctttttcttcagttttagctggctcaacaatatgctcaataacagtatctttatctgttaattcttcttccataattgtctgatattcaggttcagcagaagggtcagatacaaaaatttcaacaggcataaaagagcagtacttatcaagaatctctttagctctgaaaagattagcaaactcaacgctatcttcgtttaagtataaagtaatctttgtaccacgatcagccttatctgagtctgacattgtaaagtccataccatcttcacagtcccaaagaactgctttggcatctttcttataagataaagtttcaatagttactctatcagcaaccataaatgctgaataaaaacctaaaccgaaatgaccgataatctggtcttcagaagttttatccttatactgttcaaggaaagcttctgcacccgaaaaagcaatctggttaatgtattcgtctacttcatcagcagtcataccaagaccattatctatgaaagtaagagttttctctttagggtttgcaagaatctgaatcttaaattcttcatcatcagctatttcagcttcacccatcatttcaagtttctttaattttgtaatggcatcacaaccattagatactaattctctgaaaaaaatgtcatggtctgaatacaaccatttcttaataatagggaaaatattttcactgttaattgaaagactaccctttttctttgacataaaaaatcactcctttgttattgttcattttcaattctaaaggatattgtagacacgtaaaaaagaaaagtcaagagaaaattagcactcaatcaaggtgagtgctaaaagtttacagttagttaacaatttctataaaatctctgtatcaaaatgggattcaagaaactttgaaattaatttatcccagtaattatcaagagatttatccattgtaaaaagattaagggaagaactggttataatatgtatctgattgctttcgtatataatatgaaaataaagaccgctaatattctcttcagcaatagaagagccaagttcccttacgatttttgaataattaactttaggaaaagccataaccaacttaagtcgggtaggaactttttttcctctaattatttcaaaacaaatatttcttaagtttttccaggtggcaaaatcttcggtaaagttttcaatttcatccttatcaaaaaaagctttgttaatatggccgtcaaaggagaaggaagaacctgttattatttctccgctacatattaaaaaagaatcaaaagtatcctttacaagaaggttttgcataaaattatttatatcgtttattttaattgaaatcataaactagattatatcaaaacatagtgtttttgtctttactttttttcttcttatagttataataatgtcattgtatactttattacaataaatagttaaattatgtaaacaggcttccgtagctcagttggtagagcagctcactcgtaatgagcaggtcacgtgttcgagtcacgccgggagctttaaattaacgattttagtagaattatgaaagtctgatgtacggaatattccacttaatcagaattttaaggagaagagatggcatataaaccatacaaacccaggaaagaaaaagatatatatgctaggtatgatggaaagaataccaaagccaacaattacgataatggaagcgtgaaactgtttggtttcaggtcaggtgcagtatataagatggttccggctattttatattatgcatttatgattttctatataggaacaggtatttacggtgaacttagttattataaatttgaaccaatggactatgtaataaccgtattgaaatatattttctttatagtatggtttttcagcccggcaatatttttatccaattttaaatacagggattcgttgccgttatttaagaaacatgatgccggttcatcaattattggaataattattataagtcttttctgttcatttatgactatggtttataaggaatgtatgtcagacacttataagaaatcagtaagggcatatgatagttatcttaaggaacaacgagaaaagaaacaacagaatacagagccaaaaagtgtttcatttaatggaataacttatgatgttaataataataaagtatatttaggggaggcataagatgaagaataagaagatttttggaattgttgtaggaattatagttataataattgcagtggtttttattaaagataaaacaggaaaacagactgtcaaagatgaaaataacacaaccacggttgaaacaacagtgatagagactacaacagaaactaatacggaatcagttcagaaagcaacagtagccggtgaaaagggaacagttgcagataatagtaaaaactcagttgttaccaacaagaatggaagcagtagttcaaagactgataaaaaggcaacaactaagaaatcaggtaagaaaacaaataaatcaacaaagaagtcaacaaagaataacaacagtaagaacagcaaaccttcaggcgatacatatggaagttatggacctggagataattatgccgtggatatatttggcaatgagtctgaaacgacaaagaagaactcatctaaaacagaaaaaaccacaacttcaaagaagaataattcaggaaattccaataagaatgacgatggttggtcagatttctattaatatggtaaactaattcatttaaataaaattaaaagcataagggagaacacaaagatgatgaaattagacaaaaaacttaaagtaggtattttaggtgcaacaggtatggttggacagagatttattactttgttagcagaccatccatggtttgaagttacaactttggctgcaagcccacgttcagcaggaaagacttatgaagatgctgtaggtgacagatggaaaatggaagctccaatgcctgaatcagttaaaaagatgattgtacataatgttaacgaagtagaagctgttgcttcaacagttgattttgtatttagtgcagttgatatgactaaggaagaaattaagaagattgaagaagattatgctaagacagaaactcctgtagtttcaaacaatagcgcacatagatggactcctgatgtacctatggttgttccggaaatcaacccggaacattatgaagtgattaagtatcagaaggaaagacttggtacaaagagaggttttgtcgctgttaaacctaactgttcaattcagagttatgctcctgtacttacggcatggaaagaatttgagccaacagaagttgtagcaacaacataccaggctatttcaggtgcaggaaagacatttaaggattggcctgaaatgctaggaaatattattcctttcattggcggtgaagaagaaaagtcagaacaggaaccacttagattatggggcaagattgaagatggtgttattaaaaaagcaacaagtcctgttatcacaacacagtgtatccgagtacctgtattagacggacatacagcagcagtatttgttaagtttgctaagaaaccaactaaggaacagcttattgaagctatgactaagtttagtggagaaccacaggagcttgatcttccaagtgctccaaagcagttcatccagtatcttgaagaagataacagaccacaggttcagttagatgttaactttgaaaaaggtatgggaatttcagttggacgtttaagagaagatacagtatatgactacaagtttgtaggtttatcacataacacattaagaggtgctgcaggcggagctgttctttcagcagaacttcttgttgcaaagggatatattgaagctaaataattatcttaaatgttgatagttgttaagcttatgtttaaaggctgtcatattgacagcctttaattttgattttataaaaagtagaaagagggagaaaatgtacgaaaaattatcaaaaaacgcacttttaaatatgtactttgggacaattacgggaacaatagcggtgcttgctattatatttgtgctggaattattgtttgttattccaaataatattggaatattagttattttgggattgataattgcaataatattggtttttaacgctatcattagtcctgtttttagatttcacagatacagatataagatagatgaggaatcgattgatattatcgagggatatgtttttacacaaagaaatatagttccaattgaaagattacataaactacagattagtcagggacctttcgacaagctttgcaatgtggcaagagttaatgttacaactgcaggtggtgatgtggaaataggatttcttgaaaatgaaaaagcagaaaaaataactgaaagcctaaaacagaaaataaaccagattgcagtagaacagaagaatcaaattgccaaagagcagaaaaaacgaaatgaagaagaacagaaaaagctgaatgaaacacaggagtaatgagtatggaaacaaaaagatttagaaatcatttctccgatgttattgaacagctgggtgggttgttaatatttctgtttattgttggggttcagtcaatcccggacatattaagtgatactgatggagatagcaacgatgtagtagctttgatagataatcctaaatatacaatgattgtgattatcgttgtgattacaattctggcagtactaggtcttattataggttttaaggttagaagatggtataaaacctggataataattggcaacgacacaataacagttgagagaaatacattaagaagtgtaaagaatactgttggaataaagaatatttctaatgttaatattaatcagaatatttttgaaatgattattggaacttgcaatttgaaactggatactaatagcttatccactgcagatagtacagatattaagcttatactaaaaaagcaacagggagaagaacttcgaaattatataaatagacgtgttgaagaaattaacacaggaacaattcttgaaaaagaggaagaagttaatccttacgtgaaatatgacattgaagtaacatcaaaagacatcattacaaatggtttttattctctaagtgttggaacaatacttttatttttaggttctttagccggttttatagcaggaattgtttcggacgtgaatgatggaaaaacaattattgcttcattaggtggtgcaattactttaatcattttgattataggttctctttattctatggcaaaaagttttcttaaaatgtatgattttaaggcaagacgtggaaagaacaagctttatataaaatatggtctttacaataaagtagattttgccattcccatagacaagattaatgccattgtagttcatcagacatttattgcaagaatttttagaaaatattcagctgaaatagtaaatgtaggcttaaatgatgatgataaggccagtgcctattttacattttattgtagcaggaaacagttaaaatcatatattgataagttattgccggaatttagcgaaggaattgatggggatataaagaaacaacctgataaagccaaaataaaatatattgtggatttcttaattaattctgttattgttttgattgttgcagcaagcataatttattatgtaaatccttcaaaagtgtttgaaatggcaattgttgcaggttcaacatttatacttttttatatgtttatagcaaaaattttaagtttcattacctgtggtgttttcattggtgacgaattggttggagtaagggaaggttctatgggaaccagatattcattaattaaatattgtaatatacagtacataacaattaatcaaaacatattggaagaaaaattaagaattgctaaaggtggtctgcatatccttgcatcaatgttgcacgatgactacttaataccttatatggatgagaatgaaatcagttctatttataataatataatcaaagaataatttgaaaatatctttttgcgtatgaaaagacatatgccaaaaagatatttttctttaataagaaaattattttaaatttaatgcaacagtttgagaaatatattacactatataaatgtaaacgcaaaaagttaaaagtaggaagagggtacccggtatgaattttaacaggaaagatgttttggcggcaaccaaaggcaatatgcaggcttttgaacaaatatacatagatataaacaatgatttatacaaaatggctttgtacatattaggaaatagtgagcttgcaaaagacatagtaagtgaaacaattattgatgcattaaaaggtattaaaaagttaaagtcagcagatgcatttgaaagttggattttaaaaatcctaactaataagtgcaagcagaaacttaattataaatacaataaatttaatgtttttaatcctaacataaaagacgaaagtcatatggaaaaagttgaaagcaacagtaacattggcaatgccgaaaaagcagatgtgaagatagcgttatcaaaactaaatacggaagatagaatgattgtttctttatgcgtagtggaaggctataaaagcaatgaggtagcagaaattctatcaatgaatccttcaactgtaaggtcaaggcttaacagaagtcttaagaagatgaaagagtatttggaggtagagtaatgaataaatcgagcaaaaaggttgagaatgaagaaatgaaaaataaactaaacgatgaaattgatgtggaaaacatggaaatagcaaatcttataaaaaaggacagcgaagatattccaaagatttctacagatattaatgtgattaatcagattagaaccacaggcagaaaaaacaaaaataagatgataatcagactttgcacagggtttgcagcctgtcttgtactggttgttggaacagttttctggtatagaacaaacactgaaaacaaagcaagagaactggcttcaagaacagtccatgtagcaaaaaacaatgaatcaagaatggcatcttcttatgatgaaatatacaaaacaatgtcagaaaaagctacagattatagcgatacatatagaactaaggcaacagcaaaaagtagtagttctgacagcaccatgtccagtgatggcgtaaagaaaaaatcagattcaaaagcatattcaacaacaaatatccagacagaaggtgtggatgaaggtgatgttgtaaaaactgatggtgaatatatttatattgtaaatgacaaaaagccggtagtaaatattgtgaaggcacagggcaaagagactaaaaaaatagcaaaaataaagattaaatataacaaagaagatgtaaatgtaaaagagatatattatgcagataataaattaatagtaatttcaggtgtatatgaagatgatgttctgtatggcatagaagattcggttacgtctaaaggttgtggagtaaacaacggaaaatccataacaataatatctgtttatgatataacagacagaagtaatcctaaattaataaaacagaacactcagcagggagcttttgattcatcaaaattaagtggcaattatgtttatacaatatctgaagcaaatgtaaacataactgacaaaaaagactcctgtgtacctgaaattaatgaaaagccaatggattattcaaaaatctatttgccaaacaaaatagatgactgcagttatactgttataacagttatggatattaataaccccgataaattctatgaccagacagcaattgcaggaaatgttcaaaacgtatatgtcagtgaaaacaacatatatttaattgatgatgaatatgaggaaatagatatttccgacacaaaaaaaggcaagaatatgctaaaaaagataaatattggaaaattgcaggaatccaaaaaaaatctgtcagccaaggaaataaaaaaggtcaaaaaggcatatggtggagaatatgactggtcaaaggttacagaaacaagaaaaataggatattttaaaagtcagataaaaacaaatattgtaaagtattcatataaagacggaaaattaaactttgtaaacgaaaacagtgtagaaggatacgtagatagcaatctgtcttttgatgaaaaagccggatgcttaagatttgtttcaagtaatagtacctcatcatatgcgggagaaagaacagttcttaaagatggaaaaggtaaaataattaccgaaaatagtgtgaacactaacgattatgaaaaatattatgaggaagaagttttagataataatgtatatgtacttgatgaaaatcttaaagaggtggcaagtattaaaggacttgcaaagaatgaaagtgtttatgcagtaagatacttgggcaactatggatattttgtaacatacgaaaatactgatccattatttacagtagacttttcagatatgaaaaatcctaaaatcgtaggaaagttgaaacttccgggctactcagattatcttcatttctatgatgaaaattcaatgttaggacttggaatggaaaatgataaatatctgaaacttgaaatgtacaatgtatctaatggaaaggcaaaacagatttctaagaaggtgttgaaaagatatatggattcagatgccttatatgattataaatcaattatagtagataaagaaaagaacttaatcggatttaatgcaacactttcaaatggtaactacgatgatgtttatgttttatacaggtttgaaaataataaatttaaaaagcttgcagaagtttcattatcaggggagtcttgtgctgtgagaggactttatatagataactatttctacatcgtcactctgggaaaagacgtaaaagtactggatttaaacaattataaagtggtaaaaaaattaaaataagcatcttatcacaatctaaacaatatcaaagacgaaaaaagtgaaatttaagtagtttttgatattgttttttttgccttgaattagtagaataaaaaaagtatgcaaaaatgatacacataaggatatgataataattgtgcaattaaatattggcacataaaaattgaatttaatgagaagcgtaaaaaaaaatagaaggatatgggtataaataatggaaaataacagagattacacacgaagaagtagaagaaggagagaacttacaccaagagaaaaactcttgattatactaaaaagaaatatttatcccatagcattagttgtaattattattttttcgattgttgtaatattacctgctgaaaagtcaagagaggcgaaaaaagaagtaacagcatctattactgaaaataaaaataacacagcacagaaggaaactgaaactacaacaaacaagaatacaaaagtatataaaacaattaagcctaaaacaagaacaacagaaaaaatcgttgcagagcttaaagaacgatcaaaacacgatgaaaaatataaaaagatttatgacagaatagatgaatatccaaagggaatgcttaatgcagttttgaacaatcctgaaatgcaggattttcttattggatatcctgacaatcagtacactttaaaatatttaaaaacacagtcagacgaagcagaagaaacaactttaacagagacagaaacagtgcaggaaacaacacaggattctaatgaggaaatagatttaagtgatattaaacttacagaaaaagaaagaaaaagtgcacatcctttatttattcagtgggatgaaagatgggcttatatcccttatggtgatgaaaatatcggtatggcaggctgcggtcccacatgtatgtcaatggttattgtaggacttacgcataattcagaagctacaccggcagaagtggccagatacagtgaagagaatggatattatgttaatggacagggaacatcatggcttttaatgtcgcaggtggctaagagctacggaataactgttaatcagatggctgtttcacagattgagatggaaaatgcacttgataacggaaatatgctgatttgctctgttggtgcaggagattttacaacacagggacactttattgtaatatacggttacacagatgaaggatttcttgttaatgatccatattgtaaagtaagaagtacaaaaaaatggagttttgacagaataaaaaatcaaataaaaacaatttggagatatagttattagtaaaaagcagaaataattacttaaaaataaaaaactttcgattaaactatggactattttgtcattttatgagaaaatacaatgcgagtgtgggcgataatgaaaactcacagatagagcagtaataatttattatgttatctatactgcattaacatggattttaatccatagtttatatttcgaaaggagtatttattcagatgatttattcaaaagaagttgaaatgatgtgtcctgtagctaagggcgcaaagcatgaacctgctccaattccagaagaaggaaaatgggttcactcaaaagaaatcaaagatatttcaggttttacacatggtgttggctggtgtgctccacagcagggtgcttgtaagcttacattaaatgttaaagaaggtatcattgaagaagcattaatcgaaacaatcggatgttcaggtatgacacattcagcagctatggcagctgaaattcttcagggaaagacaattcttgaagctttaaatactgacttagtttgtgatgctatcaatacagctatgagagaattattcttacagattgtatatggtagaactcagagtgctttctcagatgacggtcttgtagttggtgccggacttgaagatttaggaaaaggacttcgttcacaggttggtacaatgtacgctacaaaggctaaaggtgttagatatcttgaaatggcagaaggctatgtaacaggtatcgctcttgatgctgataatgaagttattggttaccagtttgttagcttaggaaagatgacagactttatcaaaaatggtgatgatcctacaacagcttgggaaaaagcaaaaggccagtatggtcgtgttgatgacgctgttaagattatcgatccaagaaaggaataggaggtaacaacaatggcattatttgaatcatatgaaagaagaattgaccagattaattctgttttaaatagttatggtattgcttctatcgaagaagctgaaaagattacaaaggacgctggattagatgtttacgaacaggttaaaaagattcagccaatttgttttgaaaatgcatgctgggcttacacagtaggtgcagctatcgctattaagaaaggttgtagaagagctgctgatgctgctgcagcaatcggtgaaggtcttcaggctttctgtattcctggttctgttgctgaccacagaaaagtaggtcttggacatggtaacttaggaaagatgttacttgaagaagaaacagaatgtttcgcattccttgcaggacacgaatcattcgcagctgctgaaggtgctatcggtatcgcagaaaaggctaacaaggttcgtaagaaacctttaagagttatcttaaatggtcttggaaaagatgcagctcagattatttcaagaattaatggtttcacatatgttgaaacaaaatatgattataaagaagctaagttaaacatcgtttacgaaaaagcttattcagatggacttcgtgcaactgtaaaatgttacggtgctgacgatgttcaggaaggtgttgcaatcatgcatcacgaaaatgttggtgtatctattacaggtaactcaacaaacccaactagattccagcatcctgttgcaggtacatacaagaaagaatgtatcgaacagggtaagaagtacttctcagtagcatcaggtggtggtacaggacgtacacttcatccagacaacatggctgcaggtccagcttcatatggtatgacagatacattaggacgtatgcattcagatgctcagttcgcaggttcttcatcagttccagctcacgttgaaatgatgggtcttatcggaatgggtaacaacccaatggttggtgctacagtagcagttgccgtttctgttgaagaagcagctaacgctggcaagttttaattaaaacaaaataaaaaacacttgaaagtgtcgtaatcaaagggattgcggcactttttttgaattttggtttattatgtctttgcttttcaatttcattttttacattaatttcaacaaatggcattgtgtttcccttcttatatattttttataattgcatattacaacatatataatgtatagctaaaccaaaaaggtcatacaatttagttaaaaatatgaagagactggaataaatatatgctataacatttatattaaagcggagatgtaggaaataaaaatgaaaataaggaagagtacatatatcttgcaaatcttaataactttgaaaacaataaacagaacggttcagttttgactttagaatttacaacttctaaggatgcagaatttaaaccatacattgtatcacttaagattgaacaggcaattaatgttaatggcgaagacatagctttaaaggctaatgatggtacagtttccgttgttaagtgtattcatgtaagcgatacaaaatggagcagtgatgcagaaaatcattggcataattgtaaaaatgctgattgtggtgagaagattttaaaaactgttgaaaagcacaaagttgtagttattccggcagtaagcagtacttgtacaaaagacggacttaccgcaggcaagaaatgttctgtatgtggttatataattgaaaaacagcaggtagtaaaggcaaaaggacatacacctgttaaacttaaagcagtaaaagctacagttaacagaacaggattaacagctggaagtaagtgtaagatatgtggagaaatccttcaggcacagaagataattccaaagattaagcagacatatacaattacaatgaagaaatctgccagaactacacagaaaatcaaaatgtatcagaaaaagaataaagcatctaaggttttaaagaaaataaaagccggagaaaagattacaattcttgatataaagaaagattggtattgtattaagtacaaaggcaagataggttatattaaagcaacaggaacagtttggaaggctaaggtaactgtagatgatggtaagcttatacttcgttcaggaccaagcaagaaatattcaataatttcttcatatggtaatggaacaagagtatacatttatggtaggacaaaaaatggctggtataaggtccgcgtaaagaacaaaaagaatggtaagcagggctatatgtacacagagtttgtaaaataaagtttataaaataaattaaatttataaaagagtaaagaattggtatagtaaaaacagaaacaacctatgctttgctcttttttagtaaattaagcaatcgaaaaacatcagaaattgtcgtaatattttgtcaaaagccaccaatattacattgtttttttactataataggttataatcactaacatatgagggaaattgaaaggtacattatatgtgtattggaggtagaaaatattgaacaatgaatatccccagctaactgtcagacagttgtgttcggttattaagatgtttgacagttcggcagatgattatttgtacttgtatgacctggacaatgactatttttatatgtcagtacacgctacagagaaattcccgttagaacgaaatgaatttaataatgttatagaggaacatagaaagatttgctatcctgaagatttttatatgcttgagcaggagttaaaagggattatcagtggaaaaaataacggacataatcttcagtatcgttggattgataaagagctgaatcccgtgtggattaactgccgtggagtggtttgtaagctgaaagattcttcaagggttctaatagggtgtgctaaccagattggtgctaagcagaaagctgacaatgttagtggattgttaggtcagacaagcttagagaagtacatacaaatatcatctaaaatttttaagagcggtttcgtattacgccttggacttgatgattttagagagattaatgagagatatggtatagaatacggggataaggttttgaaagatacagcggaatgtatatcaggttgcttaaaaggtgaacagcagctttacagagttgtgtctgatgaatttattattgtagattatcttgcaacaggaattgatgaagcaaagagtgtatatcatagtataagacatgccattgatagatatgtagaaagtattcagtatgaagttatgtttaccgtttcaggtggcatacttgatttgtcaactcttgaagaaaagacatataagaacataatgcgttattctgaatatgcacttaataagtctaagaagaacggtaagaaccaatattatgtttttaactatgagaactataatcagtttctcatgattaagcaacttacacaaagtttaagaaagagtgttgctgacaattttaaaggttatgaattatactatcagccattggtagatgttgttacaggtaatgtttgtggagcagaagcacttctaagatataagagtgaagatggcaatatacttccacctaacatttttattccaatccttgaagagacaggcttggttgttcctgtaggtaagtggattattaatgaggcaataaagaaatgtaaagagatacaggctgtaatacctgagtttcatgtaaatattaacgtatcatatattcaggttataaagagcaatcttgtaaaagatgttacgacagctattgaaaaatataatattaatccgtcaagcattataatagagatgactgaaagcggacttcttgatagtaataagcgatatatgaaaatatggtcagctttaaaggaaagaggagtaggtcttgcacttgatgattttggaacaggatattctaattttaactatatgtctcagttagagcctgacttaatcaagattgatagaaattttacagcaaaagctcttaataatgagtacgattataatatgcttacattaatacacaagatggtatttaatttaggcttaaagatttgtatagaaggtgttgaaacaaagggagaaatggaaaaaattaagagtatgtgtcctaatttcttccagggttatttttttggcagaccttgtccttacgaagactttgtaagtcagttcgtaaagaataaaaaataagatgttaaataaaatattatttgtacagaacaattatatcattttccagaattgttgtacttccatcaggaattagattttcagaaccgcgttttacaagagcaattaaaacgttggttgggagatttaattcctgaatttttttgttacaccatttatgtttcttaaaaatttgtatttctttaagattttccctgccggaaggttcgtaagatggaacacttagaataacagtgtcattggcaagactaacttaacatatttaagaatgaaaataaaattattagccgattaattaattttaaaaagttttgtgtaaagatttggtaaataaaatccaatatcctgacaataccctgacgaattaatatattcttgaaacagttagaatattaaagtaaaatatgattacagtgttccaaagtcctaaccaacttgtgcctgcacaaaggtggggaaaagactttgtaatcataaattgggaaatacagacaaaaaatcaaattaaaaaacttagatataaatagaacagaggatatatataaatatgaaaaaaatcactttaggaattttagcacacgttgatagtggtaaaactactttatcggaagcttttttatatgcaacaggaaaaataagaaagttaggccgtgtggaccataaagatgcttttttagacaactttgatttagaaaaacaaagaggaataactattttttctaaacaggctgaacttgaatatgcagacacaaaaatcacattattagatacaccgggacatgtggacttttctgccgaaatggaaagaactttacaggttttggattacgcggttttggttgtaagcggaagtgaaggtgttcaggggcatactgaaactttatggaaattattaaataagtataatattccaacatttatttttgtaaataagatagatatgccgggaactaacaaggagtttgccttaaccaatataaggaacaaatttggggatggtgtaattgatctttcagtggaagaaaaagatatggaagccattgcagtttgtgacgaggatgtacttgaaatatatatggaatcaggcaaaatttcagatgaaactattgctgacttagtttatgaaagaaagcttttcccatgttattttggttcagcattaaagaatgaaggtattgataagttacttgatggaattaacagatattcttttgaacctgtttatcatgaagaattcggggcaaaggtttttaagatagttaaagaaaacggcgtaagattaacttatatgaaaataacgggtggcttcataaaagttaaggatatacttagtggaattacagatggaaatcagtggtctgaaaagattaatgacataagagtttattcaggagaaaagtttaagagtattagtgaggcagatgccggatgtgtctgtgcaatttcaggtcttaataatacatatccgggacagggacttggctttgaaatgcagtctgagagtcccaatcttcagcctgtactttcataccagattattatacctgaaaatgtaaatattaatcaggcttataaaatgttaaaagagttagaagaagaggatcctactttaaatttaaaatggaatgaagaaactaaagaaataatagccaacgttatggggcctattcagattcaggtgttaaaacatattataaaagaacgtttcgatatggatgttgagtttggaacaggctctattttgtacaaagaaactataaataacatagtggaaggtgtaggacattttgagccgcttaaacattatgcggaagttcatttattaatggaaccgggacagcttggaagtggaattacatttgaatctaatttaaatgaaagtcttttaagtcgtaactggcagaaacttattatgacacatttggcagagaaggaacataaaggtgttttaacaggttcgcctataacagacattcattttactcttgtagcaggaaaggctcatcttaagcatacggaaggtggagattttagagaggcaacatatagagctataaggcagggattaaaaaaggcagaatctgtattgcttgaaccctattataattttactttgaaaattccttcagaaaatataggcagggcaatgacagacattgatcaaatgagtggcaatattaatcagcctgaaacagaaggagaaatgagtgtaataacaggctttgcacctgctgcaacaattggggattacattaatactgttaatgaatatactcatggaaccgggacattgtctcttgattacaaaggatatggtccgtgccacaacagtgaggaaataatagctgaaaaagcctatgacagtgaggcagatattgcaaatcctacaggttcggttttttgtttgcatggtgcaggatttgttgttccgtggaatcaggttgaacaatatatgcatgtgaaaacagattctaaaaatggtgaaatgtatgatattgaaaatgtacctgtaataagaagcgcaagcaatacatacagagattcctatgcaacagataaggaattagaagaaatctttgaaaaaacattcggaccaataaaaagaaagaagtataatgagaaaaaagtaagacagtatagtgaaaataaacaaaaagccacacataaaaaagttttacctcagtgtcttttagtagatggttataatattgtttttgcctgggatgaattaaaggaaattgcaaaaacaaacattgatggagcaagagacagacttttagatataatgtgtaattatcaggggtataaaggtaatacagttattgttgtttttgatgcttataatgtaaaaaaacatgcagaaactgtttcgaaatatcataatatctatgtagtatatactaaagaggctgaaacagcagatatgtatatagcaaaaacaactcacaaacttgccaataagtttcaggttacagttgcaacgtcagatgctttagaacagctcataataatgggacatggggcacttagaatgtcggcgtttaactttaaggaagaagtggacaatgtaaataaagcaatttcagaacaaataaataaaaccagtcgattggaaaattatgttttaaaataactaaaaataagaggctttatcactaattatgataacaaaatgattgttatatcagtagtgctaaagcctcttattttaaagattgtatttacgtaacatataactgatttgtagcacatatgcaagcatttgtggaccagccattagctggccataccatggttttccatagtcttttggactgtttataaatttaattagtttgttgtaatcaatatatttctgtaatttattattagatttatattcttcaataaccatagttccgagaagtttttcgtaagtcggatcataggttttaggatatgggcttttttttcggtaaagaatttcaggtggaagatattttttcccacattcaacaagaagactttttacctgattattataacatttgtattcccatggaacattaaaaacatattccagtatgcggtaatctgcgaaaggaactcttgcttcaagtcctgaatacatactgcatctgtccatcctatttaaaagagtcatcataaaccaacggatgtttaaccaggaaatctttctacggttgtattcagttatggtttcgccgtctgtatgagggcattggttaattgaagtctcataagcgtcatctacatattcttttaatggcagtgaattaatgaaatcatctttaaacaaaacaattctagggcttaaatcgtaagaccatggaaatgtgttttgcatatacatttctctcctgtgaaaccacggatagccaccgaatatttcatcggcacattctccggttaaagttacacggcattctttagaaacaagattacagaaataaagcatggatgattcaacatcagccatatttggaatatctcttgcatcaactgctttaaaaagacaatcaatttgattagaattattgcattctaaatatttatgtttactatttatttggttaaccataatatccacgaaaggtttatcccttgaaatttgaaaagcattagacttaaaattaatatcattgtctacaaagtcaaaagagtaagtatttaaattcttatcaggcaggttatcctgcacaatggcagaaacaagactagaatctaatccacctgataaaaaagtacaaataggaatatctgaaaccatttgcttttgtatgctgtcagttataagatagctgcatttatctacagtagtgttatagtcgtcaatatgtggttttgctttaagtttccaataacataaatctttaactttaacattatgatggtagtcagttgttacagttagataatgtcccggcagaacttccttaatatctttaaaaactccgtttccaagagtatgagcaggacctaacccgattatttcacaccaactatcggaatttattataggtttaataccataagcgaaaattcctttaggctcagatgaaaaaacaaattccctattattatggtagtagaacaatggttttactccaatgtgatctctaacaacaatcgctgtgtcattgtcatagattacaaaggagaaaataccatttaattccttgaaaatatctgttccaaaaactaaatagcagtataggattatttctgtgtcaccggttgtttcaaaactaatattaaaagaagataacattttacgcaaataatcagtattgtatatttcgccattataaacaattgtagctttgtgatttttgtaagcccgtgtcattggctgatgcccgcctttaatgtcacggattgaaagccttgaatgggcaaaacctacaaaaccaccaataatattatttggaaactctgttttatcggagaacccattgttgttaagaaaacctgaaagataaatatcgtcatcatcaggccccctgtgttttatggcatttttcattttttctagtttgtttttgagaaaatagtaagtctgttcgtttgaaatgttatatttagtctgaaaaaaacctgcaattccgcacataaaaaactccattctacaatttaattagggtaaataatatttgtaagaatacttataaaaaatcacaaaattgttacgtgtggacttttaattaccggttgaatctgcctgcccccaagggccttttcaattgtatcttcaattaagtccacatgagcaatcattgaattaggtttggataaataattatcctgaccgaaaggaacaaaaaatatatttttggtattaagtagaataccgatatttttcaaattcatacctaatgcatcattggtacttaaaaaaataaccaaaggtcggttgtttcttaaatgagccttggcagccataagcacaggagtgtcagaaatgccattggcaagtttagacagggtatttcctgtacacggtgcaataataagaaggtctagcatagattttggacctataggttctgcatcgggaattgtggttataggcggttttccacttatttcttcagcaagtttcagaaaatctttacatttaccaaaacggctgtcagtagaagaagcgttgtctgaaaaaatagtaaacagattagcctgtgtatcggcaagccgtcttaattcttcaaaaacttttttgtaggtacagtatgaacctgtaatgcctacgccaatgtttttatccttaaagttgtgtgccattttccccagtcctttctaaataagaaataatactttttgcaattaattccccggcacttttaggagcagttttcccgggaagtccggggcatgtaacaagggataatctatattttttaacaagttcattgtttattccataaggttttgacgcaacttcaaaaagaacacagtctttttttactaagcttaaaagattctcagtcaaaacttcacaaggaacagtgttaattattatgtcaaagtcactaatacattcaatcagattatcaaaagtggaagtatttaatccgtaagaagaggcctggcataaatgaattggagtgtggtcataaatagttacacacacgtttaacgcctttaatttaagtgcagtgtttatgccacacctgccaaaacctataatcaaagctttagctgtatcaagtgcaaaaggggtattatttattatattgctaattaatccttcagccgttagcattgcgttggaccagacaactttttcatctttaagaaaatcaaaatagttaatatttttctttttaagagaagttgttacatcgtttgaaatatttccggcaaaaactgtttgccccggctttaataaagtaataaaagtgcttattggaaagctggaatataaatcacagtttaaatacaaactatctttggaaaaaggagtgccacataaaatgtaagcatcttcattaaaatcaaaattgttttttatataggaacaaaatccattattatttaagtaggaatttgcatatatctgtcttttgtcaccggataatacagctatatttttcataatcgcctcctcttacaataaaatatgcattgcagaagaaattgtgacttacttctttttattttttaagagaaatgatatacttgtagatgttattatttttgcaaaagataaggcagaaaatcagaagaaattttgcaaaagaaaaatggaggaaaatatggaaaaaaataaaatcaaaaaaatagcgttaatttttaatattttacaggtaattgcacttgcagtatttgagatagtgcttttcagacttgtatcatacaaaaataaactaatattagattatgtacctgctaaatattttataatcttagaagttgttcttgtggcaataactattattccttttctaataagaaagggaaagaaaacatcaattatttctatggttatatctatattaatggcaatagtgttatttgcaacttcaattttgggagtggtttatgataaggatattaaaaatgttttaaacaaggcagatcagaccatagatgatgtggtagaaaactctaaactttcaactgaagaatatggtgtatatattctaaagagtgataaggcagaagaactaaaggatattgaaaattataatttaggatacaacctatcttatgcaaaagacgaaacagattcagtattaaaagacgttctcgcaaaagctaacaataagcttattgccaatgaatatgacgatttacttaaaatggcagatgaacttttgaatactgaaaaaactgcatttatttttaatcaggcaatgttagatcttattgaaaatgcaggcgatgatacaaatgatggtaagaataatggaatttataaaaactttaccaacaagattaaatgtatttatgtagtaaatgtaaaaactgccgtaaaggaatatggtggagataagaatgttacaaaagaatgctttaatgtgtatattagcggtatagacacagaaggggatgtaacagtaaagagtagaagtgatgttaatattataatgtcaattaatcctgttacacatcaggtattgttactttcgacacctagagattactatgtgccattatccatttctaatggagtaaaggacaaacttactcatgcaggaaattatggaataaatgtctcaatggatgctcttgaaatgctttatgatattaagctggattattttattcgattaaactttacaggctttgtagatattattgatgctcttggaggcattgatgttgtgtcagattattctttctcaacacatggatatagctatagtgaaggattaaacagtaatttaagtggtattcaggcattgtggtttgcaagagaaagacatgcgtttgcagagggcgataatcaaagaggacgtgatcagatgaaagttattgaggcagttattaagaaagcccagtcatcagcgttacttaacaattatgatgagatttttgcaaatataagcaagagtttccaaactaatatgcctaaaaaagacattaaggctcttgtaaaatatcagcttaatgaaacacctaattggaaagttgtttctacaagtgttacaggaacaggaagatcagatgtaacatattcagttccaaattcaagagcatatgtaatggatcctgatgaaaattctgtaaatgaagcaaagaagttattacagaagattcagaataacaaaaaaataaaagttaaaacaacaactgaataataaaagttgttgttgaaatcaaatattatcccccctttttataatatttgatttataaaggtactatggatttaatcttaagatttatgttttgttagaaacatagcgcaggaggaaaaatatgaataaggattacattgaaaactttgacgattttagtgataaagaagaaatcaaattgatttcaactaaagctaacacacttaaagttttggaagaaagaattactaaggctaaagttgagcctatgctaattattattgcccgggattatcgtatgaataaaagcgagatggcaaacgaaatcagtaagactttcaaaggcgaaaagatagttatcagaagttcatcaaccaatgaagactgtctgaaaaaatctaatgcaggccattatacaagtgtattggatgtggattcatctgatacttcaaatataataagcgctattgatattgtgttggaatcttatttctctgatatggatgatatatcagaacagcaggttttaatacagcaccaggcagttgacgtggcatattgtggtgttttgtttacctatgatattcagggacaaagaccatattatcttattaattatgatgacaccggttccacagatttagtaacaagtggtaggggtggaaagacattatggattgccagaaatattgaactttcacagcttgaagagcagtggagaaatcttattgttgcaatagatgaaattgagaatatttttaagattccccttgatattgagtttgcggtaaataagaataatgaagttatcatttttcaggcaagacctttggttgccaatttctcaaatattaagaatgttcagggaacaattaagaatttttatggaaaaatagaagatttaaaatgtgaatataaagatataaaaagcgtaattgatggtaaaaatatgatgttttccgatatggctttttggaatccttctgagattataggtacaagtccccgtactttggactattcattgtacagatatattattacttcagaagcttggaaccaggggcttgttccgatgggatacagacagcttaatgatgagttaatgtatcagataggaattaagccatacattagtcttgactattctttttattcattaacaccttcaaagatagacgaaaaacttgccacaaaacttgtggaattctataagaagaagctgaaaaaggatacaacggcacatgataaaattgagtttgaaattgtttattcaaactttgattttaacactgaaaacagaacaaaagaattactggataacggtttttcaaaagaagaaagacagcagattttagagtcattaaaagaacttacggtaacaaacattaagaatcataaacagatttcagaaagtgataatgaagacattaaacacttagaaaaaacccgtaaacacattgttgaaaacgatatggaatcagaggatgttaacaagatagttgaagatattctggaacttttggaagatattagaatttatggaacacctcagtttacaagacaggcaagaatggcatttattgcaagagctttttgcagttcattagttgattcaggttggtttacaaagaatgaaatagatcagtttatgaaatctattgcaactgtatcttctaagtttgaacaggattatcagaagttctcagttggtaaaatgagccgaaatgaatttaacaataaatacggacatttaagaagcggcacttatgatattagaacagatagttataaccagatggttttcagaccggcagtaggtcataataaagttcaaaaagttaaagaagaatttgaaggacttaacagtgaaaaacttgaagaagctttaaaatcaataggtttagatgttacacctaaagattttaatctgtttttaagaacttcaattgaaggcagagaattctttaagtttgaatttactaagtcactaagtttagtacttgatttaatacagatgttaggtaaactccttgacattgacagaaaagatttatcatggatttcagcttatgattttaaagaatgtttttacttgaacaatgaacaaatgggtaaaaagttaaatgatattattgttaataataaaaaacattatgataaatatttaaatgccattttgcctgatgttattcttgatattacaagtgtttctgttattcctgttaatgaggcacgtcctaactttattacctctaaaaaggttgaaggtgaagttgttaatcttgaacttgaaacagatgaagaccttatggacaagattgttatgattcctaaagctgatccgggatatgaatggatttttacaaagggaattaaaggctttattacaaagtatggcggtgtggcatcacacatggcaatacgttgcgctgagtttgaaattcccgcagcaattggatgtggtgagaagatttacgattatgcgtcaaaaatcaactatatggaacttgattgtgccaacggtataattaaagaaggtttacaatgtgaggatttaagagcacttattacccagcgtgaaggtgtaaatcagtatggagatcctacagatgtattggaagcagcatatataaggttctatgagttacttggttttattccacagcctgcttctaaccacgttaaaaacgtcggcaagctatttgaacgtcagtgtgatttattaattgtagccggtggaggtgctcttcctgtgaaatattatgacagacctcataatgaagaactacagccatacagagatgtaatggaagaaaaacttataaaacattgtattggagaaggtattcctattattgcaacctgtaggggaatgcagtatatgaatgttttgtttggaggaaaattattgtatcatcctgaattaaaggttgagagaccacgttcagtagaccatgaggtttatcttgttgaagaagacagaacaatatgggttaataatttccataaagatgttattccgatagatgggctggcatcttgttttaaaccacttgcaattgacagggaaaatcagacaattgaagctttcggttctgatgagatgaaagttttggcattgcagtggcatcctgaaagaaaatttgaaacagcaaatgctttggaagaaacaagaaaattagttgttaattttattcagaaacacattaaatagtattttattcagattatattttgatatttttaaagctccatttgaaaaagtggggcttttgtaatatatttacataaaagcgattagaaatgacagattggagaatttatggaagaaaaattaaaatactggagtaaaagatataaattaaaagatttagtaatatgtggatatcagggaggatatcctatgatacagtttaaaagagaagaggatatgagtgttccacatatgtcaaaatatgagattaataaagttttgcgaagcgctgaaatgaaaggtggagtaagacttggtgtagcatttaaccttagaagaactgcttttttacttgttaatgaggatactattgtaatatgtggtcatgaatatgttttagatgttattcttgaaaaattatttggatagggaattgacaaaaaggttaaaaaaatattgcataagacatatgaatgtaacatatttgtaatattctcttgacattctgtaacagttggtgtatatttatactcgcaagccacaaaagtggaaagaaaaggagtatagatatgagaaaaataagactcattgctgaggctgtttgtctaatcacatcaatgacaattacacctgttgtaacgtcagttgagcagaatgacagcatagtagtggaaactgtagcagaagctagtcagacaccggtacttaaatcagcaaatgtgataccaattttacaatcagaagatactactaattctcttaaacttaaaggtcttgataatgatcaggttaatacagagattgtaaaagaaacaattggaggttcagcatttattttgaaagcatctgaagatgatgcaaatgaaacttcagaagaaacaaacaaacttgagaatgaaaacaaatccaataataaggatgcaaacaataaaaagtctaagaaagacggaaagaaatctaaaaagaagaaggctaagaagaaatcttcttcaaaatctaaatcaaaatataaaagtcttggaacttttaaaataacaggttattgctcatgtgcagcatgctgtgggaagacaacaggtattacggcatcaggaacaagagcaacagcaggcagaacaattgctgctgacacttcaagatttccttttggaacaaagttgaagttcaatggaaacacttacacagttgaagacagaggtggagcaattagaggaaacagaattgacctttattttagttcacaaagtgaagctcttgcctggggtgtaagatatatggaagttttagtagaaaaataaattagtagttaaaagataaacttttataagatgtaatattcgtataaagttaaaattaaagagaattaaaagttaataaaagaggttttactttaaagtgagtttggctttgggtaaagcttctttttgcattacattattatttcaggcaaacatattgaaaaaacagcatatttattgtataattcaataattgtgaaaaaatataattaacccggaggctaaaatggaattagaaaacgaaaagattgaatcaaaaaattttatagaattaataattgataaagatttagaggaaggaagatttgaccatgtgcagaccagatttccaccagagcctaacggttatcttcatataggacatgctaaatcaattcttttaaactatggtttagcaaagaagtacaatggaaagtttaatatgagatttgatgatactaatcctactaaagagaaggaagagttcgtggaatcaattttaaaagatattaagtggcttggtgctgattgggaagacagattattctttgcttcaaattattttgagcagatgtatgaagcagctattaagttaattaagaaaggcaaggcatatgtttgtgacctttctcctgaagaaatcagagaataccgtggtacattaactgagccgggtaaggatagtccatacagaaacagatctgtagaagagaacttagagttatttgataacatgaaaaagggtgtttataaagacggtgaaaaagtattaagagctaagattgatatgacatcacctaacattaacatgagagatccaattatctatagagttgctcatatgacacatcataaaacaggagataaatggtgcatctatccaatgtacgattttgctcatccaatagaagatgctattgagggggtaacacattctatttgtacattagagtttgaagatcatagacctttgtatgactgggtagttagagaattggaatatcctaatccacctagacagattgagtttgctaagctatatgtaacaaatgttgttacaggtaaaagatatattaagaaattagttgaagacggaatagttgacggatgggatgacccaagacttgtttctattgcagcattgagaagacgtggatttactcctgagtcaattaagatgtttgttgacttatgtggaatttcaaagagccagagttcagttgactatgcaatgcttgaatattgtattagagaagacttgaaggctaagaaaccaagacttatggctgttcttgatccaattaaggttataattgacaactatcctgaagatcaggttgaatggtttgatgtggttaataatgtggaatgtcctgaacttggaacaagaaaggttcctttctgtaaggagatttacattgatagagaagattttatggaagaaccaccaaagaaatactttagattattccctggtaacgaagtaagacttatgaatgcatattttgttaaatgtgtagattataagaaagacgaaaatggaaatgttacagagattcattgtacttatgatcctgaaacaagaagtggaagtggctttacaggacgtaaagttaagggaacaatccattgggtatcagcaagacatggtgttaagtcagaagtcagattatatgaaaatattgttgatgaagaaaaaggcaagttaaatgaagatggaacacttaacttaaatcctaattcattaactgtattaaaagactgctatgtagagccaaatattgcagatgttaagccggaagacaaattccagtttgtaagacagggatacttctgtgcagacttaaaagattatacaaaagagaaacctgtatttaacagaattgtttcacttaaaagttcatttaagctacctaaataaaaagcttggacaaaaccagagtaaattgtaaacagtactgtgaattttgaaaaggagccacaccgaggtgtagctccttttcaaataaaagaaacgtatgaaaaaaaataaagcatccaattaagagtagttatttaattctcaatcaaataagtgtatttctataaatcttcaacctcgtctttaagtaggtcatcaccttcaccaaggtctacgtcatcttctgtttcaacatcttcatttacagcgtcttcgtctacgaaatcatcttcattaaaatcatgtgtgtaaacttcttcgtagtcatcttttccaacaaaatccgaaacaatgtcttttgcctgatttacaacatttttaactttgtcctttgccatctgaatgttttcttcaccaactttttctacaaaaacgtctttggcatccattgctttatctttggcttcgtctaccttatccattaccttttcgatattttcttcaccaactttttcagtaacaatgtctttaaccttatcagttacatctgcaaccttgtcaacagctttatcagttacatctttagcttttcttctgttaaaagtaattgtgactttcttgttgccatcattgtcattgccggtgtttacctgaaagattttttcgtcatcaaaatcttcaaagccttcattttcgtcttttttattttttacatataaagctccaccaactgcagcaccggcaactgctgccgcacctattattttcttaaagaatcccatagctatatcctccatttcggtaaattgttaagataattataatactatttttaactaaaataaagcaataatacataattttagaaaaaaacattgccacaaattgttgaaatagcaggacaaaaatgttagtctactaaatggtgaataaaaaagaaatttttcagagaaaaatcaactcttttataataaaaatcataaattgaattttattataaaagtgaaaataaaagtaaattagataaaaaaaaggaaaggatgaagaatgtatggatacaaagattgtattttttgacattgacggtacaatttacagctatgaaaaggggattccaaaagatacggcaaaggccattgagcttttgaaggctaatgggcacataccggttatttgcacaggaagaacaaaatgcatgatttaccctgattttataaacttaggatttgataacataattgcaggtgcaggaacttactgcgagataaatggaaaagaactttactataagaagcttgaggatgctgaagcaagaagagttattgacggtttcattgaatatggattttttccattggcagaaggaaaagaatatatttatgttggaactgacacttctaatcttattcatgcaaaagtacagtttatggacgtacattatgagaaaattcctaattcaattaaaacagtagaagaaaaacatattgaaatttccaaggtaaccggtggctttcagaatgatagtgatatgaaaactattagtgaaaagtttaagaacgactactcgattattaaccataacaatatacttcttgaatttattccaaagggatacaataaagcagttggaattgacagacttattaaagaaataggcattccaaaagaggacacatatgccttcggcgacagctttaatgacattgatatgcttaactatgttgaatacggttgcttaatgggcaacggtgataaggaacttaaaaataaagtagaatacaaaacagacagatttgatgaaggtggaatttataacggcttaaagaagtttgaattaatttagaaaagaaatggtaaacaaaaaaaataatggataatacatttggagaaaaaagcagacaaaattttagaatagaaatagaaaacaaaaatacaattataaaagagattacagattttgacttggagcagactttagaatgtggccaatgctttagattttacaagcaggatgaagaagattatgttgtggttgcttttaataagttgcttcatattaaacaaagtggtaatcaattaattttttttaatactgaaaagcctgatgtggaaaacatatggattccatattttgaccttgaaagagattataatgaaattaaatctttccttttaaaaaaagatagtaaattagaagaagctattaaggaaaagtggggaatacgtattcttaatcaggaattttgcgagacattaatatcttttattatttcccaaaataaacaaataccacatattaagcagttggttagaagaataagtgaggaatacggtgagtatttaggagaagtaaacggtgagagatattattcttttcctgatgtgaaaactcttggaacaataactgaggaagcttttagagagatgaaaacagggttcagggcaccatatctttacgatgcggcacagaaacttgcaacaggtgtgatttccgtggaaacattaaaaggattaaatgaaaatgaaaccagagatgaactaattagcataaagggcgtaggcgaaaaagtggccaactgtgtaatgttgttttctttaggctttcgagaagcatttccagtagatgtttggataaagagaataatggaaagcgtttattttaatggagaggatacaccaaaagaccaaattcagctttttgcaaaagaacagtatggagaatatggcggttatgcacagcaatacctcttttgttttggaagagaaaacaaggttggagcgaagaaataattatcaaaaaatataatcagcaacagaataatttataaagttttgatgacaaaatattaaataattgtaaaaaatcagatttactattgcattaattccaaaaagtgttaatatagttcatagttgattggcactcaaagaagatgagtgctaacaaagaaatgagacagaatagatggaggttttaaaatgaaattagtaccattagcagacagagtagtattaaagcagagcactcctgaagaaaaaacaaagtcaggaataattttaacaagtcagacacaggaaaaaccacaacaggcagaagttgttgcagtaggtcccggtggagtaattgatggaaaagaagtaacaatgacagttaaggttggagataaggttatcttttcaaaatatgcaggaaatgaagttaagctagacgaagaagaatttattattgtaaaacagtctgacattcttgctgttgttgaagactaataaagggttaaagccctaaattatataaccagtttggaggtaatttaaaatggctaaggaaattaaatatggagcagaagccagaaaggctttagaagccggcgtaaaccagttggcagatacagtaaaggttacattaggacctaaaggaagaaatgtagtattggataaatcttttggtgcacctttaattacaaatgacggtgttacaattgcaaaggaaatcgaattagaagattcttttgaaaacatgggcgcacagcttgtaaaggaagttgctacaaagactaacgatgtagcaggtgacggtacaacaacagctacagttttggctcaggcaatgattaatgcaggtatgaagaaccttgctgcaggagctaatcctattatcttaagaaaaggtatgaagaaggctacagattgtgctgtagaagcaattgctgacatgagcagtgttgtaacaggtaaggaacagattgcaaaggttgcagctatttcagcaggtgacgaagaagttggtaacatggttgcagatgcaatggaaaaggtttctaacgacggtgtaattactattgaagaatcaaagacaatgaagactgaactggaccttgtagaaggtatgcagtttgacagaggatatatttcagcatatatggcaacagatatggaaaagatggaagctacacttgatgatccatatattcttattacagataagaagatttcaaatattcaggaaatccttcctgttcttgaacagattgttcagtcaggggctaagcttcttataattgctgaagatgttgaaggtgaagcattaacaacattaatcgttaacaagttaagaggaacatttaatgttgtagctgttaaggcacctggatatggtgacagacgtaaagagatgttaaaggatattgcaattcttacaggtggtcaggttatttcagaagaattaggtctttcacttgcagatactaagattgaagacttaggtagagctaaatcagttaaggttgcaaaagaaaacacaattattgttgatggccttggaaattcagaagaaattgcaggcagagttgcacagattaaggcacagttggaagaaacaacatctgaatttgacaaagaaaaattacaggaaagacttgctaagttggcaggtggtgttgcagttatcagagttggtgcagcaacagaacctgaaatgcaggaaaataaacttagaatggaagatgctttaaatgctacaagagctgcagtagaagaaggtattattgcaggtggtggttcagcatatatccatgcttctaagaaggttgctgaattagtagaaagtttagaaggagatgagaagacaggtgcttctattatccttaaagcacttgaagcaccattatttactatttcacacaatgcaggacttgaaggttcagttattgtaaacaaagttcgtgaatcagaacctggtacaggattcgatgcattacacggagaatatgtaaaaatggttgatgcaggtattcttgatccggctaaggttacaagaagtgcattacagaatgctacaagtgttgcaagtacattacttacaacagaatcagttgtagctaatattaaagaagatacaccagccatgccacaaatgaatccaggcatgggaatgtaatatatattctgataatttatttaaaggtctacagaatgaaatctgtaggcctttatttttttgaataactggaattctgaaagacttattatctaaaaaagtgagaaaaatctaattcaatcaaatatttataaaatatggacaaaaaatatattaatataccaatttaatggtaaaaatagccaaaaactattgcctaatattgtacatttagtttaaaaacatttttttatcgttaattatttggaatagggtttatactatggtaaactaattgaaacgatttaaattattttatgggaatgaaaaaggagaaaataatgaaaggattaaaagattttaaaaagaaatttttagttgtaacattagtgacagcagttactttttcaggtataaatctgccggttacaacagttaatgcggcaactgctgtagctccaagtgtattatcttttgtagaacaggatgatagtacatgcacaatcaagtggagtagtgttcagggagcaacttataatgtttacaaggctaaaagccgttatgcaacatataacaaggttgctacagtagacactaactcatacactgacacagcatatggtggtgaatattataaggttacatctgtagttaatggtacagaatcttctatgtcacttgcaacatcatatgaaattgaaacatttggttataatactaatatttttgaaccaacagataacaattcagaaattcaaagttacataaacaatgtttataagacaacagaatcaggtcagtttggtagtgacagatatgcatttctttttgcacctggaacatattctgacagcttaaatgttgaaattggattttatactcaggttgcaggacttggattaactccaacagaaacaacagttggaaatattcgttctaaggctgaatggatgaaaggcagaaagtatgatggtgctgtaaactataatgcgttatgtaacttctggcgttcagtagaaaacttaacaacaacatctaagtctacaatttgggctgtttctcaggcaacatcaatgagaagaatgaatataaaaggaaatttatatttacatcaggatggaggttatgccagcggtggtttccttgcagatacaaaggtggcaggaacagtttcaggtggctcacagcaacagtggcttacaagaaactctgaaatgagtaattttgaaggtgttgtttggaacaatgttttagttgggtgtggtagcaacgttaaaggagtggaaaaaggctggccatatgcagctaacacagtagtagaaaaaactcctgaagaagtagaaaagccattccttacagtaaatgacggtgaatacagtgtttttgttcctaaagtaaaaaacaatacagtaggtgtttcatggtcaggggataaggttgacggtgagtttattgatttagataaattttatgttgcaaaacctggcgacagtgctgcaaagattaatagtcagcttaatgcaggaaagaatttaatcttaacacctggtatctattcattagatgcacctattgaaatcaagaatgaagacacaatagttttaggacttggatatgcaacattaaagccaacaaatggcaatgaatgtatgaaagttgctgatgttggtggcgtttctattgcaggtgttttatttgatgccggacaggttaattcatcaacacttttaactgttggtacagcaggaaataagacaagccacaaggataatcctattactctttgcgatacattctatagagtaggtggagcagatgaaactccgggtaaggcaacaacttgcgtcataattaatagtagtgatgtaattggagataacttctgggtatggagagcagaccacggtaaaggtgtaggatggacaaagaatacagcagatcacggtgtaattattaacggtgataatgttacaacatacggtttaatggttgaacatttccagaaataccagacaatgtggaatggtaacggtggaaaatgttatatgtatcagagcgaacttccgtacgatattcctaatcagagttcatggaatgcatctggaagttatggatatacagactataaggttgccgataatgtaacaagtcatgaaggatatggaataggcatttactcatgttatcaggcaggaacatgtttccttaagtcagcaattgaatgtcctgacacaccaaatgttaagtttacaaatgtgtgtacatatagtttgagtggaaatggtggcatagattatgccattaacaacagtggttacgctgttatggcaaacggtgaaatgtgcaaagtaatgtcatacaacaatggcaatgcagcacaggacaagacatatgaaaatgccagaaaatatatttggggtacaacagttgacattaaaggaaaaacagatttattctcagatacatttaaagcaacatatacaggtaagaacattacccctaaggtaacagtaaaatataaaaacattactttaagagaaggcattgactataaagttgtttacaagaacaacaaaaaaatcggcacagcaaagatttatgtaattggtcttaataattttaaagacagcaatacatataagatgaaaattattccggctaagacaaagataacaaagaagaaagctacaaagaaaaaaatcactttaaaacttaaaaaagttaaaggtgcaacaggctatcaggttatgtattctcttaaaaagaactttaagggcaagaaaaaaattaacacaaagaagagaactgttgttattaagagaaagaaatcaggtaagtattatgtaaaggttagagcttacaaaaaaattggtaagaaatatgtatatggaaattatacaaagagaataacaattaaataaagaagctgtcaaaaagttttcactttgattttttaagaaaaggactatttacgtattaagattatgcaaatagtcctttttgtatggcaataggactttttctatgataaaataacctgtagctttacataatgattagctttggagaataaaatggatttaaataatttgaaaggtattggagagaaaactgaaaaattattttataaggcaggtattgaaaaggttaatgaccttttaagatactatccaagatattatgatgtttttgaagagcctgttttaataagagatttggaatgtgacagaactcaggcaattaagggaactgtcgtaagagaagtttctgttaaacgtgtgcgaaatcttcaggttgttacagggtatcttagagatgaaagaggggacgccattaaggccacatggtttaactcaccttatttaaaaggaaagcttacaattggaagtacttttatttttagaggatttgtaaaagaaaactatagcaacttttctattgagcaacctaaaatttttggcattgcagagtacaataagaaaaaaggtgaaatgcaacctgtatatccattagtttcagggttaacaaataatatggttcaaaaagctgttaagcaggcgattaaattagttgaaacagaagaatttcttcctgagaaaatcaggaataaatatggcttggagggtttacagcaggcaatagagcatattcattatcctacagacaaaaatcagttatatagtgcaagaaaaagactgatttttgatgagttctttatgtttatttataacattcgtaatttaaaggataaaaataccgaaattcataaccggcatatattggaggaaccaaaagaagttaaaactttaataaataatcttccatatgaacttacaaatgcacaaaaacgtacctgggaagagattaaaagagatatatcttcaactaaggttatgaaccgattgatacagggagatgtaggttcaggaaaaacaattatagctttttttgcattaataactgctgcattaaataatggtcagggggcgatgatggctccgactgaagttcttgcaagacagcactatgacaaccttatagaattgattaaggaacataacattaatgtgaatccggtagttcttgtaggatcaatgacagcaaaagaaaaaagagaagcttataaagttatcgaatcaggagatgcagatataataattggaactcatgccttaattcaggaaaaagttaattacaataatttgacaatggttgttacagacgaacagcacaggtttggtgtaagacaaagagaagccatttctgaaaaaggtgaacatccacacattatggtaatgagtgcaactccaattccaagaacattagcaataataatgtatggtgatttggatatttccgtaattgatgaacttccggctaacagacttcctatagctaactgtgttgttggaacagattacagacctaacgcatatgattttatgactaagcagatagcaaagggccgacaggtttatgttatctgtcctactgttgaatatagtgaagctgttgaaggtgagaatgttattgaatatgcagaaaaattaaaaagaataatgcctgtatcagttaacattgaattccttcacggaagaatgaaaccggcagaaaaaaatgaaattatggatagatttgccaataatcagattcaaatacttgtttctacaacggtagttgaagtaggggttaatgtgcctaatgcaaccgtaatgatggtggaaaatgctgaacgattcggtcttgcccaacttcatcagcttagaggacgtgtaggtcgaggaaaatatcagtcttactgcatttttattaatggttcaggaaagaaagaagcattagaaagactaaatattctttgcaagtcaaatgatggcttcttaatagccaatgaggacttaaaattgcgaggccccggagacttcttcggtgtaagacaaagtggtgattttgagtttagactaggagatataatgaacgatgcaaatatattaaagcaggcatcagaggctgtcgaattaattttaaatgaagaggttgaaatttctgacaaacagcgtaaaataatcatagaatatgaaaacgattctatcaatatataaaatatttggtgttacataaagtaacggaatggagtttaaaatgaatatagtagttctttgtggtggaaacagcacagaaagagaagtatcaattaattcaggatcaatggtttgtgaagctttaagaaagaagaatcataatgctattctgatggatgtatactttggacttgaagatatagatatttttgaaaaatcagctagcgaatatgatgttgaaagtgtaaagaagaacattcagtcattatcagataaggttagcgaagacagaagaagtttctttggtaataatgttattgaaatttgccagaaagctgatattgtttttatggctcttcacggaaagaatggtgaagacggaaagtgtcaggcagcttttgatttatatggtattaaatatacaggttcaggccatcttgcaagtgcaataggaatggacaaaggcgttacaaaacagatttttatgtcaaaaggtgttccaacagctaagagtgtgtggattaaaaaaggcgaaagcacagaccttaaagactatggaatgaaagttcctgttgtagttaaagcatgtaatggtggttcaagcgttggcgttgttcttgttcaccaagaaagtgaatatgaagatgcagtaaaaacctgttttgaattagataatcagatacttgtggaagactttattaaaggcagagagttttccattggtgttattaataaaaaagctcttcctgtagttgaaattattccaagagatggatggtatgattacaagaataaatataacggagctacagaagaagtctgtcctgccaatcttaatgatgaattaacaaagaagattcaaaaggtagctgaggatgcatgtaatgctattggctgtgaaccttatgcaagagcagatgttatgatggatgctgatggcaatatgttctgtcttgaagttaataccttgccgggaatgacagcaacatcacttgtaccacaggaagcaaaggcagtaggtatggatttccctacattgtgtgattatcttgtagagttatcattaaaaaagaataactaaaatattttaattaaacaattttgaactgaaaataaggaatatacttttatgaaaaatatgactttggaaaacattgcgaaagcctgcaatggtatttatgttggagatgaagatttaaaatcaaaagaaataacaggtgtggaaaaagatagccgacttattgaagacggttatttgtatcttccttttgtgggagcaagagtggatggtcacgattttataccacaggtttttgataaaggggctttgtgtactttatcagaaagggatttggataatcctaagggaccttatattaaggtagaatcagttgcaacagcccttaaagatattgctgaattctatagaaaacaacttagctgtaagattatcggaataacaggaagtgttggaaaaacaagcacaaaagagattattgcgtctgttttggaagaaaaatttaaagttttaaaaactgagggcaattacaataacgaaattggtgagcctcttacaattttaaaaataagagacgaacatgaagtcgctgttatagaaatgggcattagtgattttgaggaaatgcacagattagctaaagtttcaagacctgatgtttgtgtaattaccaatattggaacatgtcatcttgaaaacttaggagatagagatggtgtatttaaggcaaagacagaaatgtttgattatgcatctaaagattgctttgttgtacttaatggtgatgacgataagttatctaatgttaaggaagttaatggacatgctcctgttttttttggaattgacacggacagagatgttatggcaataaaatacgaaagtcttggtatccggggaacaaaggttaaaattaaatattttgataaggaattagatacagtaatccctattccaggctatcatatgatttataatgcaatggccgcagtttgcattggctctcattttggaatgactttagatgaaatagattcaggaatcagaaatcttaaagcaattggtggtagaaataatatttttacaacaaatggaataactgtaatagatgattgttataatgcaaatccaatgtcaatgaaagcttcaattaatgttttatcacaggctaatggcagaaaagttgctattttaggtgatatgtttgaattaggcgaaaactcaaaagaattacataaagaagttggacaggctgctgttggaaaagtagacatacttgtatgtattggaaatctttcaaaagacattgcagaagcggcaatagaaggcggatgtaatacattgtattttcctaataaagcagatttcgaggaaaatctttctgcatacattaaaaaaggagatactgttttaattaaagcttccaatggtatgaagtttaaaacaatagttgaaaaattaaaaggttaattatagacaagagattagacataaagttaggggctgtcgcaaaagcggcggcccctttatttacttaataagaaatccttttggaaattctattaagtaaaaatcctattaaataattaaattatgattatttaccgctcatctgtctttcctgagcttcaatcatcttcttaaccatctgtccacctacagaacctgcctgggctgatgttaagtttccgttataaccatctgtaagctgtacgcctacctctgatgcacattccattttgaatctgttcatagcaccctttgcttcaggaacattaactttgttagtgttactcattactcattacctccaacaattaaattatttagtaactaagttcatatgaagttgttacactaatattatgtggaagttttatttttataaactggtaacttgttgctaatatgacaaaaaaaaccatctttcataaaaaaaataagacgtcaaatcaatgtgcagatttatttattattttttaaataatctaatataatgtggctatattcagtaatggtattatcgttaatactgtcagccttaatatattgattcttatccttatattctaatttaaaacaattttcaaaattcttagacttcgaatcaaatataggaagaaaacttcctgaaaacttttcataacatgtggaagcagtggcagcctttcgaaattttttatccatgaattctccgatacttttgtgaatagcacggtcttccaatggaaggaaataataatccttataatttttaaagaaatacttaaatgtgccgttgcataaattaattgaaatgtttaaagtgttattctgaatatttaagtgaatgccattaaagttatgtgaaatattaacaggcacagtattgtttaaagttatactaacaagtaattcctgttgaatatctccgtcaaaattcttatattcatgaatttcgtaagaattaacattatacttatattcaaaaatatcagatatggaaagtaaatccgttaaaacacccatattccaaacatcttctttattatgtaaaagaagtgggaatagtaaacgttcatctttagattccacataatgcttaaagacttcaattaaatctccacctgaaaaaggatcacttctgttaattccaagaagtttctcaaaagatttctgtttattgttttccattttaagaatgtgattaagctttgaaaccggtttgtaaatatcaatactttggtaattatcaaagtcaaattctaaattgtattttttacccctttctgttacaaacggtatgtcaaaactgttaccattaaaatgaataacagtatcgaaatcctttatgaatttattaaatgccataagaacattggcttcatcattaaaattttctgcaagccattgagtataacaaagttcatctcctgaatagtacatacagccgattaagtagacaatacagtactttcttgaaaaacctgttgtttcaatatcaaaatatattattttctctttttttgaaaaattctctattggatagttaatttttatatccactttatttctaaatactaacataaatcttattttatcaaattaataaaaacacaacaagattttttgatttttttgaaaaattaaaaattcttttacaatattaagttaatgcctaattagtgaaaaaagagtatcaattggatgttatttacattgaagaaattggacaaaagtattattatagaatagatgtaaaaaattacgaagagaggtagagttatgtctattctaacatttaagggtggagttcatccatacgatggaaaagaactatccaaggatgttgctgttagaaaagtgcttccaaaaggagaagttgttattcctgttgcacaacatataggggcaccggcaaaaccggttgttgaagtgggacagagagtattaaagggacaacttatagcagaagcggcaggatttatttcagctaacattcactcatcagtttcaggaactgtaaagaagatagaacagagagttgttcctaacggaagcaaggttctttcaatagtaattgaaaatgatgaacaatatgaagagtttcaatatgaagccaaagaacagccatggtcaaaggaatatattagagaggctgttaaggactgtggagttgtaggtttaggtggcgcatgcttcccaactaacgtaaaacttacacctaaggacgataatgcaatcgattatgttattgttaacgctgctgaatgtgagccatacataacatccgattacagaagattggttgaacagccgcaggaagtaatcgaaggattaaagattgttttatctttatttgagaatgcaaagggtgttattgcagtagaaaataataagcctgatgttattgaaagcttaaagaaacttactgaaaatgaagatagaatacaggtggcagaattaaagactaagtatcctcagggatcagaaagacatattatttatgctgttacaaagagaaaaatcaattcttcaatgttgccggcagatggtggctgtatagttgataatgttgacacaatttacaacatttatcaggctgtaaaattccacaaaccgttaacagaaagaattgttactgtttcaggtgacggtataaagaatccttgtaacctgttagttccttttggaacaagtcatagccagcttgtggaagaagcaggcggtatgaatgaatctgttgaaaagattttgtcaggtggtcctatgatgggtcaggcaatgtttactttggatgttcctgttataaaaggttcatctgcacttttagcatttaaaaacgatcaggttgcccatgctaagacaactaactgtcttaactgtggaaaatgtgctcaggtttgcccggaaggtttaatttgcgcaaaacttgctcatgcggcagatgcagatgatatggaggcttttgtaaaaatgcacggaatggaatgtattgaatgtggtacatgcaattacaattgccctgctaacagaaacattacacaaagcgtaagaacaatgaaaagaaaagtgcaggcagcacgtaggaaagggtaagagtgaataaaaaatgtataacgtatcatccagccctcatgtaaaaagcaaggttacaactcagagtataatgagagatgtaattatcgctttaatgccggctacaatttttggtatatataattatagtcatctcttcggagcaaaatacggattaagaagtgcattacttattattttaacggtagttgcatgtgtattatctgaatatgtttttgaaaagattactaagagagaaagcacacttgatgatttaagtgcagtagttacaggtatgattcttgcattgaatcttccttgtactttcccttattggaaagcaatgcttggcggattttttgcaattgtaattgtaaaacagttatttggcggtttaggtcagaactttatgaaccctgctttaggtgcaagatgttttcttgttttgtcatttgcaggaaacatgactgcattctatcctacagatgttagtggagtagatgcggctacaagtgcaacacctttaacttcattaaagaatacaggggacagtgttgcaagtcttgcagatatgtttattggtaatcattcaggtacaatcggtgaaacatgcattattgcattgttaatcggtgttgtatatcttgttgtaagaaagattattgatttgcgcatccctcttacatacatagcagtatttgctgtttgtattatgctttttaaccagagtacagatcctgttttccttgcaaaacatctttgcggtggtggtttgatttttggggccttctttatggcaactgattatacgacatctcctattacaaaaacaggaagatatatttttggtatatgtttaggtcttttgacagctattttcagaacatttggaaatactgcagaaggcgtttcatatgcaattatattctgcaatcttttagttccattaattgaaaaatggacaattccaagagcttttggaattgttaaggcaaaaaaggagggcaaataatatgaaaaatataattaaagatactcttatattatttgctatcactttggtagcaggacttggattaggtcttgtatataatgttacagctaattcaagagcaatgcaggaagaaaagactaagactgaagcatacaatacagttatgccggggcttggaagtttcgataatgtaagttttgacagcgtggctgccgacaaatatattaaagagcagattaacaaaaatgaaacagaaaaaacaattaaatcttacaatgccacaattgatgaagttattaaggctaaagacaaaagtggtaatgatttaggatacattattacagttacagataatgaagcttatggtggttcattacagatgactgtaggtataaaagatgacggaactgttatgggtatttcattcctttctttaagtgaaacacctgggcttggaatgaaagccaaagatgatgattttatgagtcagttttccaacaagaaagtagatttcttcaaatatactaagtcagaagcaaaagctgacaatgaaattaatgcaataagcagtgccacaataacatctaatgccgtaacacatggtgtaaacggtgctatttactgtgtagactttattacaggaggtggcaaataatgaacaaatgtattgaacgtttatataatggtattataaaagaaaatcctacttttgtattaattctcggtatgtgtcctacacttgccgttacttcatcattagttaacggtgcgggaatgggacttagtacaatggcagttttggtattgtctaacatggttatttcaatgcttagaaatattattcctaacggagtgagagttcctgcatttatcgtaattgtagccagctttgttacaattttgcagtttttattagaggcatatttaccatcacttaacagtgcccttggtatttatattcctttaattgttgttaactgtattattttaggaagagcagaaagttatgcatcaaagaatcctgttttaccatcaatttttgacggacttggaatgggacttggatttacaattgccttatctttattaggcggtttcagagaaatcttaggtgcaggtacaattcttggaattaatattccacattgggacggtattggaatctttgttatggcaccgggagcattctttgttcttgctgctttaattgcaatacagaaccagattagaataagtcatggcaaaaagcctagaaagcttcagtgcgaacagggctgtgcaggttgtacaggctgtggcagtgattattcacagtgtaataaagaagaaaaggaggaagcataaatggcagaatgtatgttaatagcagtaggtgctgctttagttaataatgtagtattaagtcagttcttaggattatgcccattccttggagtatcaaaaaagacagatacagcggcaggtatgggagcagctgttatctttgttataatgattgcatcagcagttacatatggtgtatattatgcaattcttacaccacttaatcttgaatatttacagactattgtatttattcttgtaattgccgcattagttcagcttgttgaaatgattttgaagaagtttattaaacctttatatgaagcacttggtgtataccttccacttattacaacaaactgtgcagttttaggtgtagctatttctaacattgacaatggatacaattttgcagaaagtcttgcatgttcatttggaacatcattcggtttcttaatttcaattgttatccttgcaggaattagagaaaaatcagaacacaacaatattccaaagcctttccagggaacacctattgttcttgtttcagcaggattaatggctatagcatttaccggttttaccggagttatttaaggaggtaagatatgagtttattagcagttagtatatcagttaacagtatcttatatgccgtattaatcgtaggtggtgtaggcttatttataggtattgcacttggaatagcagggaaattcctttcagtagaagtggatgaaaaagaagttgcaataagagaagcacttccgggcaataactgtggtggttgcggatatccgggatgtgacggacttgctgcagcaatagcaagtggtgaaagtgaaccttcagcttgtcctgttggtggcgcacctgtagccaaaaaaattgcagacattcttggagttgaagcagaagtagttccaaaagtagcttatgtttcatgttcaggagactgtgacaaggcaaaagacaaatacaactattatggaaacatgtcatgccaggatgcggcaaacattcccggtggcggtgcaaaagcatgtagctatggttgtttaggacttggttcatgtgtaaaagcctgcgaatttgacgcaatccatatagtaaacggaaaagcacttgtagacagagaaaaatgtaaagcctgtggaaaatgtgttgcagcatgtccaaaaggacttatttcaataatccctgcagatcatcaatacatggtaaaatgtcgctcaaaagacaaaggacgtgatgtaatgcaggcatgtacagcaggatgtatcggatgtggactatgtgcaaagaactgtccaaatgatgcaatcgattttggatataatcttgcaacaataaatcaggacaaatgcaaaaactgtggcatctgtgctgaaaaatgtcctaagaaagttatagaaaaattatcatagttttctttctatgcataatattaataaaaaacctcacactattatagatacgaagatttcaaaattgtacgggtttgccttttgccgaaagtgctctgaggccgtcggtccttaggaggtggggcagtgaaactgctacagcttcttagtaccgctacgagccgagggcagcggaagcgtgctttcgcaatggcaaacccgtacaattttttagaaattcgaatccggaaagtgtgaggttttttatgttaaataaagagaagagagaaaactatgaaaaaaattctgaatatagtttcattaagggtaatatcgaattggatgaacaaaaattggaccagttgttgcatttagaggaaaattttgatttacttaaaagaaagtttgatattggagataagagggctgttatttattacattaatggtttttgtaaagatgatatgctgcagaagattcaggagttttttttggggattgatgtgtctgatgtggagagctctgtaatggattttgccaataatcagattccttatttggaaattgatttgtatggggataagtataacgtggttaccatgcttttgtccggggtttcctgtttgcttattgatggctttaataaggctattttgattgatgctagggagtatcccgcaagaaatgttcaggagccagagaagtacaaggtccttagaggttcaagagatggtttcgttgagactttaattcttaatacagcccttattagaagaagaattagaaatcctgagtatatttgtaaagttatgcgtgcaggaaaaagttcaagaacggatattgctatttgttatatgaatgacagggttgacagaaaattgcttgaccgtattattagtaatattgaaaaaatagatgttgatgcattaactatgaatcaggaaagtctttcggaggcggtttataaaggcaagtggtttaatccatttccaaagtttcgctatactgaaagacctgatacggttgctgcatctgttttagagggacagattgccattcttgttgacaattcccctgcggcaatgcttcttcccacaactatttttgatgtgatagaagaggcggacgactattatttcccaccggttaccggaacttatttaagacttgcaagaatgatcgttacagttatgtcattattgctgacaccgttgtttttactttacgcaaataatcctgaaattttaccggattggttaatgttcactaaaatagaacagcatgaatatgtgccgattttttggcaactattgattttggagttggctgttgacggattaaagttggcagcaattaacaccccaagcactttaaatacacctttaagtttaattgcagcaattgtaattggcgagttttctgttaatacagggtggtttaaccagcagactatgttatatatggctgttgttgccattgcaaactttactcacgaaaattatgaactggcatactcagttaaatttttaagaataatcatgcttatttttactcagattttcggattatacggatttattggcgggataatttttacattggcagtagtaggattaaacaaaacaattgcaggaacaagctatgtttatcctttgatgccccttgattttaaagtatttttgcaaagattttacagagtatcattaaaggctaaaaacaagaaatgaaataaaaaagctaaaatgaattggttttataatcaaaaaacgttaacgaaataactgtcgttgcaaagtttgtctaaatgagtataataatagatacagttaagggaggtttatatggtagctaaaactaaagaaaaggaaaccgtagtggttaagactcaggaagaaatgtacttagatgcagaaagacttttaaaagctactgaatgcttaacaagagataaagaaaaggcagagttttttaaaaatcttgctgatagatataaagacttaggagaatatgaggattcaaaagataaatatgaagaatgcttaaagaagcacaaatattataaggaacagtccaagatagtgaaagaaattcagcctaaggaagaagattttaatgagaacaaaagcaagagtaatggaattattggaaaagttattataggccttgttattgtacttgttattgccgcagccggtggaattgtatatctaaagactaaacccggaaggtaccagagagcaactttttatgaaaacaagggtaattacgagaagtcttataagatgtttaagaacttaaagaattacaaagacagcaaggaaagaaagagagactgtaagtatcagtttgcacttcagtgctggaaagatgaagactatgagcctgcaattaagatgtttagggaattagttgagtctgaatatggtgacagtgaagaaaaacttgctgatttagaaattgaatacattaaaaagcagaaaatcggcacaaatgttatatttggtaattttcattggcttatattagaaaatgatggagataaagtacttcttgtaaaatccgaaccaattaacggattagcctataatgaaagagataaagctacaacatggagtgaatgtactttaagagaatacttaaatggttcatttttagatggaacatttagtctaaatatgcaaaagaaaattttagatacaaatattaaggttgaaaataatagtacatatggtacaaaagccggaaaagatacagtagataaaatatttatgcttaatggaagtcaggcagagcagtatgaagaaatcttaagcaactatttaagagactggtggttaatcggtccgggaaatagcgaaaatacagcgcagtatgtatcatacggcaaagtgatgaattatggatacattgttacagacacaaatatccatatccgccctgcattgtgggtatcaatcaagtaaaaaaccactttaagatttgcaaattatattaaaactccgtgcgaaaaataattgtaagaaagtacttcgaagccgttggaccttagaagataggggagcgaagctgacatagcttcttagtaccgctactagctgagagtagcggtagcgtgctttcgataattatttttcgcacggagttttctgaattttttggtaaatataattgtataaattagggtgatatggtattataaagataggtaaacattcgtttggtttttaaagctaaacgatacggaaaggtggttttgtcgatggtaaaaaaacgcagacttgacattattattttaattgtacttattgtaattgccattggcagttggatagcagtaacggtattatttgatgttaacggagactatgttgaagtcattgtggacaatcacgttcagaaggttatttcccttaatgatgacggcgaatatcaggttgatgatggtgaatatagtaatattattactataaagaacagagaagtatacatgaaaagctccgactgtcctgatcagatttgtgttaaacagggtaagattaagaaacagggtgagtcgattatctgtctgccgcataagttggtaatcagaattgcgtcagaggagtatcctgaagttgattctaatgtagactaacgttactggaaaatgacaagggaaaggattaataagaattaatggtaagtaagaagatttcattaatggctttatttacggcttttgcagtgattctaagttatattgaaacttttattcctacagtcggcattcctggagcgaaacttggtctggctaattttgcggttataatggttatgtatgctgttggaaacaaagaagctttttttattaatgttatacgaattataataataggattatttttcggtaatatgtttagcatttgtttcagtattgccggggctttggtaagctttataggtatggtcttgttaaaaagtacaaagagaatttctatgattacagtagctattataggtggtgttctacataatgtaggacagattataatagcttctgttattttgaaaaatgtaggtatttttacttatgtacctatacttatgattgcgggaataattacagggacagttattggaattctgtccaatattctttataaaagaacaagagagtatattaaactatagacaacatggttttacaaggagatttttattatgatatcctatatatcaggagtagttgaagagattgaaaaagataaagttgtagtagataataatggtataggttatggaatatttgcttcccagtctacattagagcagattggaattggtgagcaggttaaaatttatacatattttagtgttagggaggatgcaatgcaattgtacggtttcctttctaggcaggaattacaattatttaagctgctgataggagtaagtggtgtaggtccaaaaggtggacttgcaatattgtcaacttgtccgggagacagcttgtcaatggctgttttggcagatgatgccaaagctatttcaaaggcacccggaattggagcaaagacagctcaaaagattattatcgaattaaaagataagattgatatagaagatatgattgcaggagagacaattagcaaacctatgactaaggtaagtggtgttgttggagatgccgttgaggcacttactgcactgggttattcccagactatggcgtatcaggcaattaaatccatcgaaaatgttgacggaatggatgttgaggaaattttaaagaaagctttaaaaaatatattttaggatagtattatggcaaaaagaattatacagacagatttggcaggagaagatattgttattgagaaaggtttaagacccgaatcattagatcaatatgtaggtcagagcaaagcaaaaaataatttgaaaatatttatagaggcggcaaaatcaagaaatgagccacttgatcatgttttgttttatggtccaccggggcttggtaaaacaacacttgcaacaattattgctcatgaaatgggagttcatattaaagtgacttcaggccctgcaattgaaaaaccgggagaaatggcagcaatattaaataatcttgcagagaatgatattttattcattgatgaaattcatcgtttaaacagacaggttgaagaagtcctgtatcctgcaatggaagattattccattgatattatgattggaaaaggtcagggggcaagaagtatcagacttgatttgcctaaatttactttagtaggggcaactacaagagccggacttcttacagcacctttaagggatagatttggtgtaattaataaacttgaattttatacagttgacgaacttaagcagattattataaggtcagcaggattacttaatgtagaaattgacgagaaaggtgctacagaacttgcacgccgttctagaggaacaccgcgacttgccaacagactgttaaagcgtgtaagagattttgcacaggttaaatatgatggtgtcataactgaagatgtggcaaatctggctttagaccttttagaagtggataagttaggacttgataagggcgacagatcaattcttgaaaccatgattgataagtttgatggtggccctgtaggtcttgatacattggctgcagcccttggagaagattccggaacattggaagatgtttatgaaccatatcttattcagaatggacttttacagcgtacaccaagaggaagaattgcaacaagacttgcatatgaacatttgggagttccctttctagaagattaacttactcctaaatttacattttatatgttttgtgatagaatacgtggtagtttaaccaaggacaaggagagaattatgtcatcaaagaattacatagacgttataatagatggaaaaatttacaatattggtggttttgaaagtgaagcttatcttcagaaagtagcatcatatattaacaatatgattgctgagtttaagcagaacgagaattacagagttcaaaaagttgatatgcagaggattcttcttgaaatcaacattgcaaatgattattttaaagcaaagaagcaggctgatttacttcagaatgatattgaattgaaagagaaggaagtgtatgatttaaaacacgaacttattgtttcagactcaaaagctgaaacagcaacaaaagaattaaatgaagccttagaaaagattgaatcattagaaaaagaaatcattaaattacagacagaattagaaaaataataacttgaaagaaacggtcaggttttgcctgatcgtttagtgtttaatatgtacagccatagaaaaacgtaagtggaggatttatgaaagttgaacttttagcccctggcggttcctttgaaagtgttatagcagcatataatgcaggtgctgatgctgtttatacaggaggattaatgtttggagccagagccggagccaataatcttacaactgaagaattaattgaagccttagaatatgcacatgttcacgatagaaagctatatcttacagtaaataccttgcttaaagataaggagatagagacggaattatatgattacctgcttcctctttatgaaaatggcttagatgcagttattgtgcaggatattggagttttcaaatttataagagataattttccactaatgcatatacatgcaagtacccagatgacaatatttggaaaagatacagttgcatttcttaaagatttaggtgcttcacgaattgtaactccaagagagctttctttaaaagagatagaagacataaagaatgacattaggcttaaggatatggagatagaaagctttgtacacggtgcattgtgttattgctattcaggtcagtgttttatgagtagctacattggaggaagaagtggtaacagaggaagatgcgcccagccttgtagaatggaatatgatgtattaaaagatggcaaagtattaaatcccggaaataacaaatatgttttaagtccaaaagacatttgcacattaaagattcttcccgaaatcattaaatcaggtgtatactccttaaagattgaaggacgaatgaagaagaccgaatatattacaggtgttgtaagtatttatagaaaatatcttgatatgtatttaaacatacctgataagtataatgttgatgaaaatgatataaagaaacttgctgatttatttaacagaaatggttttaatgaaagttattataagcaacataacggcagaaatatgatttcattaaagaaaccagagtttagaaaagaaaatagagaatttaatcagtatttaaaagaaaaatatataggtttcaccttaaaaaagaatcttaatattaaagtaacttttataaaagagcagccatttacaatttcaacaatggttaatgggactgaaataatttatgaaggaaatcctgtatcaaaagctttaaataagcctattgacaaagaaactttattaaagcaaatgaaaaaaacaggtaacagtgactttgattttactaatattgagattatctgtgatgaagatggatttttaccaataggtgcaattaatcaggcgagaagagattttcttgaaaaggtaagacaatatttaatatcacagtacacaagaaagagtgtagaagattcaaacattcaaagtgataagagtaataccaataataagtatattgttgatttatgcaataaaaatacaacaaaatccgttaatattaatgtacttgtaagtacaaacgagcagtttaaagtttcaatgaacaaggatttcgttaaaagaatatatgttgaaagctctgacttttcagaaaataaaattcttgaaataatcgaagaaggacataaggctgacaaagaaatatatattgcaatgccttatgtttacagaatggttgacaagaataattttcacagaaattatgtgaaaatcattgaaaaagcagatggatctcttataagaagttttgaggaatatctggatttaagaaaaataaatatggcaaaaaattgcatttttgattataatgtgtatacttacaataggatagccaaagatttttatctgaattttggtggtgtacagacaacagttcctttggaactaaattataaagaaattgaatttagaggtttggcaggagatgaaatgattgtttatggatatatgccggcaatgatttcagcaggttgtggtttaaaaacctgcaatagttgtaaatcagataatagtacttatgaagttgtggataaacatcgaaacagatttgtaacaaagtgtgtatgtaggtattgctataatgtaatgtataattgtaagccattatccctttttaagttttcaaaggaaattatttccatggcacctgattcagtaagactttcatttacaacagaaagcggaaatattactgaacagatattaaataaggcacaacaggcttttatatacgaaaaaaatatacaggaagatgatcaatctacaagaggacactttaaacgtggggttctttagaaaaaattggagactgatatggatacttttattgttattgtaactaaatatttatttattttgcttatgttgttttatacatgggagtcttttagcgcgcttattcatactaagcgctatcaggcggcaggtatatttcaacgtcagaatgcgattatttttgtgacctatattctgggtatagttactatttttatgaaccagaaagatacaacagatgttaatgttattattttaggtgggttgcaaatgtgctttttaatagtggttttaggcatattccctattatttatcctaacattaacaaaggcatactaagtaatatgtgtatgcttttgactatcgggtttattattctggcaagacttagttttgaaaaaagcgtaaaacagtttattattgtagctgttgtaaccatgctctcattaattgtaccgtatttaatgagcaggtttaatatgtggaaatccttaacatggatttattgctttgtaggtcttggtctgttagttgcggttcttgtagtgggaaccctttcaagaggagctaaactttatattaagattagcggattcactttccaaccatcagaatttgtaaaaataatatttgtattttttatagcaggaatgctaagtaagtcagcagaatttggccacttaattttatcggctgtttttgcagggctttatgttattgttcttgtgatttcaacagaccttggtagtgcattaatattctttatgatgtatctgtttatggtatatgttggaacaaagaaggttcgatacctttttatcggaatggcaggtatatcgacggcttcggtgatagcatacaagctattttcccatgttcaggtcagagtgcttgtatggaaaaatccttttgctgccgatattataaataattcaggatatcaggtttcacagtcactttttgctttgggaagtggtggcttaatgggaaccggactttataagggatatcctaacaagataccaattgttgataatgactttgttttttcagctattggagaagaatttggagcaatattcggaatacttctgattcttgtatgtttaagctgttttatttcattcttaaatacggcaatggaacagaacagtatgtttaacagactggtttgcgtaggcttaggtgtaggctatgcaatacagattattttgactgtaggtggtgcaattaacatgattccgtctacaggcgtaactttaccacttataagtagtggtggtagttcaattttaagtacattaattgtctttgcaattatacagggacttgcaattgtaggtacggctaacatgaattcagttagaagaaaagtaccaacggagggaacaggaaatgtcacgacgagaacaacatcaaatgtcaaaggactccgcaagacgcaggagatacaagtcggaacaaaaagaaagacgaaaattaaatagacaggcaatggttacttcagtaatattttgcataatttttgtatttatggcaggattttacttaaactttattgtaaataaaagtcaggatattataaaagatactcataatgaaagagttgccgaaaaagcgaaaaccattataagaggaactatttatgctgaaggcggtgaaaaacttgcctacacagacacaaactcaacagaagaagatttaagtgatgacacaagaaaatatccttatggtaaaacttttgctcaggtaattggctattcaacaaagggctttacaggacttgaacagagatgtaactcagatctttcaactgaaggaactactgagatagaaaagattgccaatgatttttcgaatacaacagtaagtggctgtaacgtatatacaactttaaatgttaagttacagaagaaagcttatgagtcaatcggttcagataaaggtgctgtttttataatggatccttcaactggagctgttttaactactgcttcaaaaccttcatttaatcctgaaaagttagacaagatatgggatgatatttcaacggataatgaaaattcaccattgcttaacagagcaactttaggtttgtatacaccaggctcaacatttaagattgtcacaacacttgcttatatgaaccagcataagaatgattacaataatttctcatattattgtcagggacgtgcgcttttccataattttaagattaactgttttgatggtcatgctcacggcagtgaagattttgaacacgcatttgccaactcatgtaacagtgctttttcaacaatgggtgataaacttaatcttaagaaatatataaagactgttaatggattattgtttaatgagattattccttttgataactttaatacaagtgattcgaactattgcaaaaagagtcgttttgtcttgaatgaaaattcaactcaggcagaagtagctcagacaagtataggacagggtgaaacattagttacaccagctcacatggctatgcttgcagctgcaattgcaaacaagggtgttcttatgaagccatatatgattgataaagttgagaacagcaatggaactatagtgagtcaggcagaacagactgaatgcaagaagcttatgactaagtcacaggcaaagcagttgcaggaatatatgtctgcagtatgtgattatggtactgcaagaattttttcaggttcttcttacgaagtatatggtaagacaggtacagcagagcttgataagaataacaacgtcaactcttggtttgtgggctatgcaaagaagggcaaaaagcagcttgccattgcagttgtttacgaaaatataaaagacggaacaatttcagccaaggaatgtgcaaaagagatttttgatgattattttaaataaattgttgtcaataaatacaaaaaaaattgaaatactaatatggtaatattgaaattataaacttattcttgtatactaaaagtaatttaagtttgacgttaaagaagtcaaaatcacgcttaaaaacaggaggcttcctatggagaacgcagtcagctgtggcggtgtggttatatttcgaggaaagatattattgctttacaagaattatcacaataggtatgaaggatgggttttaccaaagggcactgttgaaaatggcgaaacgcatgaacagacagcattaagagaggttcatgaagaaacaggagtgaaagcaacaataattgaataccttggaaagagtgaatatacattcaacattccccatgatattgtagaaaaagaggttcattggtatttaatgacttctgacagctattttagcagacctcaaagggaagagttttttacccattcaggttattacagatatattgaagcgtatcatctgttaaaatttcctaatgagcgtaatatgcttgaaaaggcatacaaactttaccttaaaatggaaagatcaaaaaacaaaaaaagataggacaaagagacaggaatttatcctgtctcttttgtagaggagaaatgaataaaataaattatcagaaagaattggaaaagacattagaaaacataacaaaaagtgatattaagccatcacttttactacatgtatgctgtgcaccatgtagcagttatgtattagaatatttaaataagtattttaatattactgctttattttataatcctaatatatcaacagatgaagaatataatcatagggcaaaggaacttatacgtttcataaatgagaaagattttgaaaatcccattaaaacagttataagtgattatattccgcaggaattttatgatatggctaaaggattggaaggttgtcctgaaggtggtgcccgttgtttcaaatgctatcgtttaagacttgaacaaacagcaaaaatggcaaaagaagagcagtttgattattttacaacaacactttcaattagtcctttaaaggattctcaaaagcttaacgaaataggacaagctttggaaaaagaatatggagttaaatatttatattccgattttaagaagaagaacggatataagcgttccattgaactttccaaagaatacaatttgtacagacagaatttctgtggttgtgaattttcaaagccaaacgattaaattttagaagaaaacttaaacagttattttgtaaaataaaatttgcaagttaatatttgcaagggatataatattgtgatatattcatagaacgaagttacatttagttagctagtatttttaatacatatatttgaaaggatatttaatatgatttgtccaaaatgtggaaatgaatgtgatgataatcagatgttttgtaatgcctgtggcacaaaacttaagaatttcgtccctaccgatcaggaagaaatcgtggtgcctgacagaacaagacctacttctaatatacaccgggaagaatcaagaacagcgactattaataccggaaataaaggcaaaaatgataatgttttaaataaggaaaataaaggcaagaatgataatgctttaaataaggaaaataaaaagcctaaaaagaatagcagacgtttggaatcagaattactggataatgataatataacagatgcaggttttgcttcaaagaagacgaaagctaaatacaaaaatgataaatataatgtttcatcaaataagaacgttaaccctaagaagtcaggcaaaaatgttgccattgtagctttaattgccattgtggcagtggttgcaacagttgcaataactatttcaattaaaaaagcttccatgactaagaagtttaaccagtactataacaatggaacagtttactacaaccagcagaattataaggatgcaagaactcagttctatacagcatctaacaatgcagttaataatgagcagagagttaaatcttatgtaatggtttataaggtagactcaattattggtggttatgaaaaggaagaaattgaatttcttgaagctcttattgcaattgacaattctaacattgattattacaaagagcttattgttttatatcagaataacgatatgaactcaaagattgaacctttaattgcaggtgcaccttctaacatgaaggaagaattaactaattacaacggtacaattccggttgcgaattataaagaaggggtttaccgtaaccctattaatgttgaactttcatcaagtaatgatgtaactatttattacacaacagacggaagcaatgccattgaaagtgaaactaagacggaatattcttctccaattaaattaaagaaggaaggaatatatactatacgagcttattcagtagacaaaaacggaaaagcaagtaaagaaatgacaataaaatatacacttgaatttattaaagtagacgctccaattattaagcctgatagtggaaaatacacatcagatcagaagattgaagcaactgcagccagtgacactattatttattacacaacagacggcacaacacctacaactaagtcaaagaaatataaaggtgcaatagacatgccaaagggtgacagcatatattactttatagcagttaacgctgaaggtgttgtaagtgatgttacaacaagagtctataattttacaccggaatattctaagacttatgatgaggcacttgaatcattaaagagaagcattggtggaatggacatcatatttaacgataatgacgatggtgatatttacaattttgaatacagagagattgcagaaataagtgacaagtattactatattatttcctgtgaaatgacaactaagaaaaacaaaactaagtcaacaacatatgctgtatcatgtgatgatgcaatatgttacaaggctagttatggttctgatggaaattattcaatatcaacatcaaacgatgactaattaataagaaaactcctacttttgtttgcacatttattaccaatgtgtaaacaagagtaggagtttttcttgttttttgcaataaaaacgttataataaatatatactaaacaggaaagaggggatacagtgagtgacaggaaaagcagaatctttgcatcaattgttataattctaattgttatggctatatcttttttatttatgacaagagagaattatgtcagatattctttttatgatgcaaccgggtgtcaatatattgaagtgacaaaaatggaaaatgcaaagggcgaaaatagtattaaacatttatcattatacaagtatggttactttaaaccatgttatacaattcccaaaagtagtgccgaaggagtctttatggcatataatgatgataatgatttattatttactataagagaatatgcaggggacattgtaaaaatagaagtagcaaccaaaacagaatattacaggtacatagcaagaaactaagctgataaatgtaatagtaatataaatacaaataaaatcgaaaaaggatttgacatttacaaagaaaaatgataacatatcgttgttatgcggatgtggcggaatggcagacgcagcagactcaaaatctgccgccctcaaagcgtgcgggttcaagtcccgccatccgcactatttttttgaaattttgtagatactgcaccttgaaggtgcattttttttactgtaaaataaagaaaaaggagattaaaatgaaaaaactaaagaaagtatttttggctattgctgttattacaagcataggtatatttaccggttgcgccctttttagtagtggagttaatgacattaaaggtaagcttacaggtaattcatattcatgctatttttatgacaatagtggaaacaaatttatgactgcaaaaggagacaaaatagggcttacaagcaacgttgtggaagaaggtcatgttgattcagatgacggtacatatagcaagagttatggtttgtcatctatcattacattaaacattgacggaaagcagttagaaagctgtggtgatacaattatctttgaacagacaggtttgcagcctgatgctgagtttaccacagaagatattaacagcaaatccacaggaaaactaagcgagaatgctattgtttcaaatgttattaataaatataaaaatgcatttggaaaagcccaggtagtagtaattcagagtcagcttggtgtacctatttgtgcttacagcggtgaaaaggtttattgggaagtaagagacgacttgcctaagacaactaagcttatgattgatggaaaggcattgtatattcacagagctaacttccagataattgacaaagcacttattgactaaaattaacttaagaatattatgaaagggttataaatacaaaggctatatatgaaagattttaaagttattgaagttaaaagaagtatttttgaagacaataatgcagacgctgacagactaagagaacagttaaagtcagagggaacatttctgcttaatttaatgtcttcaccgggtgccggaaagacaacaacattaaagagaacaattaatatgcttaaagacgaaataaacattggtgttatggaagcagatattgattcagacgtagatgcacaggcaataactgatacaggtgttagagccattcagattcatacaggtggaatgtgtcacttagatgctgacatgacaagacagggaattaacgaatttggaacaaaggatttagaccttgtatttttagaaaacgtaggcaatcttgtttgccctgcggaatttgatacaggcagtactaagaatgcaatgattttgtcagttcctgagggagatgacaaaccccttaaatatccgcttatgtttacaataagcgatgtagtattaattaacaagtgtgatacattaagcgtttttgacgatttttcaaagaaagacgttgaggaaagaatacataatttaaatccaaatgctaaggtattctttgtgtctgcaaagacaggagaaggctttgaacagtggacagattggttgaaaaacgaattaaaaatatattctaaataatgctaaggaggaagttttatggcagatccattaggaggttatgtaccggataccgtaaaaaatgatgaacctatccgtgagcccattgcgcgtttaggcaaaatgatttccgacagaatggaagttatgcttggcaaagaaaaaattacaaaagagtcacctgagtactggggccttgcacctatatgtactgacgaacaggctcttattgccataaaaatgggaaagagaaaacctagaacttttgcacagattaagaaattaacaaagattaatgacgatgaatatttgcaaaagcagttagacgaaatgtctaacaatggtttaattgaatacaattgggagaatccacagcacgagaaacagtacgttttacctatgtatgttcccggaagtgcagaatttaccaatatgaatgcagatgttttaagagatcatcctgaaatgggtagattttttgaaagaatgagtcgtcttccgcttgaaaaggttacaccaatggttccacttggcggagcaggaatcggaatgcacgttattcctgtagagaaagcaattgaaatggaaaaccattcagtttcagttgaacatatttcacattggcttgataagtatgaaggaaaatatgcagcaagtccttgttcgtgccgtcgctcaagagttacatatgacgaaggctgtgccgatgatcctgaaggctggtgtattgctgtaggtgatatggcagattatgttgttgaaactaacaaaggtggacgttacataacaagagaagaagtatacgaaatccttgaacaggcagaagaaaacggttttgttcaccagattacaaacattgacggtgaaaataagatttttgcaatatgtaactgcaatgttaacgtatgttatgcacttcgtacatcacagttatttaatacaccaaacatgtctcgttcagcttatgttgcccatgttgaaaaggataaatgtgttgcctgtggacgttgcgttgagttctgtcctgccggagcagtaaagcttggtcagaaactttgcaaaaaagatggaagtcaggttgaatatccaaagatgcctttaccttctgaaaagaagtggggacctgaaatgtggactgaggattacagagacaaaaaccgtattaatactcatgaaacaggaaccgcaccttgtaaaacagcctgccctgcacatatagcagttcagggatatttgaaaatggcttcacagggaagatataaggaagctcttgcgttgattaagaaggaaaatccatttcctgcagtttgcggacatatttgtaacagaagatgtgaagatgcctgcacaagaggaaatattgatcaggcagtggcaattgatgaagtaaagaagtttattgctgctaaagatttggaagcagaaacacgttacattccaaagaaagttgttccatcacttaagggacagtttgacgaaaagattgccataatcggtggtgggcctgccggtttatcctgtgcattctatttggcagaaaaaggatatgcacctacagtttttgaaaaaaatgaaaatgccggaggaatgcttgtatacggaatcccatcatacaagttagaaaaagatgtagttcaggctgagattgatgtaataaaagctatgggtgttactattaaaacaggcgttgaagtaggtaaggacataacaattgaagaattaagaaaacagggctacaaagcattctacattgcaatcggatgtcagggtggaagaaaagccggtattcctggagaagatgcagaaggtgtaatgacagccgtagatttcttaagagaagtaaatgacaaggaagaatatcctattgaaggagacgttgttgtaatcggtggtggtaacgtagccattgacgtagcaagaaatagcaaacgttgtggtgatgttaatgtatcaatgttctgtcttgaagacagagagcatatgcctgcttcggaagaagaaattgaagaagccacagaagaaggaattaaagttaattgtggttggggaccaaaggaaatcattgtcaaagacggaaaagttgacagcattgttcttaagaaatgcctttctgttatggactatgatggaagatttaacccaacatatgatgaaaatgaaacaattacattgtcttgcaagcacgtagtattgtcagtaggacagactattgtttgggacaaccttttagatggcttaaatgtaaaattagacagaggtaacagagcaatcgctgactcatttacattccagactgacgaacctgatgtatttgttggtggtgatgtttatacaggtccaaaatttgccattgatgccatagctgcaggaaagcagggggctatttcaattcacagatttgtacagccacacagcagtcttacaattggacgtgatcctcattatttcgttgaacttaataaggatgacataaacattgaaaactatgacaattcaagcagacaggttccaatgaaggatgaaaacattagcaaaaacaatcctttcagagatgccaaacttccttttaccgaagaacaggttaaaaaggaaacagcccgttgtcttggatgtggtgcaacaatcgttgacgaaaacaaatgtatcggttgcggtatttgtacaactaaatgtgagtttgaagcaattcacttagaaagagacttgccaggtgcaagtgttatgagaaagagtgaagacaagcttaaatacattttgccaaacggtgcaaaacaggcaattaaaattaaattttctaagaaaaaataattattaaaaatatttgttaagactatttattagaaattttaattaaaactattaagttataaatttattaaacaactaataagataaaaggggaaaattatgcatgaattaggtgttgtttttcaggctataaaaatcgtagaaaaagtagccaaggaaaataatcttactgaaatagaaagtgtaactgtggaaattggagaagtttcaacagttatagaatcatatcttcagaactgctggaagtggtctgtagaaaagaaatcagacattatgcataattgcaaattatacgttgaaaaaatcccggcaattacctattgtgaagactgtggtaataaatatgagactgttgcctatggtaaaacatgcccaaaatgcaacagtactcatacatacctcttacagggaaatgagtttaacattaaggaaattgagggatgttaaaataagcaatcaaattttaaaaaatttgattacaataaacaagggaggaagaaattatgttatttcaaattaacagcatgtggcagatattaggctgggttttagtatttgccggattaattattacaaacgaaattgaacgtcgtacaaagaagggcggaatctttttctttggaatagttttagcagcgctaactgtttactttatagctattcagattggtgcacacacaggagcagcctgggcattaaacagccagacttataagtatatgaatggatggttccattatgcaaagctttatgctgcagttgcaggatgtattggttttatgttattaaaatataaaacaggtcttggcaacaagcagtggtttaaatgtttcccattcataattgtagcaatcaacattcttattgcagtaggttcagactttgagtcagcaatcaaaggtgctgatgctgttaacggatggtggttctcaaatgaaaaggtatggcttaacggtggctggtggaactgggtaaacggtattgccggaatccttaatattttctgtatgacaggctggtggggaatttactcatcaaaagacaaaaatcatcaggatatgttgtggcctgatatgacaatatggtttatcgtagcatatgatatttggaactttacatacacatactgcaatttaccaacacatagctggtactgtggtgtagctttacttttggctccaacatttgctaacgcattatggaacaaaggtggatggattcagaatcgtgccaacacacttgcaacatggtgtatgttcgcacagatacttccattattccagattagtggtgtattctcagtaatcccatcactttacaaaaatgtaacaggtgcaaaaacaggtcttgaccttgcatcaattgatagtgcaacaatgtcaacaattacacctaacacaacagcaatgggcgtatgtgcaatacttgcacttgcagccaatgttgtatgtctttcagtaataattaaacgtgccattgaacagaagaaaaatccatacaaagaagaaatctttgcaggaacaaaagacttcgttgaagcaatggaaagagcagaataaagacattaaaatatctataaagaaatgggctagtcagaaatggctagtctttttttgccctattatgcatattttctcccgaatttgcaatttctattttcttatttgaataaaaaagtattatatatggtgttcgaacaatttgtttaacacgtgtggaaaggaatatactttgtattttcacatatataagtggttaaagaatttgtttaaataaccaaaaaataatatttaacattgttgaaaaaaaagtcgtatgtgtatataattattgataacatcttaatgattaaatagggaggaagtttatgaacaaaaatagttcaaacataattaaggaagttttacttgcatttgcaatgggaattatatttctagttgtgttaatcgcattaagttacataatatttccaaatcaaatgactgaaggcgaaaataccgaagaattattattaataggttttccaatgctaattgcatatataacttactatgcaagaaagatattaaacaaaattaaataaactttaattttaaaagaggctgtacaaaatcgtatagcttcttttttgattcccaaaccaaattaatcttcccacaaatgcataattacataaaacaaacaaaataataaattcataataataaaaaacgctattgaaatatacccccatagggtatataataccaacagtaataaacataaaggagtaaaactatatggaacataaatgtgcacattgtgccaaaaagaaagagcgaacagaaaaagaatataaagacctgataaacagactaaatagaatagaaggacaagtgcgaggcgtaaaaaacatggttgaaaacgatgcctactgcatggacatcattacacaggcatcagccatagctgctgcactaaacagcttcaacaaagtcctactatccaaccacatcaagacatgcgtagtcgacaacataagagaaggcaacgatgaagtagtagacgaactaataacaatgctaaaaaaatcaatgaaataaagaaacacaacattttactaccttgtgcttgagaaaattctgtaagcaaacaataggaaaatattcgaaattttgtgagcatagcgcaagtgcaaaagtaactgtttgagccataaggcgagttttacttttgcacttgcaataagcggcggaacaaaatgagaaatcttgacgtgtttgcaacagaattttctcacaacacaaggactagaaaaaggaaaggagacttttaaatgaaaaaatacacaatttccggcatgagttgtgccgcctgtcaaagccgtgtagaaagagcagttaacgccctgccaaatgttgattcagcagttgtaagtctgctgactaacagcatgcaggttgaaggctccgccagtgacggtgaaataattcaggctgtggagaaggcaggttatggtgcaaaaaccgcaggaagttctaagaaagatacaacatcaatggaggaagaccagttaaaggatactcagacacctattttaagaaaacgtttaattgtgtctttggtattattaattccacttatgtatatttccatgggacatttgatgtgggattggcctttgccatctttcttaattgacaaccatattgctatgggattaattcaaatgctttttactattgctattcttgtaattaatcagaagttctttattagtggttttaaaggcgttttaaataaggcacctaatatggatactttggtggcaatgggagcaggtgcggcttttgcatatagtacttatgttttatttgcaatgacagatgctcaggtttcgggcaatagtgataaggttatggaatacatgcatgatttttattttgaatctgctgcaatgattgtaactcttattacattaggaaagatgcttgaatcttattctaagggcaagacaacagatgcactaaaaagtcttatgaagatggttccaaagactgctacaattatcgaaaaggatttaaccggaaacgaaaaggaaaaaatagtttccattgaagatataaatataaatgatgtatttgtggtaaaaccgggcgaaaatataccggtagatggtatagttatagatggcttcggtgcagttgatgaatctgctattacaggagaaagtattccggttgataagactataggctctaaggtttcatcagcaggggttaaccagtcaggttacttaaaatgtaaagccacaagagttggtgaagatacaactttagctcagattattcagatggtcagtgatgcatctgccacaaaagcaccaatagcaaaggttgcagataaggtttcaggaatatttgttcctgttgtaatatgtattgcacttgtaactatttttgcctggcttattgcaggtgaaacagttggttttgccttagcaagaggcatttcagttcttgtaatcagttgcccttgtgcattaggacttgccacacctgttgcaattatggttggtaacggagtaggcgcaaaaaaaggtattctttttaagaatgcaacatcccttgaaactacaggtaaaacccaaattgttgcacttgataaaacaggaactattacagttggaaagcctaaggttactgctattattactgaaaaagaaacagatgaaaaagaattgcttggaattgcaataggtcttgaaagtaaaagcgaacatcctcttgcaaaagcaattaccagttatgcaaaagaaaacaacattaagccatatgaaattgttaattttaagtcagaagttggtaatggtttagttggcgaatataatggctcaaaagtttttacgggaaatagaaagtttattgaaaagaactgtaatatttcaactaatttaattaataaaactgagaagttatcagaaaaaggtatgacacctttgttttttgccagagataataaggttcttggcataattgctgttgccgatgttattaaagaggacagcagggaagctattttggaacttgaaaatatgggaataaaagttataatgcttacaggagataacgagaaaactgccaaagccattggccataaagcaggtgttgatcaggttattgccggagtgcttccacaggggaaggaatctactatcagagaacttactgaatacggtaacactgttatggtaggtgatggaataaacgatgctcctgcacttacaagagctaatataggaatggcaatcggtgccggaactgatgtggcaattgatgccgctgacgtggttcttatgaaaagcaatttaaaggatgttcctgctgcaatcagattaagtaaggcagttcttcgaaacattcacgaaaatcttttctgggcatttatttacaacataataggcattccacttgcagccggaatatggtatcctatatttggttggaaacttaatccgatgtttggtgcagcagccatgagcttatcaagtttctgcgttgtaaccaatgcactaagattaaatcttgtaaatatttataataacaagaaagacagaaagattaaaaatagcattacagaagtaataggaaataatgacttatcaaataatttagacaataaagaatcagaaaaggagactaacactatggaaaagacaatgaaaataacaggtatgatgtgtggacattgtgaagcaactgttaagaaggctttagaagcattagaacaggttgacgaggcaattgtaagtcatgaagaaggaacagctgttgtaaaattaaacagcgacctctcaaatgatgttcttaagaaaacagtagaagataaggattacacagtaaacgatattatcggttagtttattatttaggtgttaagtatggaatgtaaggattttcaaaaattaataaatgattttattttcgacaaaattgaatattctgaagatttaaaggaatttttgaatcacgcaaaaacatgcaaaaactgtggagaagaattagaactttactacactatcagaaggggacttggcgatgtcaaggcccctgatggaagtgaggaaagtgttgatgctacacaggaattggaaaatattattaatttttatgatgaatattttgaaaaacaaagaaaaagaaagaaagcagccattatttctgttataatagcaatgttaatgattatatttgtaattgtatgtttatatttaaataccattggtattatataaagtgtattactttggaaaggactatattttaatgagtaaatttgtgttaatagacggacatagtattttaaacagagcattttatggagttcctatttttactaacagtgagggactacatacaaatgctgtttttggttttctgaatattatgtttaaaataatagattcaaaacagccggattacatggctgttgcttttgacgttcatcagcctacattcagacacgaaatgtttaaggattacaaaggcacaagaaagcctatgatggaagaattaagggaacaggtgcctgtaattaaggaattattgcagaaaatgaacattacaactgtagaattgccaggatacgaagcagacgatgttattggtactttgtctaagaaaggtgaaaaagctggcatggaagtagatgttatttcaggtgacagagatttacttcagcttgcaagtgaccatattacaatctgtatcccaaaaactaaaaaaggtcagactacagttgaagaatacaatacagaaggtgttatgaaattatataaagttaccccaactgagtttattgatgttaaagctttaatgggtgactcatctgacaatattccgggggttccgggaattggagagaaaggtgcaacagccattatttctcagtttggttcaattgaaaatgcctacgaacacgcagatgaaatttctaacacacgtaacagaaacgcacttttaaataattacgaaatggcacagatgagtaaaactcttgccacaattaatattcagtcacctgtagaagtaacacctgaacagtgtaagttagaagatatttacacagaagatgctcttgaaatgattaaacgtttggaatttaaaagtatgattcaaagattcggctcagttacttcaactaatgattgtgagggaggatttaagtatattaataatccttttgatgctgatcctatttttgagcaggctaaaaatgctgataatgtaggtatttttatttatagaaacaaagacaattttggtgtttctttgtgttttaacaatgacaatgtttattacattggaaaagaaggttttgtaacagaagattatataatcgaaaaagttagagaccttgtaaatgccaaggctaaacttacaattttaaatattaaagaaaataatgatattttggaaaatgatgacgctgaaagtatttttgatatttctattgccgcatatctattaaatccattgcagaatacttacgattatgacgatattgcaagagaatatttaagaatgaatgtgccggcttttgatgagatttttccaaaaactaagaaaagcgaaactccatcagatgaaatacctgaaaacatattaaaatatgcctgctataatgcttatgtagcttacaaggcaaaagatgctttaactgaaaagttaaaagaaacagaaatgcttgacatttacaacaatgtggaaattcctttaacttatgccttatatgatatggagcaggcaggaattatggttgcaggcgacaagcttaaagaatatggtgaaagacttaaaactggcattgatgcattagagaaagatatttttgctgaagcaggtcatgaatttaatattaattcacctaagcagttaggcgagattttatttggtgaaatgcagcttcccggtggcaaaaaaactaaaacaggatattcaacatctgcttctgtattagagaaacttgaacctgattatccttttgtaagtaagatattagagtacaggcagcttgcaaaattaaagtcaacatacgctgatggattggctgtttatataggcaaagataacagaatacacggtaagtttaaccaaacaattaccgcaacaggcagaataagcagtactgagccaaaccttcagaatattcctgtacgtatgcctcttggaagagagattaggaaagtctttattccaaaagaaggttgtgtgtttattgacgcggattattctcagattgaattaagaattttagctcatatgtctgatgacaagaatttaattgatgcatataatcattctaaagatattcatgctgcaacagcttctttagttttccatgttccacttgaagaagttactaaggaacagagaagtaatgccaaggctgtaaactttggaatcgtatacggaatcagttcatttggtttaagtaatgacctttcgattagcagaaaggaagctgaacagtatataaaggattattttatcagttatccgggtattaaaaattatcttgataattcagtaaaagaagctaaggaaaaaggatactctgttacaatgtttggcagaagaagacctatccctgaattaacatcaggcaactttatgcaaaggcagttcggtgaacgtgtggcaatgaactctcctattcagggttctgctgcagatattatgaaaatagcaatgattaatgtggcaaaagagttaaaagagaaagatttaaaatctaaaattgttttgcaggtacacgatgaacttttaattgaagcgtacgaaaatgaagttgaacaggttaaagatattctgaaacgcaacatggaacaggcagctcatctaaatgttcctttggatgttgatgttcaggtcggaaataactgggatgaagcacattaaaaaggcggtgttattatggttataggattaatgggtggcgtaggcagcggaaagtctacagtacttgattatttagaagaaaattatggtgcatatattattcagtcagaccatgtggcaaaggaaatcatgactcccggctttaaggtttttgataaactttcaaaagcttttccggaagttattgaaaatggaaagattagcagcgagaagcttgcctcaatagtttttaataataaggacaagcttgacactcttaattccattactcatccgggaacaatagaagaaattcttaatagaatagagcaaagtaataattcaattattgttgtggaatcagccttacttttaggttcaggccttgaataccattgtgatgaattatggtatgtatactgtgaacataatgagagagtaaaccgtcttgttgaaaacagaggctattcagtagaaaagtctgaggagattatttctaatcaaccaagtgatgaagaatataaccactttgctgatgagtttattgacaatacttttagtgtggaaaaaacaagagaacaaatagatatgattttaagcaacaaagaatgctaaaaaataaaatgattttttactaaaaatcgtattgacaatatttttaaaaagaactacaataggtagcacgctacatattgtggttctttttgtgtttagattttttttgaaaggaggaattatgggacatttaggtcacaaaatcaagcttattgacagacagtttagaagccgtatggataagaatcttgagaatcttggcattacaacggcacagatgaatgtattatgttatatggaacatcacgctgaaagaaatgtaacccagaaacaattatctgaagcttttaatgtgaagcattctacaatggcaggcatacttcaaagaatggttgaaaaagatcttcttgaaataagaccaaatcctgacaataagaaatttaaaaatatattccttacggaaaaagctaaaagtattcaggataaagcctcagcatatcgtgagtatacggaatctgttgtaataaaggactttacacctgatgaaaaagaatactttgaaaaaacattatttaaggtttttcataacttattaaacgattcttcattatcacaggaagagaaagacttaatagagaggagatttatggaaaatgattaaaacattattaggtcaggttaaagaatttaaacttgtttctttgcttacacctttaggtatgttggcggaagtaattgttgaaaactttattccacttcaaatggccgttataattgattcaattggaaaaaatgacttaagtacaatttacaaaacatcctttataatgcttttacttgctttgtcaggtttaattgccggatatatgggcggtgtatggggagctaaggcttctacaggttttgcaagaaacttaagaaaggcaatgtatgaaaatattcagacattttcattttcaaacattgacaaatttagcacagcaggacttgttacacgtttaacaacagatgttactaacattcagaatgcatatcagatgattcttagaatgtgcgtaagagcacctttcagtttgcttgttgcaatgattatggcattctcagtttcaccaagagttgcaagtgtatatttaatagctgttattattcttggaattgtacttgcaattattacacttaatgcccataagtattttacacaggtatttaagaaatacgataaacttaatgaaagtgtacaggaaaatgtaagtgcaatgcgagtagttaaggcttatgttcgtgaagattacgaacgtggtaaatttggaaaggcaagttacaatatttacaagatgtttattaaggcagaaggtattgtttcattaaatgcaccttcaatgatgcttgccatgtacagctgtattttatttataagctggcttagtgcacatatgattattgccagcggaaataatcctgccgtaggtcttacaacaggtaacttaacttcacttcttgcatattgtatgaatattcttatgagcctcatgatgctttcaatggtattcgttatggttacaatgagtatggcaagtgctgagagaattgctgaagttataaatgaaaaagctgatattactaatcctgaaaatcctgaatatgaagttgccaacggaagcattcgttttgaaaatgttgatttcaggtataataagacaagcgaaaaacctgttctggaaaatattaatatttcaattaaatcaggtgaaacaatcggtattataggtggtaccggtagtgcaaaatcaagttttgttaatcttttaagtcgactttatgatgtagaaaagggcagcgtaattgttggtggaaaggatgttagagaatacgaccttgatgtattaagaaaagaagttagcgttgttcttcagaagaacgtattgttctcaggaacaattcttgaaaaccttcgttggggagatgaaaacgcaactgatgaagaatgtattagagcatgtaagcttgcctgtgctgatgaatttattgaaagaatgcctgacaaatataatacatatattgaacagggtggttctaacgtatcaggtggacagaaacagcgattatgtattgcaagagcattacttaaaaaacctaagattcttattcttgatgatagtacaagtgccgtagatacagtaactgatgcaaaaattaggaaagctttcagagaagaaattcctgatactacaaaaattattattgcacagagaatttccagtgttaaggacgctgacagaattattgtatttgatgacggtaagatagatggcgttggaacacatgaagaattacttgaaaacaatagcatttatagagaagtatataatcagcagatgaatgataatgctgactttgataagaaaggaggagaacagtaatggaaaaagctaaaacagtaaaaggtccgggaaacaggcgtaatatgggaccaagaccaagacttaataatccattaaaaactctttcacgtcttattaagtatatgggaaaatattatggcatacatatggttattgtagttttatgtattattgccaatgtatttgccagtgttaacggaacatggttcatgaaggcattagttgacgaatatattttaccgatgattaaagaaggcagtaatgatttcggaccacttcttaaagcaatgattcgagtaggcggtttctatggagtaggtgttattgcttcattgattcaggctgaaatcatggtttttgttactcagggaactttaaagcatttaagagatgatatgtttaatcatatgcagggccttccaattaagtattttgacacacattctcatggcgatattatgtctatgtacactaatgatattgatacattaagacagatgataagccagtcaatgcctcagatgtttaatagtgcaatgactattgtcagtgtatttgcatgtatggttgctttaagcataccccttacacttttaactttaattatgattggtgtaattacactaggttcaaagaaacttacatctttatcaggtaagtactttattgctcagcagaaagatattggtgctgttaacggttacattgaagaaatgatggaaggtcagaaagttgttaaagtattctgtcacgaagaaaaatcaatggaagaatttaacaagttaaacgaccacctttttgaatcagctaataatgctaacaaatttgccaatgttatgggaccttttaatgcacagattggtaatgtaagttatgttctttgtgcctgcattggtgccattattgccattaaaggtattgccggttttacaatgacaccgggaagtttaattagtttcttaacttataataaacagtttgcacagccaattaaccagattacaatgcagatgaacagtattgttatggctattgcaggtggcgagcgaatcttcaaattattagatgagaaacctgaagttgacgacggatatgttacacttgtaagagctaaaaaggttgacggtaatattgttgaatgtgaaaacagaacaggaatgtgggcttggaaacattaccacaaggacaccgatacaactacttatgttgaaatgaagggcgaaatcgtatttaacggtgttgacttcggatatactgatgacaagattgttttacatgatgtaaaactttacgctaatccgggcgaaaagcttgctttcgttggctcaacaggtgcaggaaaaactactattacaaaccttattaaccgtttctatgacattcaggatggaaaaatccgatatgatggtatcaatattaataagattaaaaaggctgaccttagacgttctcttggtatagttttacaggaaacaaatcttttctcagctacagtaatggaaaatatcagatatggtaaattggatgctacagatgaagaagttattgcagcagctaagcttgccaatgctgacagttttattagaagacttcctgacggttataacactatgttaacaggaaacggcggtaacttaagtcagggacagagacagttgctttcaattgccagagcagcagttgcaaatccaccggcacttattttggatgaagcaacatcttcaattgatacaagaactgaaagacttgttcaggaaggtatggatgctttaatgaagggcagaacaacttttgttattgctcatagattgtcaactatcagaaatagtgactgtattatggttcttgagcagggacgaattattgaacgtggaaatcacgatgacttgatgaaacagaagggaacttactatcgtcttcaaacaggaagttcacctaactaagaatttaaatattaaatctctttattataaacatctcttcggaagaatatacttaactatattcatctaaagaggtgttttttattaaaaaatttatttatatcctggctttaatgttcttttcaacagttacaataaaaattaccgaagaaatcgattatcacaaatataaaatcaaaaaaaacattgtggaaagctatgattaccgcaccttaaatatcgagcctgaatgtttgcagactataaataaaatatgctcaaaagataagtgtgacttttcagatttattatcggtaatgtttttgaacagtaatttaaacttaactaaagtaaattatacaagggagcgctattctgatttaaaaggttgttacaaaaagaaaagtgccaatgaatataataatgtgtcaaaaaacattgctgccatttttgacgacattgtttattttcctgttgcaaaaagcacaaccagtggcaagtgggtttcttatgaagattcttttggcgctgagagaaattacaatggaagttatcctcacgaaggttgtgatattatggctgaaaataatgtaagcggttattatcccattgtaagtgtgtctgacggaacagttgaaaatataggctggcttgaaaaaggtggttatcgtgttggcataagaagtagtcaagggggctatttttattatgctcatttaagcagttattcggacataaaaaaaggtgacaaaattaaagccggaactcttttaggttacatgggtaacacaggatatgggactgagggtacaaccggttgctttgacgttcatcttcattttggaatatatgctaagactaaaaattattatgagctaagttataacccatattgtattttaaaatatttggaaaacaatgtaatacttgcaagctattaaaaataaaagcagtaattagtgggttataaatcaataattaattagcaattaataaaatagaaacttgccataacttaggcaaaggagtaaaataaaacggagaaaataaatttagaaacaagtgaggtatttgacatgaaaaagattagtacagaaaaagcacctgcagcaatcggaccatattcacagggagttgttgtaaacaatacattattctcatccggacagattgcattagatcctgcaacaggagaaattgttggctcaactattgaagaacaggctgaacaggttatgaaaaatttgggagcaatccttgaagaagcaggttcaagttatgaaaaaacaattaagacagtatgcttccttgctgacatgggagactttggagcatttaatgaagtatatggaaaatatttcacagaaaaaccggcaagaagctgcgtagctgttaaagaacttccaaagaatgttttatgcgaagttgaagttatagctgaaatctaatcattatatgtctataatggaggaattttatatggataaaaacttattggaaattacaggttatgatggtgaaggttatgttcctttaattgattattcccattggcgtgttgccgaacttagatactgtgaagaattagaagtggacaagcttaaagatatgcagaagcatgatgaaacggatgaagtttttgtattattggaaggcgatttcacattattcttaggtggcaatggggaacacataggagagattgaggctattaaacttgaacctcttaaactatataatgttaaaagaggtacatatcatacccatactcctgaaaaaaattcaacagtgcttattgttgaaaatgttgacacaactgacgacaattcacctaaagaaaaattaactttagagcagaaaaaaattattgaaaagttgtataaggaagtaaattcatagatttatataactaaggtctcacttttaaaagaaaatcgacttttaaatctgggacctttaatatgtaaaacagacaaccgaaaacaagagaggtatttttagtgcgactggataaatatttaaccacattaggaattggttcacgaacacaggttaaggaattaataaaaaaaggaaaaatcactgttaacggcgaaaagattttaaagcctgacattcatattgatgaaaataatgatgaagtagatttaaacggtgttaatttaaaatataacaaattctattattatatgctaaacaaacctgcaggagtattatctgcagtatcagacaataattgcaaaacagtaattgatttgcttaatgttacgcctaaaaaaggactttttcctgttggaagacttgataaggacacagaaggcttacttcttataactaatgacggtgaactttcacacaatcttctgtctccaactaagcacgttgataaaacatattatgtggaacttaatggggatttaatagacagcgatattgaactatttgaaaaaggtttggatataggtgagaaaaatcttactaagcctgccatccttaaaatacttgaaaaaagaagtacagctttaattacaataacagaaggaaaataccatcaggttaaaaggatgtttcaggcaataggactaacggtaacttttcttaaaagacttacaatgggacctcttaaattagatgaaaatctgaaacccggagaatatagaaagcttacagtcagtgaagtagaagccttgcttaataataaacctagaaataactaaaataattaaaacatattttaataaaatattttaaaaatttaaaaagtaaaattattagaataatatttagaaagtataaaaattagaaagatattaatatgcaggaaattaaaattacggaaaatcaggcaggacagcgctttgacaagtttttatttaaatactttaaggaagctacatccggctttatatataaaatgcttagaaaaaagaacattgtcttaaatggcaagaaatctgacggaaaagaaaaacttaatgtaggcgattcaattaagatttttatggctgatgataccatacttaaatttagaggcgagataaagttagatattgttaaacctattgatttagatattgtttatgaagatgataatattctaattataaataaaccgtcaggaatgcttagtcaaaaggctgaagcaagtgatgtatcagttaatgaatatattatttcttatttagtatccactaacaaactaagtgaagaacaacttaaaacatttaagcccggtgtctgcaatcgacttgacagaaataccagtggcttaattattgctggtaaatccttaaaaggtttgcagacaatgtctaaaatgtttaaggaaagaacaatggataaatattattttgcattagttaacggcaaaatagaaaataaaataaacataaaaggttacttgaaaaaagatgaaaaaacaaacaaagtaacaatatataaaaaagagcaaaaagacagtcagctggttgaaacagagtatgagcctgttttagctaacaacagaattactttattaaaagttaagctgattacaggtcgaactcatcagattagagcacacctttcatctgtaggtcacccattaattggtgactacaaatatggaaataagaagattaatgatatatataagagacaatatggtattaaagaccagatgttacattcaagattgactgtttttccaaagtttacgggagactgtgataatctgtccggtaaagaatttacagcaacactgcctgatgattttataaaagttttaatcaatgaatttaagaatagtaatgttgttaatgactttattaaagaaaaacagattaaaaaataactatacattaaggttggtttttgattacaggaaagaagatttagagcaattatgggaacatggaagacaagaggacttagaggttctacattagaagatatgattaatatgactaatgaaagttatcgtgaaaagggacttgcattaattcaaaaaatacctactccaataacgcccattaacattgatcaaagtacaaggcatattacccttgcttattttgacaagcaaagtacggtagactacattggaacagtacaggggattcctgtatgctttgatgccaaggaatgtgcagttacaacatttcctatgatgaatattcacgagcatcaggttaagtttatggaagactttgaatcccagggaggtatttcatttatattattattttacacatctttaaacgaaacttactatataccttttaaggatattaaaagattttatgatagaagtattaatggtggccgaaaaagtttcagatatgaggaaattgataaaaattatcttataaaatcagcacccggtgcccttgttcattatttggaaggaattcagaaagatttagcttcaagggaaggttgacatttattataaaatattgtaatataccttttagttcattactaaggtagtgagttaccactttaaagtattaaagtaaagcaacaaatggaggataacatggaaaaagtattattacatactcctgaaggagttagagatgtttatggcaaagaatgtgccgtaaagttaacaatagagaatagcattaacaaagtttttaatatatatggatatcataatattcaaacaccaacttttgagttttttgatattttcagtaaagagcgaggctctgttgcttcaaagaatttatataagttctttgacagggaaggtaatactttagttttaagacctgatgttactccttcaattgcaagacttgttgcaaaatattatatggacgttaaagttcctgttaagctttgctacaatgccaatacatatattaataactcagaattacagggaaaattaaaagaaaatacacagcttggatgtgaacttattaatgatgattcagttgaagctgatgcagaaattcttgcccttgttgtagattcattaaaagcagcaggacttaaagaatttttggtggaaatcggtcatgcagatttctacaaggggcttttggaagaatgcggttttgacaccgaaaatgaacaggaattacgaaaaagaatagaaaataaaaactattttggagttgaagaaattcttgataataacaatattacaggacagcttaaagaggcatttttgaaattgccggaattatttggttccattgatgttataaaatcagctaaagagcttacagacaacaagaaagcattacaatcaattgaacgtcttgaaaaattatattcaattcttgaggattatggcgtatctaaatatataagttttgaccttggaatgattagtaattttaattactataccggaataatttttaaagcttatacttatggctccggtgaccaaattgtagccggtggtcgttatgacaagttacttggtcagtttggaaaagaagctgccgcagttggttttgctgtatatatggatcagattcttttagctgtaaacggacagctattaaaagaaaacaatgattactcatatgaagtcattatttatgatcctgaatttagaaaagctgctttatcccttactaatgcacttagagatcagggtgttaagacagaattaatttctaaaaaagagaatatatcattagacgaatatacaacatttaagaaagaagacggtgctactaagattacatatgtttcaaaagatggcgctgtagaattataggtgagcagtatgagatatttaacttttgcccttgcaaagggtcgtttggcaaaaacagcaatggatatgtttgaacagattggtattcagtgtgaagaaatgaaagatgaaaaaacacgtaaacttatttttgttaacgaagaattaaaattaaaattttttcttgccaaggcaagtgatgttccaacatatgttgaatatggtgcggcagacattggtattgtaggtaaagatactattttggaagaagacagaaaattatatgaagtattagatttaggttttggaaaatgcagaatgtgtgtctgcggacctgaatcagcccgtgacttattaaaaaatcatggtatgataagagtagcgtcaaaatatccaaagattgccaaggattattttaataacaaaaaaggtcaaacagttgaaattataaagcttaacggttctgttgagttagcacctattgttggcttatcagaagttatagttgatattgttgaaacaggtactacattaaaagaaaacggtcttggagttttggaagaagtttgtccattgtctgcaagaatggttgttaaccaggttagtatgaagatggaagacgaaagaataagaaagattatttctgatttaaaagaaaaaataaaataaattttataaaaaaaagattgtttaaaagactaattataaagattaactaatctttaggaggctgaaatgagaattataaaattagatgagagttcaaagaaaaatattttaaatgacttacttaaaagaagtcctaataactacgacaattttgcagacagcgtaaatgcaattcttgcaaatgttaaggaaaacggcgacaaagctttattccagtacacaaaggatttcgataaggctgatattaatgcttcaaacattaaagttactgaagaagaaattaaggaagcatacgacagacttgaaaaccctgaattagttcaggttattagaaaatcattaaagaatattaaagaataccacgaaaaacagaaacagtacagctggtttgattcaaaacctgatggctccattttgggtcagaaggtaacaccattatcaagagttggtgtttacgtacctggtggaaaagcagcttatccatcatctgttttgatgaatgttattcctgcaaaggttgccggtgtcgaacagattgttatggttacacctcctggaaaagacggaaaagttaatcctaatacattggtagcagctaacgaagcaggtgttgacgtaatatataaagtcggtggagcacaggctattgcagctttggcttatggtacagaatcaattgccaaggttgacaagattgtaggtccgggaaatatttatgtagctttggctaaaaaagcagtattcggttatgtaagtattgactctgtagcaggtcctagtgaaatcttagttcttgctgatgaaacagctaatccaagatatgttgcagcagaccttttatcacaggcagaacatgacgaacttgcttcagctattcttgttacaacaagtgaagaattggctaacaaagtatctgaatatgtagatatgtttgtttccaaattaaagagaaaagaaattttacagaaatcattagacaactatggatatattcttgttactgataccatgcaggctgctattgacacagctaatgacattgcttcagagcacttagaaattgttactaagaatccatttgatacaatgacaagaattaaaaacgcaggggctattttccttggagagaacagttccgaaccacttggagattatttcgcaggtcctaaccacgttcttccaactaacggaacagcaaaatttttctcacctttaagtgttgatgatttcattaagaaatcaagtattatctcttattcaagagaagcacttgaacctttaagtgaagatattcagaaatttgccaaggccgaaggtttgacagctcacgctaattctattagagttagatttgaagaagatgatgatataaaggagtagaaatatgagtagaattggtaaatgcgttagaaatacaagtgaaacacagattgaagtttcaattaatattgatggtacaggtaaatccgatattaatacaggcattggtttttttgaccatatgttaatcagctttgctaagcatggtcttttcgatttaaatgtaaaagttaacggtgatttgtatgttgactgtcaccatactatcgaagatacaggtattgccattggaaatgcaataaaagaagctttaggagataagaaatccattaaaagatatggttatatgattcttccaatggacgagtgcttaactatgtgtgctcttgatttatccggaagaccttatcttgtttttaatgctgaattcactacagatagtgttggtggctttgacactgaaatggttaaggaatttttccatgccataacttattccacaggaatgaatttgcatattaagatgttagaacctggcaacaatcatcatatgattgaaggcatatacaaagcttttgccaaggctttagatcaggcaacaattaaggatgaaagaattactgatgtattatcaacgaaaggaacactataatgggaaagtttagaattataccatctatttatttatataatggtaatgttgtagataaagaaacaaaggaaatagttggggatggagatgctgttgaacttgccactttctataataatagaggggcagatgaattattagtttttgacttatcttcatcagacagtgaacatgatgcaaatatcggtacgatgattaagattcaggatgctgttgatattcagatgattgttggtggaaatgttaaacgtcttgaagatgttaaaaaatatatttatacaggagccaagaaagccattctcgatatgagtaaagacgctaatgttgaaatagtaaaggaagcttctgaacgtttcggtagtgacaaaattgccgtaatgttaaataaggattatgatttttcaaaaattaaacaacttaaatatgatggcgtatctttaattattgctgacagttgtgcaaatgaatgtataggtttaggcattaaagttttagctttaaactgtaactttacatttaacgatatggttgaatttggtaaacaggacaaggtttacggtatttcagataacagtttttctggagattttgatttccttaatttcaaagctcagttaaaagaagaaggagttaacactattgtttttgaaagtgcaatgagttttgatcagtttaaaaagaattccgacggaatgattcctgttgttgttcaggactataagacagacaaggttttaatggttgcttatatgaacgaagaagcctttaatcttacaataaagactggaaagatgacatattttagcagaagtagaaatgaaatctgggttaaaggtgttacatcggggcattttcaatatgtaaaagaactttctatggactgcgaccttgatacaatgcttgcaaaagtatatcaggtaggagttccatgtcatacaggagctgatacatgtttctttaacactcttgttaagaaagaatacgatgaatctaatccaatgagagtttttgaagatgtatataatgtcattctagacagaaagaagaatccaaaggaaggttcatatactaactatcttttcgataagggaattgacaaaattcttaagaaagttggagaagaagctactgaaattgttattgcagcaaagaatcctgatcctcaggaagttaaatatgaaatttctgatttcttataccacgtaatggtattaatggcagaaaaaggagtttcatggaaagaaataacaaaagaactttcaagaagatagagatttgggtgttaaaacatcaatatattaattacaagaattttatattaaatcgggtaactacaggttgcccgatttctttcgttgaaaaaaagatttttgtatagtattattgtggataggactaaaatcaaaaaagatgtgtattatacatttatatataaattttgaaagggatatttaataaacaatatatgaaagaatctattaaaaaagttcaaaacgttggaataatttttgatatggatggaactctttgggattccactgaaaatataacaaaagcctggaatgaagtacttgttaagtacggatatggacagcttaaattaacagtagaacaggtttcaaaagagatgggtaagcttatgagagatattgctgattctctttttaaggacattcctgaaaatataagatatgaaatatttgaagaatgtttatcttacgaaaacgaatatctttttaaaaacggagccaatgtttacgatggagtagaagatgtttttaaagaattaaataagaaatataatgtttttattgtaagtaactgccaggaagggtatcttcgaacattccttgaatactatgatttcaacaagtatgtattagattatgaggaagccggcagaacaggtatgccaaaggatgaaaatatccgattagtaattaagcgtaatcacttagataaggctttttatgtaggtgatacattgggagacatggaatctgctgacaaggcaggaataccattcatccacgcagcttacggttttggtacagttcctgcagacagaatgaaaataaacaatataaaagaattgcctgaatttatagatgatttattgtcaaaagatactgacaactagtaatttaattttaaggagcataaatgagaaaattagcactatcagatgaaatattaatgaaaatagaaaagccggcaagatatataggtggcgaatttaatgctattgtaaaagaccataatgaagtagacacaacatttgcttttgttttcccagatgtttatgaagttggaatgtcacatcttggaatacagattttatatgatttattaaatagaagagatgatgtttgttgtgaaagagtatactcaccatggattgatttagataagattatgagagaacaaaacattcctttgttctcacttgaaacacagacacctgttaagaattttgattttctggcaattactcttcagtacgaaatgtgttacacaaacatattacaggtccttgatttgtcaggaatccctcttctttcaaaagacagaacagaagatgatcctattgtaatcggtggcgggccttgtacttacaatcctgagccaattgcagatttctttgacattttttatatcggtgaaggtgaaactgaatattatcaccttattgatttatatcaggaaaataagaaaaatggtggaacaaaaaaggaatttcttgaaatggttgcagaaattccttgtatgtatgttccggctttctacgatattgaatacaacgaagatggaacaattaaagaaatgaaacctaataacagtcacgcaaaaaagactgtaagaaagtcaattgttcttgattttgacagtgttccttaccctgacaagccattggttccatttattaaagttgtacaggacagatgtgttcttgaaatccagagaggatgtattagagagtgtcgtttctgtcaggcaggttcagtttataagcctttaagagaaaaaagccttgaaacattaaagaagcttgcaatagatatgttaaaagctacgggaaatgaagaaatatctttaagttcccttagtacaagcgactattcaaaaattaaggagcttattgatttcttaattgaagaatgtaaatcacgacacattaatatatcacttccatcccttagaattgatgctttttcattagatgtaatgagcaaggttcaggatgttaaaaaaagttcgattacttttgcccctgaggcaggtactcagcgtatgcgtaacgttataaataaaggtttaactgaagaagatattataaacggatgtacacaggcattttcagccggttggaataaagtaaaattatattttatgttaggtcagcctactgaaactaatgatgatgtagacggaataatggatttgtgcgaaaagattgctgaagtttattatgaaacagttccgaaagaacaaagaaaaggtaaatgccagattacagcaagctcttcattctttgttccaaagccttttactccatttcagtgggcgccaatgtgtgaagcacacacattccttgataaggctaaacgtgtaaatgacaaattaaaaactcttcttaataaaaagagtataagatataactggcatgaatcagacattagtgttcttgaaggacttttagcacgtggagacagaagactttctaagcttatattatcagtttatgaaaaaggcggtatttatgatgcctggtcagaatgttttaagaaagagttgtgggatggggcaattgccgaaaataatattgatgttgatttttatgttacaagagcgagaaacgatgacgaaatcttcccttgggactttatagatacaggtgttacaaagaaatttctgttaagagagtggcataatgcccagaacgaaaaggttacacctaactgtagaatgcaatgttcaggctgtggtgcagcaagctttggaggtggtatttgttatgaaaattagattaagattctcaaaacagggacagatgaagtttatcggccacttggatatggtaagatattttcagaaagtaatgcgtcgtagtgaagttgacgttgcctattcagaaggcttttcacctcaccagaaaatgtcttttgcagctcctttaagtgtaggtgttttaagccgtggggaatattttgacttggaagttaattcaacagaatcttctaaagttatgcttgaaagaattaacgcccaaaatgcagaaggtgtggaagttttaagttataagcttcttcctgacgacgcaaaaaatgccatgagtgtagttgcaggagctgattataaggtttacacagacctttttgatcagaatatgttagacgcttttatgaatcaggaccagattattgttttgaagaaaactaaaaaaagcgaaaaggaagtagatattaagcctttaatttataatattaagttggaagatgacggaatttttatgcaggtggcacaaggtagtgcttctaaccttaagcctgaccttgtaatggatgctttcgccaaatttgcacaggttacacttcctgaatatgtaacatatgaaagacttgatatgtattgttcggaagatgacaatcttgtttctttagacgatattggaggcaacattgagtaacaaattgattatttctgatttttataaaaacatattatttggtttttattttgaagacgacaaattacaaagattagtaaacttaaaaaatgacaatgttgttggaaatatatattgcggctacgtaaaagatgtagtcaaaaatattaacggtgcttttgtacttttcgatgacaacaaaaaagggtatctttccttaaaagactttaagaacccggttaagcagggagataaagttcttgttcaggtatcaggagataaaattaaaacaaaagattattcattaacttcacgaattaatcttaattcagaatgtcttgttttaactgttggcaatacaggcataagcgtttcaagaaagattaaggataaggacatccgcgaagaattaaaaagtactttaagtgttaaaaagaatgatgtatatggttttattataagaactaatgcattagacttttctaaggaggatattttaaaacaggctgatgatttaattaatcagttagaagatttaaaaaagcgatttgcttttgttactcctaaggctgcgttactgaaaaaagattatttgcaggatttaattagtgaatttaagaaacatggagaattgtcaattataactgatgtagtttacatttatgatacattaaaagaacataatgatatggttacatataatgacaattccaaaatcagtttgtgcaacaaatattctttagaaactcatttaaaccgccttttatctaagaaagtatggcttaaatcaggtgcttatctcataatagaacctacagaagccctaacggttattgatgttaataccggaaaggctgacttaaaaactaataaagaaagtacttttaaaaagataaatttagaagcggcaaaagagattgccctgcaaatgaaattacgaaatatatcgggtataatcatagttgactttattaatatgagtaataataaggattatgatattttaacccatgaaatgtcagaatatcttactaatgatttttctataagtaatgttgttgatattacaaaacttggtttaatggaattaacaagaaagaagaaagaaaaatctttagaggaaattgttaatgagaaaaaagatgataattaaaattataagttggataatatttattggattggtaattgcattaatagtaggtgcaataaacatttatatggttacaaccacatcaaaaagaattatttctgtagatgatgctaaggacataaatgctgattgcattattgttttaggcgcaggtgttaaacctacaggtaagccttcatggatgcttgaagacagaattattgtaggcgaacagttatacaatgttaatgcagctacaaagcttttaatgtcaggcgaccacggcagagagaattatgatgaagttaatacaatgaagaattatgccattaatgacggcataccttcagaagatatttttatggaccatgccggttttgaaacatacgattcaatgtacagagcaaagaaaatattcggtgctaagaaagtagttattgtttcacagaaatatcatttataccgttctctttacattgcaaaaaaaatgggcttagacgcatacggagtttcatcagaccttagatattattcaaaaaaacaatattatagagaagcgagggaatggcttgcaagagttaagtcgtttataaaatgtatcgcaaaaccggagcctaaatatttaggagattccattgatttaaaggcaagcggtgatgtgactaatgattaggagcagaatatatggataagaaatcaattggtgaattaagaagaagattaaaaaaagacagttgtacgttcacaaaaatatgtggttgttacgtagatgacaataagaataaagttacaaatcttgatgaaatatttatgaatcttgaagatgaagaatattacaagtacttggaaataggtaaaaaagttctttctactaatgttggaaataatattttagagcttaattttcctatcgaagaagaacagccgggaggtcatcagcaattcttaatgggacttaagaaaagtgccttaaaagatcagggcttagttgatactttctatgatatgattattgaaaaatatgattcacttggaaattatttaattttactttttcatgatgtttacgacgttatgacaaaaacatccgacaataataaattagatgaatcagaagaagtttatgaatacataatatgtgccatttgtccaatggttctgtcaaaaccgggacttggctacaacaaagacaaaaacagaatcagcacattaaaccgggaatggtttgttggaatgcctgaaacaggttttgttttccctgcatttattgatagaagcagtgatatccattctgtacttttatatacagccgattcaaagaatgttcatactgaaatgattgaagacattcttgggtgcagacagaagttaacacatgcccagcagcagaacgttttaaatgatatggttttggaagtaacaggagaagacaatattaaagaagtaatggaatcagtaaatattgagcttgcccaaatttcagaagatgaacctgaatcaactatttctaaaacacacattaaaagtgccttggaatatgccggcattcaggaaaacaaagccgaatctattggcgacaaatatatgacatctattaacaatgaggagattcctttgattggagatatcgttcctaataaagccgcaaaaattgtaaaagataataatgaaaagtatctccttaaagaagaaattaaagaattaaacagaaagattgccactataacagaagaacaaagtggtgaagaaccgggagaaagtgacattatcataaaagtcaactcagacaagaaagaattaatccgccaggaaacaatagacggacagccttgcgttgtaattccattaactgataatgataatgtaatgataaaataagattacctgattatataattgctaaacctctcacaatatgaacaataaaaagaattctatagattatttctaaaatatgaaaaaatttgtttgacaagagcaaatacctgtgatactatactatagtatgccgctcagtgtggttataagtactgcaatagcagtcaccgaaactggcgagtaatgagtaataggaggtgcccataatgtacgcaattatagcaacaggtggtaaacagtataaagttgaagaaggccagacaatcagagttgaaaagcttggtgttgaagctggaagcaagtttacttttgaccaggttcttttagttggcggtgatgacgttaaggttggtgaaccaacagttgacggagcaagcgttgaagctacagtagtaggtgatggcaaggctaagaaagttatcgtttacaagtataagagaaaaacaggttatcataaaaagaatggtcacagacagcagtacacagaagttaagattgacaagatcaacgcttaattgaaggtggttgtatgactaatataactttttataaaacaaataattcatttgttggtttcagagtttcaggacattccggatacgctgaagagggcagtgacattgtttgtgcagggatttcggttttgacaattaattttattaattccgttgattcttttacaaatgacaagttcattttaaatgagaatcctaataaggcattaattgaatttaagttcaagtcaaaatcatcagaacaatcccaactattatttaagtctttggccttagggttaaatgatttatatgaagaaaacagagattttatatcattagattataaggaggtatagctatgatgaagatgaaccttcagttcttcgctcataaaaaaggtatgggttctacaaagaacggtagagactcagaatcaaagagacttggtgctaaaagagcagacggacagtttgttaaggctggaaacattctttacagacagcgtggtacaaagattcaccctggtatcaatgtaggccgtggtggtgatgatacattatttgctacatcagatggtatcgttagattcgaaagaaagggcagagacaagaaacaggtttctgtatatccagtagctgaataatttaaacaagtaacaacaggcttcaagtcatttctgatttggagcctattcttttatataacagggataactcccattacagtttttaacccctaagaatggaggtattacatgtttgcagatttcgcaaaaatttatataaaatcaggaaaaggtggcgacggacatgtttcattccgtcgtgaattatacgttccaaatggcggtccaaacggtggtgacggtggaaaaggtggcgacattatttttcaggtagataaaggtttaaatacactttatgaatttagacataaccacaattacaaagcagaaccgggtcaggagggcggtaagcagaataaaacaggaaaaaacggtgaagaccttattataaaagttcccgaaggaacaattatcagagaagctgaaacaggaaagattgttgctgacatgagtggtgataatcagagagctgtagtcctaaaaggcggtcgtggcggaaagggtaaccaacattatgcaacagcaacaatgcaggttccaaaatatgcccagccgggacagaaagcaatggaacttaatgtaacattagaattaaagagtattgcagacgttggtcttgtaggatttcctaacgttggtaagtcaacacttttatctcgtgtaactaatgcagatcctaagattgccaactatcactttacaactttaaatcctaatcttggtgttgtagacttagacggcggtaaagggtttgttattgcagatattccgggacttattgaaggagcttctgaaggtgttggacttggtcacaagttcttaaagcacattgaaagaacaaaagttataattcacatgattgatgccgcttcagtagaaggacgtgatcctatagctgacattaaggcaatcaacaaagaattagaggcttataaccctgatcttttaaagagaccacaggttattgcagctaacaaaattgacgcaatttatggtgatactaacgaagttatcgatggcataaaaaaagagtttgagcctgatattaaggtatttccaatttcagcagttagtggtaaaggattaaaagaacttcttttctatgtaagaagtcttttagatgaattcggtgacgaacctgttgtttacgaacaggaatatgacccatttgaattccaggataatgaatcacttccatatactgttgaaaaagttgaagacggattatattctgttgaaggaccgagaattgagagaatgcttggttatactaatattgattcagaaaagggctttatgttcttccagaactttatgaagaacaacggtatccttgaagaattagaggaacttggaattgaagatggtgatacagtaaaaatttacggtcaccagtttgattactataaataatatagtttaataattggagaaaataaatgaatagtaaacaaagagcttatttaagaaagatttcagctatggaagctcctatttttcaggtaggtaagtcatctgttacacctgaacttacagcagccatagatgaagctttagaaaaaagagaacttatcaaattaagtgttttaaaaaactgttttgatgatccaagatcaattgcagaagttttagctgatagaacacattcatctgttgttcatgttattggaagaaaaattgtattatacagacctgcaaaagaagaaaagaatagaaaaataattcttccataaataatccatagacataaataggagacagttatgaaagtaggaattttaggtggtacttttgatccaatacacaatgctcatattgaaatagcaaaagctgcacttaaccagtttagccttgacaaggttatggtaatgccaacaccaaacccacctcacaaagacaagaataccattacatctaattttcatagaattaatatgattaagcttgcaattttgccatatgaaaatattgaattttcagactttgaaattaatatgcacgatgtaacttatacagcagatacattatatttgcttaacgaattaaatcctgacattgaatattattttattcttggcagcgattcaattatgtcttttttgagctggtacagacctgacattattttaaaatatgccaaacttcttacagttagaagagatgacgaaagctttgatttaatggattcaaaaatcaaagaaatagaagaaacctataacacaacaattggcataatcgatatgaaagccatggatatttcttcaggctttatcagaacccatagtcacgaagagattaaaaaagctgttccggaatcagtatataaatatattatcgataatgatttgtatactgatactaacgttaacagagcctggtccattaacaaaataacacaggatttggaaaaggaactaaagccttcaagatatactcatacattaaatgtggcaaaaacagcaaaaaatatggctgaggcatttaatgttaatcctaacaaagcttattttgcaggtattttacacgattgtgcaaagaatttcagcgaccaaaaacttttgcagatatgcaaggacaataatcttccaattaatgtattcgaagagagaaatccttctcttttgcacggaaaagtaggtgcttttatggcaaagaataaatatggcataactgatgaagaaatattatcagccataacatggcatacaacaggaaaagataatatgacagaccttgaaaaaatagtattttgtgcagattatattgagccgggcagaactaagcagccacatcttgaagaattaagaagcatagcattatcagaccttgatatgcttacatttaggattcttgaagatacagttgaatatttgaaagccaaatctttggattgtatagacgacaatactattacagcttataatttctataaaaaattaattgaggagagataaattatgacttcaaaagaacttgcaaagattgcatacaatgctcttgatgacaaaaagggtgtaaacattactattatagatatttctgaaatttctataatagcagattatttcataatcgctggcggaactaacgagaatcaggttaaggcattggcaggcaatgttgaagatgaatttgcaaaggccggtctttctccaaaacacgtagagggctatactaacgccaactggattcttattgattatgaagatgttattgttcacgtatttaatgaagatgacagacttttctatgatttggaaagaatctggcgtgacggaaaaatcgtaaatgtagaagaactataaagataaattttaacaaaatggaaatcttaaattaggcatttgtctttttgtaagatttcctttttgcgcattataaaacaaaaggaggctggaatatgtgggcatatgaaagtgttttttatcagatatatccattaggattctgtggtgcaccatttgaaaatgacggtgttttggaacatagaatcactaaaatagctgactggattccacacattaagaaattaggagcaaacgcaatttatttctcaccattgttcgaatctgacactcacggatataacacaagagattacaaaaagattgatgtaagattaggcgataatgaggattttaagaatctttgtaaggatttacacaacaacggcataaaagttgttgtagacggcgttttcaatcacgtgggacgtggttttcctcaatttcaggatgtatgtgccaatagagagaactctaaatatcttcattggtttaatattgacttaaatggcaattctaactacaatgacggactttggtatgaaggttgggaaggcaattacgaccttgtaaaacttaacctttataacccggaagttgtagattaccttttggatgcagaaagtttctggattaatgaatttgacattgacggaataagacttgatgtagcttattgccttgattttgaatttttaaaacgtttaagacgtcacacagactcacttaaaaaagattttttccttgtgggagaaatgcttcacggcgattacaatcagagaatgaatgacgaaatgttacattctgcaaccaactatgaatgttacaagggactttattcaagttttaattcaatgaatatgtttgaaattaatcattcattacttcgtcagtttggtcctgaaaactggactttatacaaaggcaaacatttattgtgttttgttgataatcacgatgttacaagagttgcaagtattctgactaacgaaaatcacttacctttaatctacgcattattatttggaatgccgggcataccttgtgtatattacggaagtgaatggggggcaaaagctgataagagtcagggggatccggctcttagaccttcttttaaagaaccggaatttaatgaattaagcgaatttatctctaagcttgcagatataaagaagaactctaaagcattaaattacggagattttacatcaactgttttaaccaacaaacagtgtgtgtttagaagaagtactggtgatgaaacagtatatgtggcaatcaatgctgatgaccaggaatatacagcttattttggagcagaaaaaaatcaggttacagatttgctttcaggtgctataatgaatcttgatggcggtttaaaaatggctccatacagtgcttattttttagcataaaaatagattacaatatatgaaaggaagtatagatatggaaaagaaattagtgccggttacattacttacaggttatttaggtgccggaaaaacaacattacttaatcaggttttatcaaaccaaaaaggatataaagttgcagttatcgttaacgatatcggtgaagtaaacattgatgcttcacttattgaaaaaggtggacaggttactcagaaagatgacaatcttgtacctcttcagaacggatgtatctgctgtactttaaaggttgatttaatcaatcagattattgaccttattggtacaggaaagtttgactacatccttattgaagcaagtggtatctgcgaacctattccaattgcacagtcaattacaatgttagacggttcatatgacaagaaagctcagattgcaagacttgacaacattgtttcagttgttgacgttgcaagaatggctgatgaatttggttgtggcgaaaaccttgtaaaagacgatattgatgatgaagatattgaaaaccttattattcagcagattgaattttgtaatacaattattcttaacaaagttgatacagttacacctgaacagcttggaaaagttaaggctattatcagaaaacttcagcctgaagctgttatgtttgaaacaaactacggtcagattgatgtagatgaaatcttaaacactaacagatttgattttgaaaaatcaagcatgtcagcaggttggattcacgaattagaagaagcagacttagacgaagatgatgatcacgacgaacaccatcatgatgaacacgaacaccatcatgatgaacacgaacaccatcatgaacataatgaagaccatgaccacgatcatgaacatcacgaccacgacgatcacgatgaacatgaacatcacggacatcatcaccaccatcaccatcacggagaaggtgaaacagaagaatatggtatcggctcatttgtatactatagaagaagaccttttgccaaagagaaattcgaagattggcttgatgaaatgccaaagggcattattagaagtaagggtattatctgggctgctgaaaacaacaatgatgcttacatgtttgaacaggcaggaaagcagataaacattgcaaatgcaggacagtgggttgctacagctcctagaagagttcgtgcaaagatgatgaaagaagatcctacattagttgaggattgggatgaaaaagtaggcgacagaatgattaaagtagtatttattggccacgatatggacaaggaagctattattaaatcattagatgattgcttagcttactaataaatatattctaataatatatacattttttaagcttgattttgggacagtgttcaaaaattcggatactgtccctgttttatgtaatgtacacgctttatgatatgtcataaagttaaagtaggaggcaaaaactaaaactatgaaggaaaatataaaagaaaatgtaaaagaaaataagaaaactaatacaaaagcacaaaatgacttaagcttattgtttaagtacagaaaatttttaatggggtttgctgcattatggattttaatgactcacgaatggcaaatcgtaactaatgagacaagctttttctttgtaaccgaaaactttataaaaagaatcggtttctgcggtgtagacatctttttattactatcaggaatgggattatattattcccttgaaaaaaattcagtttcaagattttattataacagactaaaaagagttatctttccatttataattatggcaagtattgtatcccagattgaccattggaccaatgagttttattttaatgtcataacaggaataggcttttataaaacatatatttatttgttcttatggttcgttcctgcagttataacattatatttatttacacctgttttttataatttttttaaaaaagcagaaaataaatatttattctttgccggattcatagaactttggttactgttttcacttatggcaagaaatgttatgagagaagatttatacggtttcaccaaccgcattccaatatttgtaacaggattccttattggatatttgtgcaaagagaaagccataaaaataacacatagaaattggttttttatccttttaacattcatattgggtatgtatttagcatatcagagcaactttaagggattagggcttattttgccagtatctaactgttgcattcctaattatctaatttcaatatcattacctttattaatggcaaaggtattagataagctacatagcattaggggacttgccattatcggaaaaggacttaataaactaatagggttctggggaatgatgagttttgaattttattgtgttcaggaatggattgctacaaaaatcctacctgacctgttaaaaggtggcgacaagcttttggctaacgtgaaactgcttattattgtttcaatatgcggacttgcactatacctgattaataaggcaattgtttggatattggatttgatagaccgtttaacttctaatattggtaaaaataagatggtagataattaatctctatttggattaaatagcagtagtactaataatttattttaagcaaaaaaacaacctatatttcaactattctgattgattcagttcgtagccaaatataggttgttttctaattaatagtacaatcgaacactgtgttcgacatcatatattgttatatattcttctatataattcttctgtaaagacttctgacaataccaactattgcacagtcatctactataataggttccattaagtcattctcaggctgtagtctaatgtgtccgtcttctttgaaaaatctcttaaccgtaacagaatcatctattaatgccacaactatctctccattgtcagcctgagcagccttttcaattattaaatagtcgccctcataaaagccaacgttaatcatgctttctccctgtaccttaagaataaaaacttctccattaggtaaaaactctgtaggtaatgcaaaatagtcttcaatattctcaactgcaagtaaaggtgcacctgcagcaactcttccaataataggaatattagtcatttcacgtcttacaagaccaaattcatcatccatgatttcaatagctctaggcttagtaggatctcttcttatgtatccgttattctccaaagttgaaagatgagagtgaacagaagaagtagactttaaacctaccttctcacatatttctcgaacagttggtgggtaaccctttgataaaatttcttccttaatataatccaaaatctgttgttgtttaggtgtaatctttcctggcatataatcgtcctccaatatctatatatttaaacctcaaaaaatttcaaaataaattcctaagactttaataaaaactcacaataattctttctgtctgaataatataatatgaatttctaaaaaaatcttaaattaaagttctaagtactgaatatggtacttaatatatactaatattaccatatcagcaaaaataaagcaatgaatttttcgaatatttgttcgaaaaagttcttgacaaacatttgttcggatgatattataaccatatcagacagcaaacatttgttcttatagctatttaatacataataaatcttacagttttcagtagcttgaatatctatagaacaattattcaattatatttaatttaacaatttggaggtacatacaatgaagaagtcaggaaatactaagtcagagaagaaattagtctacggagcaattatcacatttttattagcagttgcagtattctcatccattaagcttactaaagtggacgcaatgaatggcaaggaatatgctaagtataaatattacacaagctaccaggttcagcccggtgatacattaacagctattgctcaggagcatattaaggattctaatgtaagcacatcagattatatagatgaagtaatgaagaacaacaagctttcagacgacaaaataacatcaggaaagaaacttattattgcatattattcttacgagaagaaataatatataaagaataccagaatcgaacactgtgttctattaaaagaaaagaatggactttgtttagagaatccattcttttttacataatattctattgtataagcttttgaaaacaccgttaagcagtcttaatctttccttagctttacagcattacgtgccttacgtcttcgttcatcttcaatggcagcataatgctttttagtagtatttacatctttgtgtcccaaaatgtcggctacaaggtatatatcgcctgtttccttgtaaagagcagtaccatatgtactacgaagtttatgaggggtgattttttttaagtttgtaacaagagatgaatatttctttacaagattttccacggcacgtacaccgatacgtcttttctgaagagatagaaatagtgcattttcatgtccattctgtggaactattaattttctctcttccaaataatcaagtaaagcattttcaacttcctctccgaaatagattacagtttcattaccaccttttcgtctaatctttatgccactgtttttaaagtcaatatcattaatatctatgccaacacattcagaaacacgcattccagtacccagtagaagggttaaaatcgccatatcccttgtttttgttttgtcatggaatttctgctgggacttagttaatttatcgcctaattccacctgatcaagaagaacgcttacctcatctgcatccaatcttacaatttctttttcgtgtattttaggcatatccacaatagaagcaggattagtcttaatactttctttcttgtagaaatatctatacaatgttcttagacaggcaagctttcgcataattccacgttcaccattagtatgttctttgccatcttccgtaacatagtatcttaaatattcgagatattcttcaatgtcagttgctgtaattttatcaagtaattctataggataatccacaacaggaacattagtcatttcaggattagaagattttatataattaaaaaatactataagatcataacaataagctattcttgttctggatgaagtagtaggctcaacaccacggaaaaactctgcgcagaactttggtagctgtttttgaagttctctaagctttatttgattgtcaactattacctggtcatgataatttctatttcctgccataacttaaatccctccttttaatttttttaataatgtctttacaattttagcatctataatttttcttgtatatttattatttataataaatatggctggtttctaactttaatcaaagcccttatttaaaacagctctaaagaatctttctttacagccgggattttctttattaagttgtttaacaatatttttaacatattcccttttagtgtggccgtctacaggacatttgctcttagccacaggcagttcgtattttttagtgaaaccgataacgtcagcttccggaacatacattaaaggtctgataactgttaattccattttatcaagatatgtaacaggagagaagcagtggaaccttccctcataaataagagaaagaaacattgtttcaatcatatcatccttatggtgagcatatgcaatcttgttgcagccaatacttttggcaaaatcatttaatgcaccttttcgcattttcgcacaaagagagcaaggattagattcctgtctttcattaaaaacaacattagcaatttcagtttttacaacataatattcaatgtccatgtcattacaatatttttctatttttgaaaagtcctgaatgccaaagtccaagtcaactgtaattgctacaacatcaaactttttaggataaaatctctttaaaccgtttaatgcatataatagagttaaactgtcttttcctccggaaataccaacagcaattttgtctccgtcatttatcatattgtagtcatctgtagcacgtctaacgtaactaaataaacgttgtgccttcataattggcacctccttattattaattttttcaaagtaatagtagattttgtaatatctaactattcgcaaaagacaagtttaacgaataactatttaaagaatcttcaataaatgttccatatattcaggaattggtgcttcaaactctacatattccttagttgttggatgtataaaacctattgttttggcatgtaggcattgtccttcaagtttaaacggacatttgttatgattataaaccgtgtctccaagcaacggatgatgtatgcttgccatatgaactctaatctgatgagttcgacctgtttctaattgaaactccataaatgtatatttatcgaaacgtttaagcaccttataatgtgtaactgcctctttaccgtttttatgattaattgccatttctttgcggttaaccggatgtctgcctattggtgcattaattgtacctgattcatcctttacaacaccctgaacaatcccaacgtattttcttgttattgaatgtactttaagctgttcggcgataaaattgtggctgtaatcgtttttacatattattaaagctcctgtggtatctttatcaattcgatgaacaattcccggtcttaaaacaccgttaatattagataaatgattcttgcaatgatacattaatccgttaaccaatgttcctgtataatgtcctggagccggatgaacaaccatatccttaggtttatttacaattagaaaatcatcatcttcataaataatgtccaatggtatattttccgcaacaatattagcctcaaccggtttaggtatattaatattaattttatcgcttggctgaaccttataattagcctttaccggcttatcatttaataatatttcattatcttttaataatttctgaataaaacttcttgatacatccggtaataattcacttaaatacctgtcaattcttatatcaaaaagctcttcgtctactataaacaaattattcataaatgtgttttccttattaatttaatagtttgaatttcaaaatattaaatattttctttgtattaattttaataattcttttttattgtgaaaatcttattaaaatcttcttcttttaattttaacaggcacataactacgattaaaacgcatgaaactgtaacatagcagtctgccacattaaaaattgggaaatcaataaactcaaaacaaataaagtcaactacagaaccgttaaccactctatcaattaagtttcctactgctcctgccattaacattccaaatgtatactggagaaccattaatgtagcactcttgccttcattgcacattattcctgtaatgtttcgtataaaaatgcttataattacaattgcaattattgttataattacaaacataagaattttgcctgaaaaaattccccaggcagctcctttgttaccaccttcgagataattaaaggacagtacaccttttataacaatatattttgattttcccattaaattagctgttgccacaaacttgcttatctggtccaatataaccaaaataaccacaaaagcaatcatctttagatataataaagtcttttttttcatagttaatttaacctcttattactgtttctgttgcttccaaaagtaattcttcactaatagttctgtcaattattgcatgaccattttcctcaagggtgataaacttaattacacctgagtccatttttttgtcatttttagtagctttaaccacgtcagaagctaatattcctgttgtatatacaggtaatttaaagtcagaaataacattattaatttcattatattctttctctgcaatatttcccttctttaaagaaatatatgttgcggcagccataccaatggcaacacattcaccgtgtaaaaggctaaaattctttgccttttcaactgcatggccaattgtgtgaccgaaattaagaacagctctttcacctttttctttaggatcattttcaacaactacacgcttaatgttacaacttacaaaaatcattttcttaactgtttcgtaatctcttgaaataattttgtctttattttccttaagccaatagaaatattccttatctcttattaaaccgtgttttattatttctcccataccttcaagatattctctttcaggcaatgaattaagagttgaaagattcatatatacaagttttggcatatagaaagctccaaccatattcttgtaagctttaaaatcaacgcctgtttttccaccaatacttgaatcaacctgagataataaagtagttggaatctgaacaaaatcaatgcctcttaaatatgtagctgcagcaaagcctgttatatcaccagtaacccctccgcctaaagctaaaagcatatcgtttctgtcaaacttatttacaattaacgtttcaaaaatatcttcaacagttcccacgtgcttattttcttcaccggctctaaattcgtgaattataatctttttacacaaaggctcaagtgcattctttaacttttctgcatataaaggacccacatttgactctgttacaatacataatttcttattttcaatattaaatttctttaattcgttaccgatttctgaaaaatcctttgaaaaaactatgtcataacaaggctctccctcatagtttactgttattctgtctgataaattctctagtgccttaatcatttttctgacaatccgacaatctgaatatcggatgtacctccttttatatattttaatatattattttttaaaatttattctttatatcgtttctaaatgtacaacttaatggaaattaaatttctgcctttctttgtcactccaagttgtccttcaaaaataaatctgccttttcccctaacggaaataatatcattaggttttggctggtgtccgttagatgtaaccatcttaccattaataaagacctttcctgactctataaaagatataatgctgcttctggatgttccaaaagctgttgcaataaggctgtcaagcctaatatttgaaatagtgcctttaataattttaaattcaggtgtaatattaacagcttccatatccttaactgtacacttaacaattgtatgtttgattttctttaaattttcagcaatgtagccacttatatcatccatgcaataaacatatgcctgattatcttttaagaaaatatcacctattttatttcgaacaatgcctaaatttaaaatagcacctaatacatccctatgtgagagtttatcagcataatgggaattaattggtgcaatttctataagctttattggtaaatcctgagtataataaatatcctcaggtgaaaatactgcaattcttctttctgcataatcattacctcctgctaattctacattaacaggaggtaactgattcttataagaatttaatatactaatttcatttaaattcaaaaagtctgtatatgtatatatattgcggttataagatgaattagccaagtctgaaaatctgttttttaaaaaactttcttccttatccatattaaatccaccctagctttaataatttcttcttgaatatgctgtagatgaataatctgatgaatcatgaactaaatcctgaaaatcacctgttatgtctacagaatgaggtgttacaagataaatatatccgcttatcttctgaagatttccctgaattgcataacatccgcctgaaactgaatcaacaatacgctgtgcaaggtctaacttcattccttctaaatttaatacaacagactttccttctaaaagagtatcaataatgtctcttgtattctcataatatgaaggcttaatcacacaaacttccatctcgctactgtttttcattggaacaaccttgtgatttcttgaacttcttgaattcttgacagctctggctgtggcacgtgtttttacatgcggagccggttcttcctcatgctcagcagtaacttcatcatagtcatctataatgtcgtcatcacttcttgtagcagcccttcttgctgaaaaacgttcagatctgctctttgttgcacgttcctttttctcaggcttttcaggctctaaatccatatcgtcgtcttcataatcgtcataataatcctcatcgtaatcatcataatcaactgtgaaaacattctttattctatctgtaaattttgacatgttattctcctaaatactatatattataatttctttcaccaaatattcctgtaccgactcttaccattgtagccccctcttctacagctacctgatagtctccggtcattcccattgaaagaacattcatattaacattatcaatgtttttattgtttatgtcaaccgataatttcttcatatttttaaaatataccctgtttgtttcaggattgtcagtaaatggtgcaatagtcattaatccctgtattcttacgtgtggtaattttgcaatttcacggattaattcttctgtttcctgtgaagtaattccgaatttgctttcttcctgtgccatatttacttcaattaaaacattagcaatttcatcagcttttgcaaactctttttcaatctgttctgccaatcttaaagaatcaaccgaatgaattaattgaacttttccaacaagatatttaaccttatttctctgaagatgtccaatcatatgccatctgatatttttaggtaaaatatcgaacttatcacaaagttcctgtactttattttcaccatagtccaaaatgcctgaaggtaacgcttcttcaattacagtgtaaggttttgttttgcttactgcaattagtgtaacttcttcaggatttcttcctaccttttcacatgcctgttttatgttttcttcaacctgttttatgttttctactatcataagtatgcctcctatttattgaaaaataatctgattttcagaaactgttgaaccatctaaaacaatcctgtcataaagagacaatccatatatgtctccctgtttaacaatataatattcgtcagtgctttctaatatattaactctgacaaaaacggtataaccattatttatattatatacacctacaaaatcctgtgtttttccaataatatattgttcgcttgaatcaattgccgttaatacatctccgttttcaaaaagtgctgtggaaacataataattatctttatcagaataagcaattgtagggtaataaaactcgttagttatctttccttctaccttaacctgtctgttaaaaccaatcttatcggaatttccaccttcagcaccgtaagatttaggaataacatacaaactcttggaaacaagtgaggttttcggtatttttaaacctttagatacatcatcaataatctgaatattaacaaatctgtctgtaacatatctgatcatatattttgacagtgtaattattccataatatttcctgtcctgaccttttacaactttaatattggctgttgtggtaagaccgtcttttaagaattttatttttacaccgttaactttcttatatttctttgcttctttcttcgtaaactgaacagcaatactccattcttcatcactaactgttttataaataggattacctttttcagtttttattcccgaagaaaatttaacatcaacataagaatttttgtcaaataaacttgcctttaaattctttggttttaaattttcgtagttgtcaattctatataatacaatgcctgttgaggctgaattgttaattgaaaaggtgttcccctcctccttggcaatattttccaaagagttcatattaataaggtcaacaactgttccctttaaacttgttttgaaattgtatatttcagaataattcatttcatcgtaattattacaataatctgaaattaatcctgcaagtgtatctatattatcactgcttaatttaggattcttcttgcttgcctcacttaaaagagtattaagctctcctgtggaatctatgctgtaaagagtagtatttaaagatactctggaaccttctcttacataataatctatatatccggaatcctgggcactctgtacaatctcgttccttatggctattccattatatgaaacattggcctcctgtgcatttgagcctgaaataacttcataaaaagcagttcgttctgttgtaaaataaataacaatatttataagcagataaattgaaataagtccaaatataactatgcccgcatttaaattaatatgggatttatatctgacaacccttttgttctttttcttcatataacatgctccttaaacctaaccttaattatcttataatttaaatggttagtcaatattttctgccgtttttaatagttttttagtggattttctaattagtttttcaattgttttattaaattttagttttatgtatttttttatcaattgtggtaaaaatactaaaagaacatataatcataggaggtaataaaatgaaatccaaatgttttgattatacaatgttaacccttgtaattattggtgcaataaactgggggctgattggattttttaaattcgatcttgtggcttttctatttggacagatgacttggctttcaagagtaatatatgccattataggactatgtggcttgtatcttattagtctttttggcagaatttctgcttttggagaggaataagattcctcgacacaaagaggtattaatctaatgaaatgattattagattaatacctcttttatattttaatgacttattttctatttaagcataggaattagccacgatatatttcacgccattccaaatcgcctctgtcaagtgacttaattaataattcagctgtagcaacatttgttgcaagtggaatattgtgcatgtcacataactgtacagccttgtgaacatcaggttcatggtgcttcggattaagtggatctcttaagaaaataagtaaatccaactgattttgttcaatctgcgaagccatctgttgttccccacctaaatgtcctgcaagatatttatacacagataaatttgcagcttcttcaattaatcttcctgtagtacctgttgcatatagtgtgtgtttacacaaaattcccctatacgcaatacaaaaattctgcattaatttcttctttgaatcatgtgcaattaatccaatattcataaatctcctcctatctatacaagtgctttatttctctgtaatcctatgttaagtacaattcctattccgcagtacatacttactaatgatgtcaatccataacttacaaaaggcaatggtaaacctgtatttggtaaaatcatagttgtaactgctatgttaacaaatgattgcactcccaaaagtacaccaaatccgaaacaaaacagccttccatgcagtgtcggtgccctggaaccggtaataaaacattcaacaactatggcaaataacaataatattacagccgcagctcccacaaatcctaactcttcacctacaattgcgaagataaagtcggtatgtgattcaggaagaaaattgccttcttttacagaaagaacatttccattgtcattaaaacccttaccagttaagccccctgagccaatggcaagaatagagttctcctgttgccatttatcatccttagatgactgggaatcactgtccttatttaaaaagctttcgattctctgatactggtaatctgccaaaataccactacttggctgtaaaactatatatcccactactaatactatcggaattgctgttaccaacactcctgtaataatcttataatgaacacccgatagaaacattatagcacaaaaagttataaaaataactattgttgttgataaatccggctgtttatatataaagcctataggaattattgagaaaactacaaccgtagctaacgttttaaaggtgtttaaagtttcctgatgtttgtaaatatacgttgccataaaaataatcagaaatatttttgccagttccgatggctgaaattgagtaaaacctaaatcaatccatctttttgctccaaggtttgtttcaccaaatagcataaccaataataggaaaaatatcattactccatatataacccagtaaaatttaaatacaaacttgtaacttataagcgtgaatgttgtaagcactaccaaacttaatactaaacctataatctgtttaagctgatagccttcagcctcggctgcattacctattgcatatattccaactgcagttacagcaagaacatatataaataatctaaaattaaaattggataatttgtaatttttcataaaattaatggctttttttaacatttatgtttttcctcttttttgcatatttcacatttttagcatttaatctctttgattggaatgcttgccataaggcaaggccctgattcctgtcttatttctacaatacaattttcaacatcaatatcaatatactttgaaatagtattaataatatcattttttattgattctgttgtattggggttgcatcctattctatctgttacaagaagaatctgcaatctttctcttgcaattcttccagatcttcttcttttaaataattttctaaaaatcattttatctcccccctgctgaatatgtttctaaaaaacagaagagaaaatcttctttcgtccttgtccatataaatcttttcccctgttaacttttctgctatgtgggttaaggactttcctgttgatgtattctggtctactaaagcttcacctctgttagttgcaattaccacattaacgtcatcattaatacaaccgataatttcagaacccaatatttctgaaacatcttccgaagacatcatatctccctttttaactaaatcaggtctaagcttatttacaagcaggtatattgaagccataccgtctttttcaagtaaacctattattctgtctgcatcccttattgcagaaacttcaggtgtagttacaaccacagccgttgttgcggcggcaattgcatttctaaatccctgttctattcctgcaggacagtcaataagaatataatcatactgtgtttttaacttttccacaagattcaccatttggttaggattaatggcatccttatccttagactgggcacttggaagaaggtaaagattactatgttttctgtcctttataatcgcctgatgtaatctgcaattaccttctataacatcaacaatattgtaaattatgtgattttcaagtcccatgacaacatctaagtttctaagaccaatatcagtatcaattgcaataactttcttccctaattttgaaagtgcaatgcttaagtttgcggttatggttgtttttccaacaccacccttgcctgatgtaacaacaattacttcactcatttttccctcctaaaatattaatgattattatctttagtattttcagtcaggaatgaccggttagtcttgagttgtgttcttaatatcctgcttttgtacatccttatttaaatctttatcttttaattcaccataataatactgaatcacattttttgcaagctcagcagaatcatgtgacgaattgccaaaaggaattacggcaactacaccaagtttaggtttattgtaaggtgcatatgccacaaataatgaatgagagtttctgtgtaagttttcctgagctgtaccggattttccggcaatcttaatctttgtgtcagtaaaatacttacgtaccgttccaactgtaactacttctctcatacctgtatgaatggcatcccatgtactacttgaagctttaactgtattagttaattctgctttcttcttgtatactgttttgccatctttatctacaactttatttattaatgtaaggctgtaattctttccaccgttggctattgtagaaacatatcttgcaagctgcaccggtgtatatgcattactgccctgtccaatagcggaatgaatagcactttctgtcgaaaaatgtggttctctttctgtgatttctacacctgacttcatattaagaccaagctttgttgcatatggttcaatctttttaagtcctgttgcactgtcatattttccatttactgttccaagtctgtaacccatttcgtaaaagaaatagttacatgaatctgcaatggcattcataacattttcagcgccatgtgctgacggataaatccaacacttaggtgaaggtgttactttttcaaacttgcctttatcaactactgtttcatactgacctaccacatcgttttccatagctgccatagtcgttgtcatcttgaaagttgaacccggggctgttgcaccttgtgtggccctgttatataaaggatctgactgatcctcaaccagttgctgccagtaatcaggatcaactgtacctgaaagcatgttgttatcataacttgggtatgttacaagagctcttatctgtccgttattaggatcagttacaacaattgtgcctgaacacggatcaagtgcaatctgagcaggtgtaatattcagctttttaatctgtttaataatgaaactataattatatgttgaattatatgtctgtaactggctgtacgcctgttcatcttcctgtaaaatattttgatcaaacagaagcattaatatttcgctactgtgaattgtgccgtcatatattctgtaatacataactttcttaccaaaagaagtgttactactcatatcttcaactatataatcctttaaaagattataagtttcatctgcagacaaataagcgtcgcttacatgaagtccttcaatattaatccaattcttctttattgaatatttaataaactcatttatgcttatttttccatcaacatagttattatatgttttatcctttgtatcaatagatgatgtaagaagtattccatcattctttaaaaggtcataaatataatcatagtattcctgatactctttgcttgcatcattgtatactttgcctttgtcagaatttaactgggacttaataaccttcacaacatctgatactgcttttttatattctttatttactttcttttcattagctgtagctgacttccttgaaagtttcttaagacttacaacattgttagccacaagctgtgaataaactttcttaacaggaatgtaatgaatgtcatcgtctgtttcggcatcttcattaacatcataattaactatttcagaaataagaattgaagcaatcttcttttccaaaagtttatatgttgctttctgaagtttgctgtctattgtcagatatacatcattaccttccgtggaatctttctcagacactgtactaagcaccttacctgtactatctatgaaaactttctgttccccacgggttccctgaagataatcttcataagcagactctaaaccagccttaccaacaacatcgctactaatatagttttttccctgagcattaaattcttcaagctgagtttcagaaattgttcctgtatatccaagaattggtgcatagtacaggctgtcattatattttctaatgttctgttcttcagccttaacaccttttaatgtggaagcgttttcctgaattgcaaccattgtttcctttgaaacatcctgagcaactgtcgttgttatatatttctgcccggaatgcagataaatgttataacggattgagatgatttttaaaagtttatcattatccacatcacctgtaacttcaaagaactgattttttaaatagttcatcatttccggagctgttgcattagtatagtctacatccttaactttgcagtcattacttgtaacattctttttaaaacgaagtattcctgcttcggaggtaatattgtattcccatttgccatcctttgtaagacttattggaaaatcaacagtaaccttgtcaccatatttttcaataatatcgatggtctgacttacaatgtcattaagctgggaattttttgtatctgaactgtcaattttatcttcaatagtaactgcataagacaaagcatcatatgccaatactttaccgcttttgtcaagaatttttcctcttgttcctgatttgtatattgttttctctgttttctgaatataggtactcatatagtaattctcgtttataatctgtaaatcgaacactctatataaaagtacggcaaacagccctattataaatagacttacaataaaaattcttgattttataattttagatatcgtataaaaaaaatcacttatcaaaactaaacctattctcctgtttttctctcaatattttttcatctaataaacaaaatagtttatagaaaattagtgttagaaatgttgtaaaaatcatttctggtaaaattactttttcaaaataatatgaaaagtctaacttatttctcagtaaaaatctaaacacataatatgcaagattatataaaaaatcgtttacaaatactacaagcattggcataaatatatggtcactatataatatcttcttaaagacaccacttataaatcctatatacatgtatataagtgcaaacaatcctattacatctccaaaagccacgtctaccaaaagaccgcagaacaatcctgtaacacttccatagtttgacccctttatgaatccaaatatgcttgttacaattaatagtagattaggtactacaaaagactgtccgctgactaatgacaaatagctttgaagaacaaatgatacaataataattgcacctgtaattacaatgttcaatactctacgtttcatatttagtccttcaaactttctttaagctgttttataacaagtacctcgtttatatgtttaaagtcaactacaggtattaaagttcctgactttgtaagtcctgtagaatcctttgatactgattttacataaccaataagtattccgggaagaaacttatcacttatttgtgatgtaacaaccatgtctcctgctgaaacttcagcattaatgtcaattccggtaatattaattagcccctcatcaatcttcttcaagtcaccacttacaatggctgagtcagaagtatttgcaaatgaagcactaacaccactttcatcatcaattatggctctaaccttagcatagttacgccctacatcggaaactataccaacaaggccaccaccacttataacattcataccctcctgtattccatcagaagaacctttatcaattgtgaaaatattaaaataattacctgtgtcttttccaataacagaagcagccacttttttatactttgaatattcattatcaagattgtataactcttccaatctgtctaacttgtacttattctgtgccaaaagactgttttcttctgttaattcgtctaccttttcatttaattttttattttcacttttaagtttctttactgacttcattaattcttccttgtcagtaaaccatgtgccgattctgtttacaccttcctgcaaaggaactaccataattcccgtagcaaacttaaaaggctttgaaaatgacggaacaatggccgacaaaattaagcatacaacacataataatgttaaaagtgatattaaaatttttggttttactttaaagttagatggttttttcataatcaatcatatcctttatattttatctttctagaatgaactctgttttggctcatacattaacttcttatactgtgagtctgatacaattaaggaaattcctcttataactgacgcttcaggattcttaactgtattaacctttaagtcagtttcctgtgcaataagcttgtctaaatttctaattgatgctgagcctcctgttaagtacattcctgtttcaagtatatcagctgaaagttcaggtggtgttctttccaatatagtctttatggaatcaaccatctcatcaaaaaacggtttaattgcctcgcaaattgtatcctttgcaacagctctttcagatggaagtcctgtaataacatttcttccaaaaacatataaaatatcatcttcgttattttcatcttctgaataaatagcatcagccaacgcaatctttatcttttcagctgtccttaatccaatatatatgttgtatcttctttttacaacatcacaaatcatctggtcaatattgtttccacctaatttaattattctgctgacaacaatacctcccattgaaataacggaaatctcagttgtatctgcccctatgtttactataagatttcccttctggctgttcatgtctatctgtaatcctactgcatctgcaataggcttttcaacaatttttatttcgcgtgctttaatgtcagactttgcgaccacatcgtaaaaagctcttttttcaacttctgtaatgtctgtaggtactgcaatacaaaatcttcccatcttgctaccgcttgccttagttatcttcttataaaagctttcaaacaaaagcttcatattctttaaatctgctataactccatacttaattggaaaaataatgttaatgttaggtggtgttttttcatacattttcaatgcctcatcaccaaactcaaataattgtgttttattctttatagctattatgtctttttctgttattactgttttggttaaaccattgtaaatttttatggtgcttgtaccaaaatcaattccaaaaacactacgactcataatctgtcctttcattttaagaagctatttcataagttttaattctcttagacttgaataacttctgtcccctattataatgtgatctaaaacgttaattcctataattttgcctgctttactaattgctaatgtgcttgccatgtcatctctgcttggagtacagtctccacttggatgattatgtataagtataatattcacagcatcacatcttaaagcctcaacaaaaatctcccttgacgaaataagggactgattaactgttcctttagttattgtcatatccttaattaaatggcatttagtatccaaaaacattacaacaagattctcctgctctaaatgtcttagctgttccatataataatctgcaattgttgaaggaatattatattggatagaatcctttgcctttactgatgatatgcgtcttacaagttcccttacacacataatctgaactgccttaaccatgccaactcccttaatactcagaagttgttcctttgtcatatgcattattgacagcaaatcctgtttaccattttgagatttgtgtgacaaaatatctttggataagtcaaatgaactgatgccatttgttcctgttctcaaaattactgcaagtaactccacgtcagttaaatattcaggacctttttcaaaacacttctcataaggtctgtcattaaccggtaaatcttttatattgttcatatgcctccattccttctctccaaatacaaggcacccatatatattagcacaataaaaaagttgtgtatacgttttttacaataaaagacagttaattcaaaaatgttactttaatgtaattaatccgtcatcaaccatattctggaaagcttttagtattccaagttttgcgtgatgccatgtcaaaccgccctggaaatacactgcgtatggtggtttaataggtccatctgcactaagttcaattgatgagcctgacacaaaagcacctgctgccataattaccggtgcatcatatcccggcatatcccaaggttcaggggtaagatagctgtcaacaggggccgctgcctgaattcccttgcaaaaagcaattacgcaatcaggatttccaaattcaattgcctgaataatatcgtgtcttgactcttttccgtcaggaatgacattaaaattaaacttttcaaataagtttgcagcaaatattgcacccttcaaagctgatgcaactacatttggtgcaaggaaaagtccctgataaaatgaactcattacaccgaggtttgctccaacttcttttccaagtcccggtgttgtaagtctatatgaacaattttcaatacactgttttgttccacaaatatatccaccaataggagcaagcccgccacccggattttttataagagagcccacaatcatgtctgctccaacatctgatggctctatttcttctacaaattctccataacagttatctaccataacaataatgtttggattaatttctttaacagctttaattgcctgacttattttttcaacagataatgttggtcttgtggcataaccctttgaacgctggattcctacaactttaacatcgttagtaattttctctttaattccttcaaaatcaaattcaccattttctaaaaggtcaacctgatcatatttaacaccatattctgcaagactgccgttggatggtctgattccaataacttcttccagtgtgtcgtaaggctttcctgaaatatatactaatttgtcatttggtcttaaattagcagaaagggcaagtgccaatgcgtgagttccacatgtaatctgtggtcttactaatgcatcctctgtatgaaaaacatctgcataaactttttctaaagtttctcttcctaaatcattatatccataacctgttgtagtattaaaatgtgcttcggcaactttatttttctgcatggcaccaataacttttaactgattatattctgcaatcttgtctactttcttaaatctttcttccaaatcagcacaaattttttctgaaaaatcataaacatgttcagatattccctgctgcttatacatttctttaatcttattaatcattttatttatcctttattatattaatttctcttaagtctttaagcatacatgccaataacttatttttgtcataatcatattcatcccagtttaccatggtaactgttttttcacgcctaaaccaggtcaactgtctttttgcaaaatgccttgtgttcttctttattaattccactgcctcatccaatgaaatctttccgtctaaatattcaataatctctttataaccaatgccctgcattgatacaagatttctgtcatagcctttatccaaaagactttttacttcatccacaagaccttccttaatcataaagtcaactcttttatttattcgtgaataaagtagctctctcttatcatttaaaacaaaatatttaaaattatatggagaagcatattcacgctgttctttattatggtctgaaatcttctttcctgtctgatgattatattcaagagcccttattactcttttaacattattataatgtattgccttggctgattcttcatcaacctcttttagcatattataaagatattggacacctttatctttataaatctgttccaaagtttttctatattcatgattatcttctgtttcgtcaaaatcaatgtcatacaaaacagactgaatataaaaacctgttccgcctactataataggcgtttttcctttttcataaatttcattaatgtatttctttgtaagcttttggaatacattaacattaaattcatcatcaggctcaaattcatctataagataatgctttatgccctgcatttcttctttttttattttggcagaacctatatccatatatttatatacctgaatggaatctgcacttataatttcgccgtttatggccttggcaagttcaattgatatttctgtttttccaacagcggtaggtcctgttattattactaaattgttcatttttattttaggctcctatacaattctcttgaattttttgtccaattcataatgactcattgatataattgtaggtcttccatgaggacagttataaggattctctaatgaaagcaactgatctattaatgcatttgcctcctgtgtagacattttattgtttccctttactgctgccttacatgacattgaagctattttttcggtaatcatatcaggaaccattcttccattttcattagacaagttatcaataatctgcattaaaacatcgtaactgtccaaagtatataaatctgccggtacggccctgactgcaaaatcctgtccaccaaaagcttcaatttcaaagcctatctctttaaagttatccatatatttatttataagatttgcctcatttaaagacaaattcaaaataataggcggattaatcatctgtgatgaaacttctttcttggaaagcctgtccataagcttttcaaacattactttctcatgggctgcatgctggtcaataatatacatcttgccatcatactcaactatccaatatgtttcaaaaacctgacctaccaatctatgagacggtcttgccacatttgtaaggaagtcatcgtatactcctgaaagttcctgttggataggctttgattttttttcttcctttatattttcaggttcctttatttcatttcctatatttttattttttgaaccttttgataaatttgaattttcttcaatatttttacttatatcagaaaaatgtgtattttctgtttcctgattattattttttataactacatcattgatttccgtcagaatgtctgatttttgttctgttttttcttttggtgtatcaacagcataattattttcttctctaatattttgtttcttaatatcttcgattttaatgttttcatcgttaatactttttataaaattttcagccattttgtaatcaggtacatcgccaagaatatgatttatctctgttcttgttttttcaaaaggttccggtgctctggctattttttcttcattaggcttttcctcatttaactcaaccttaattatattaggcttttcaacaagagtatcgtgaatgctatccataataaaaggataaattgcctcaccttttctaaaacgcaattccatttttgccggatgcacattaacatctaacaaatcctggtctatttcaaaattaattgccgtaaaaggatacttatgctgcattagaataaacttgtaaccatcttcaattgcctttgaaataatattacttttaatatatctgccatttataaaatagttttcaaaacttctattaccttttgagattattgccttgccaatatagcctgtcatcttaataaattcattactgcagtttatttctaatagattgtttgcaatatctcttccgtaaatattataaataacatcttttaaattaccattgcctgatgtatgaatcttagtttgattattattaataaaactaattgatatttcaggatgtgataaagctatcttttctactatttcagaaatgtaacctgcttctgtctgggcagtttttaaaaattttcttctggcaggagtgttaaagaatatattctttacaataaaagttgttccctcaggtgcacctatttcttcgaaagttacttcttttccaccttcgattttatatctgatacctgttatggcatcttcagtctttgttataagttcaacctgacaaacagaagcaatacttgataatgcctcacctctaaatccaagggatgatacacttataaggtcaagagctgttttaatcttacttgtggcatgtcttaaaaaagccactttaatatcatctttttcaatacctgagccgttatcggtaattcttattaatgatgtaccaccatctttaatttcaacggatatcattgtagctcctgcatctattgcattttccataagttccttaacaatggatgcaggtctgtcaatcacctcgcctgctgctatctggtttattgtattttgatctaaaacatgaattttcctcataccttgtctcctacttaatcttagcctttatcctgtccttgttccaactttactcttatactgcctgattagttattattactgccatctgttttttagctggttttgaagtttatataaataattcaacccatcaataggtgtcatggttccaaggtttatttcctgtaattcctttataatatcatcttcccttactgtatcaaacagcgtcatctgatgagcttctaaatcgtcatttatagtaggaagaacattatttcccggttgaagatttgctgcaatctctttagccgtaacagttatgtcagcattgcttaattcattaacaagttcctttgctctgtttaaaacagactcaggtacacctgcaagttttgcaacctgaatgccataactcttatcagcgccaccagccacaatctttcttaagaaaacaatatcatctccctgttccttaacacttatacaatagttgttcactcccggtaaagttccttcaagttcagtaagttcgtgataatgtgtggcaaataatgtttttgcacctaataattttttatcgcaaatatgctcaacaacagcccaggcaatacttaaaccgtcaaaagtacttgtgccacgacctatttcatccaaaataagaaggctgttggctgtagcatttctaagtatatttgcaacttctgtcatttctaccataaatgtactctgaccacttgccaagtcatctgatgcacctactcttgtgaaaatcttatcgcatattgatatatttgcatattttgcaggaacaaaagaaccaatctgggccataagtacaattaatgctgtctgacgcatatatgtagactttcctgccatgttagggcctgttataattgcaagtctgttattattcatgtcaagaaatgtattattagcaataaatgtattgtcaggcatcattttttcaacaacaggatgtctgccgtccttaatatctataacacctttttcatttattttaggcttaacataatgatttctgtcagccacaaatgcaagagatgcaaaaacatcaatctgggcaacagcttttgctgtttgctgaattctgttaatctgattaaatatttcatctctaattgcagtaaaaatattgtattccaaagagaataacttatcctcagcccccataataacatcttcaagttcttttaacttgtcagttgtatatctttctgcgttagttaaagtctgttttcttacataataatcaggaacttggtccttaaaggaattagaaacctctatgtaatatccaaaaactttattatatttaattttaaggttcttaatgcctgtactttccttctcagccgcttccatttctgcaagccaggttttaccttctgtttttgcatttcttaatctgtcaatttcttcattatagcctgttcttataattccaccttccttaatattaattggtggatcatccataattgactcacttataagcgttgtaatatcttcaagaacatctaatctgttatatatatctttaaacaatggagatttgaaatccattattatattcttaatatgtggcaacattgaaagagatgttttaaaagcaattaaatctctaggattggctgaacggtaagaaatcttgcttaaaagtctttccaaatcataaatcggtgcaagatattctcttaactcatctcttgtaatcatagacttgtttaattcttcaataactttctgtctgtttataatttcttcttttgaaataagaggctgttcaatataatttcttaaagttcttgctcccatcgccgtttttgttttatccaaaacccaaagcagagaacctttcttttgcttctctcttaatgtttcgcataattccaaatttcttcttgttgaagtatcaagaatcataaatgtacttgttgaataaggaataagcttagtcatatgtgacagggaatttttctgtgtttcatataaatacttaagaagtgaacctgaagcaatgattccaaggctcatatttgaaattccaagtcctgctaaatcaaccattccaaagtgttcttttaaaacatcactacagatttcttcatcaaaataccattcttccaattcaaaaactgatattgaaagtcggtcttttaaatcatctatatccataccactcatcaaaaatgaatgattgcatattatttcgcttggcataaacttattaatttcatcaactacatttctttcagttgtaacttctgtaacataataatcacctgttgtaacatctgctatggaaatcccaaacttaccgcctatatatgctatggacataatgtaattatttctcccctcatccattgcagcagtgttaagattagtacccggtgtaacgattctcacaacttcacgttttacaagtcctttagcctgtgccggatcttcggtctgttcaactatacaaaccttatatccttttgttacaagtcggttaatatatgaatcaactgcatgatacggaacaccacacattggtgctctttcttccaaaccacagctttttcctgttaatgtaatttccatttccttagaagcagttgtagcatcatcaaaaaacatttcatagaaatcacctaatctatagaaaattatgcaatcatcatgctgtttcttcgtttctaaatacattttcatcattggcgtaagggaatcaagatgattatcccatacatcctgcatcatttttggtaaagccattttatttcaccatttctcccatataatagaagccttttgcctcttttaaattaacgtctactatttttccaataagttccttacaaccttcaaaatgaacaacactgttgttgcttaatctacctgttacatatcccggaatcttcttatttaattcctcaacaagaactgattgtacagttccttctaaatgtttagttttctcccttgaaatctcatttacaagatttaaaagtctgtcaaatctctcttttactacatcttcaggaacctgatcaggcattgtagccgcaggtgtacctgaacgctttgaataaataaatgtaaatgctgagtcgtattttgcttttcttacaacatcaagagtttcctcaaagtcttcatctgtttctcccggaaaaccaacaataatatctgttgaaattccaatgtcaggaatagccgctcttaatttgtcaactaaagtaagatactgttccttgtcataatgtctgttcattatctttaacaatctgctgcttcctgactgaagaggaagatgcatctgtttacaaatcttttttgattttgccataacttctattaattcatctgacaaatcctttggatgagaagtcataaatctgattcttttaagaccttctacctgttcaaccatttcaagaagcttggcaaatgaaataggattatccaaagtcttaccataagagttaacattctgtcctaaaagcattacttcaacaacaccgttagatacaagttcttcaacttccttaacaatgtcttcaggattacggcttctttcccttcctcttacatatggaacaatacagtaactgcagaagttattacatccatacataatatttacacctgatttaaagtcatattttcttattgttggaaggtcttcaactatttctgttgttccatcccaaatatcctcaatcctatgtcctccaattaatctgtcatataaaagttcagctaactggaaaacattatgtgttccaaaaataatgtccacaaatctataacttttatttagcttttcaacaacctgtggttcctgcatcatacaaccacataaaccaataatcatttcaggatttttctcttttattttagataaataacctaatctgccataaatcttaagattggcattctctcttactgtacatgtgttgtataaaacaagatccgcatgttcatcatctgtttcctgatatcctatctggcttaaaattcccattaatttctctgaatccttaaaattcatctgacacccgaatgttacaacacaggcagttaactttcttccaagtttctgttccttggctgcaataagttcactgcacttttctatatagtatttctgcttatctgtttcgttggtaaaactcatgtttctctcctattactatttttcctttttatatctaatacaattattttaattacttattatttcgttaagtttcctatcgtgttcttctgttggcaggctgttcataatctgaaaatcatatgctactccaatagtataaaccttatgatgttccaaaaaacggtcataaaagccgccaccatatccaagtctttcccctttcttagaaaaagccactcccggtacaataatcaagtctccttttggagccggggtggtttctggtggctccggaatattaaaatatcccggttctaattcttctaaagatttgacttcaaaaaagtccatattttgtccttttactttaggaaaagctataatctttccatcttctaaagcctgctttataaaaggcaataaatcaacctctttatttacactataataacaatatattactttgctttttaaatactgactattatttaaaagtctgttacatatacgaagacttttctttgagaattcttcatcagtcattttttttctttttgcaataagctctttcctaagcttctttttatctgtcattttagcgtccttttaattgtttctaatctcttttgttattacttttgtttttaattctgttattgttccatcttcattttcaatgcttacattattaagtgatgagtgaagattattaataacggccattctatattcattacgaagctgtttttgctcttccttttctgtctctgttaaaccttctgttttagattttttgtataattcatttattcttgctatctttaacttatccattgctttctccatttcattatatttattttaagaaaatatacgttgtctggttgttcgaagaaattgctcctatatattgccccttctcctgaacaataactctctttgacggatacttatgtattgttacatactctttctccttgccaaacagacttttttcgataaatgtggatacaattgttgtatcgttaatgtatcgaatcttatattcatccgtataagttgtatcaatttcatttgaaataagattaaagaactgggttcctgatgaattttcagtaatcatatatgggatgccctctattaccgtggcatttttcaacaaggaatggtccttagttgtcttatttatgcaagtaaaattttcctttgtttcaatattgtaaaaaataactgtttcgtcatttttatcataattatattttgaatatattaagtatttgtcaatcttttttgaacgaataagtgttgcatcataaaaagactggtcaattgcacttaaaacaaggttcggctgttcaagctgtaagtcacttataaactgctgaatatttataacataaagtgactcaacaggtgcctcatcctttgaaattctatcatgtctgttatgtttaaataaagaatttcccgtcttcattacacagcttgtttcattaaacggaaacatataatcaataccgttatgagcaatattttcatcgctaattggaatcttcttgttctttacaaaattaaaaagcagatgagaataattgaaaaattccttatatcctgattcaaattcttttaatgttgctctctgaataatcaaattagagtcatccaaaataaaaatcttaatctgcttctggtcaggatacagttccatattatctttaagtgaaataatctttgtatgagtatgatccgtaatattatatttaataatattgaaagtctgtctgccatctaacatatcatctatttctgtaaaataaagatattcaggttcatattgacaatcagtaagttcaaatacatcaaccttttcagaatgaggcataacctcctttcttacgttctcttccagataatacagataatatctgactcttggaagatttgtaaaacgtccctgttcatattctttttctaaaataatgtcatcctttatgtggattccattaaaatattcagactgtgccaaaaaacgtatattcattaaactctccttaattaagttctctctaatgcgttccatttatatcttgccttacacaagaaaaatacatctttatataatactacattttcacgaaaaagtcattattatgccctaacaaaaatcttccggtttgtgaaaatttttgccaataaattcaaatatttttattccgtctattgcagcagatgttattcctcccgcatatcctgcgccctcgcctgcaggaataagtcccctaacatttgactggtaattttcatctcttattattcttacaggggatgatgttctgctttcaactgctgacattattgtgtcattgtcattaaagccctctatctttctttcaaaatattccattgcatcacttatggatttacaaacatattcaggcaatacattatttaaattaccaaaagaatattttccttttatttcaggggtgatttttccaagtgcctctgtttttttattgtttctaaaatcttccagtctttgaattggaatatttccatttccttcagcaaaagcttttctctctaattttctttgaaattccactcctgccaaaggatgttttgatggataatcctgtggtgttacagttgttacaatggcactgttggcatttctgctgtcacgcttactataactcattccgttaactacgcatgtttccttttcagaagctgcatttacaacaaatcctccgggacacatacagaaagagtaaactccacgtccgttgtccgttttatatgtaagtttgtagcttgcagctcctaaacggttatcactaaagccgtactgacttttgtttatcttttcctgaggatgttcaactcttacacctatggcaaaaggtttctgttccatatttatgcctttattgaaaatcatttcaaaggtatctcttgcactatgccctatggcaagtacacaaatatttgtttctatttcttccccattgctaagtttaacagcctttagaacattattttctgttgtaaaatcagtcatttcagtgtcaaaataaaatgtcccgcctttactttcaatatatttacgcatattttttacaacaactgaaagtatgtccgtgcctacgtgtggttttgcatcatagagaatattttcttttgctccattttccacaaaagttttcaaaactaaatttattctgttttctttatcctttattcccgtatttaatttgccatctgaaaaggttcctgcaccgccttctccaaactgcacatttgaattttcatcaagttttcccgtagaccagaattcttctattttcttaagtctttggtcaaccttacttcctctttcaacaataattggcttgtaaccatacattgcaagcatatatccgcaaaacattcctgcagggccaaagcctacaataacaggtctgttttttagtttttctgttcctgttggcacaaattcatattcaggttccctgtcaaggacaacaacatttttcctattcttgttatatttttttattttaaaacctattgtatataactttttaatactatctttatgtcttgcatcaattgaatatttaactattttttgctcaataatgtctttgttattgattcctgcttccttaattgctttttcgaaagctatatccacgctttcgtccacgttaattttaatatttgatacttttataaatttcattctacacaattccttccggcagtagctcctgttgcccaggcaaactgtaaattatagcctccgcatatgccatctacatcaagtatttctcctgcaaaatataatcccggttgtttttttgattccatagtcagactattaacctcttccgtgcttactccgccagccgtaacctgagcaaaattaaaacctcttggcttatttacaacaatctgataatcctttaacaatttaagcaaattaagtgtttcatctaaatgtaactctccaagcaaacaatcgtattttatacatgctttttctagcataactgctgtaatctttgtatttaacattccatccattactgtgcctaactgaattttaggattgtaatcagatgtttttgcccaatattcaacaatgtcatttattgaataatcaggaataaaatcaatatgtattaatgttcccttagtggccattctgcttatgttaaaaacaggtattccggatatgccataatctgtaatctgtaattcccctgtttcagaatatttattagcctcattagaatttccgtctttttccctggtactattttcaaaccatatattggctgttgttcttacacctgccgccttattaagtaagtctttttcagtaattaaagctgtaagtgcaggctttgtttcaacaattgtatgaccaaactgttcagccaaaggatatcctaatcctgtggatcctgtttttggagcagccattcctccagtggcaacaataagcttatcacactgtaattcaattcctatatctaccaaaaactttctatcactatattttacagacttaacattattatttgttttaattttcaccccaagattttcagcggtaattcttaaaatttcaagaactgttgctgcctgttctcctgcaggataaatatatccgttcttatccttagttctcattcccagtgacataaaaaattcaatggtgtctttatatccaaagttgtctaatacattttttataaaatttttgttgccataaaagcactcttcattcatttttgtatttgtaatattacattttccattacctgtaacaagaatcttcttgcccggcttattttcatgttctattacagtaacctttgctccctgatttgcagcagtaatcgcagccataagtccggaagcaccggcacctattattattacatccatatttcatccttattttttattgttatctttatatattcattttcaaactttatatgttaggcattgtagtatcagctggtatttgactcaagatacttaaacaactcctctgcgttttcgtaataaactccgttttgtaacatatttttttcctttaaggaaaagtctgaaatatctatatctgtttcagccatgatcgttttcttgtcttttttgtaaacatttaatttattgtctacagctataatccaataaccttctacttcagaattttcatttgttaatgaattagtattaatagacttattctcggtgtatttatttacattattatttgttccaaatctaattcctgatacataagcaattccaaaacctataattaataccagtaaataaaaaatatatgcacgtttactcattttttcaactccttgcatatattttttacatattctgtaattttatactataataaatgaacttttttcaaaagtctgattaacattgttccctttggaacactcataagttcattttctgtaactgttcccgaaataataagaacaacagcatacacaataacagctaccataatggcaaataatgtacataatgcattaattggtataatttttgaagttaaccaatatgcaagataacatataatccccattgctgctgaaccaataaaaggtcttaggaatgtttcccttaaatcatggctgtaacccatatgtttcttaattgaaaaagcatttaatattgaaactgtaagaccaaaagtaatatccccaataacaactgcgtaaatatccaatctaaacacaattaataaaacaggcaatattatcaaatgaagcacaagtgatattgctgaatttttaatcggtatgttaagcttgtctattccctgtaaaatagcattacttatagttgaaagtgagaaaacaactactgtaagtaaactaaaaatcataattgttgccgttcttttgcttccatctccaaataataactggttaatcggtccacctaaaactgataatcccataccacaagggaaagctataagcattgaaaactttaatgccagtgaaactttgttctccattccctgtttgtcttttgctatataagatcttaccattgcaggaacaattgctgtagataatgatgaagcaattgctataggcattgttgtaagcaccctatatttagcactgtatacaccccataattcagctcttgtttttgatgaaacatcaaaaattcccgtgacaatatttccgtatataggattgtcaagaagattgctgatgttataaattgtactgcttattaatacaggtgtaattgtaaatataataacttttgttattgttgcgtaactgtcctctacctttgttttgtcttttcttataggtttctttatatttccatatgagttccaaaatacaataactacaattattaatgccgcaatggcacctgttaaagtacctaatgtaccacctgctgctccatatgcaggacctgccgactcaccaagttttgacattttgctaattgatacaccataaaccgtaagttcatatgctgcaattacgctgacaaccgcattgacaatctgttcaaaaatctgtgatattgctgttggaatcatatttcccattccctggaaaaatccacgcattacaccaagaatgcaggcaacagtaagtgtaggtgccaaaactttaagtgcaacagctgcaggctggctcttataaactgaagttgcaagccagtcggctccaaggaaagcaaacagaccaaatgaaacacctaaaactgcaccgtaaaacaatgcccccttaaaaattttataagcgttcttatactgtcttcgctctaacttttctgatactatttttgatactgccaaaggcatactctgagatgacagcaaaattaaaacattgtaaatgtcatatgctgtagaataatatccgttaccttcatctcctaaaattcttgttaacggtattctataaattaagcctataattcttactaatattcctgcaaaagcaagtatacttccctgaattacaaaactgttttttgattttcgtcccattttattaccctttcatatcctccgcagaaaatcctgccggaagaagatctcttactgtatattctttaatttctttgccattactaaggacaactgttccatcagccataaattcttccataacctgacggcaaataccacaaggtggagtgaaatctcctgatgaacttacaatggctattttttgaatatttttatggccttcacttacagcttttgaaattgcacatctttctgcacaaattgtagctccaaaagaactattttcaatattgcaaccggtataaacaactccatctgtaataagtgccgctccaactttaaatttactatatggagcatatgcgtaattcattgcctctaaggccttatctatcaattttctgttatccatttaacatacctctaaatatttttcaagatccaatttgtatttaacacaataacttttgaaataacaatccggatagccttttgataacaactcaaataattatttagaaatttttacatcatttgaatattcattctgaaccatacaaatccatgtttttccctgatttaaaactatttccttacctgacttatctaagtatgttgttctgccctttttctggtctttcttccaagtgattttttcagcttttccatttgtaataaaccagccgtttccacttcctgttaaagtcatatcaaggctttttccatcaggatataaagtagcattaacaaactgaattataatgtttgagcagtgaagctgtttattgttctggtcatcaatatgtttttttccatactggaatctgtaatactgtccgtctttctgattatactcaaaccaaggtttatttacaggatatccaagtttaactttgtttgcctgctttgttgactgaagagaaatcttttcattgtcagtagcaaaactaaagtgtgatttgtatccattcttatattttcttctgtaaccaagtttcttaattgaactgtcaattcccttcgcactggtaaaacagttatgtggagcaactctgtccgatgttctgtaataaccgctttcagcattaaatgagcctacgttgtcaattgcgtcacttttcaagaaatctaaagcatattttgactgtccgaaatggcaataaattgcatcccattccaaagcgaaatagcaataataaagtctgcagcttctaactgagccaatctttttaagcttaccataattctcaaaaagagccataagtcttgttatgcttccctcaacaggtgcttcatatacaatccctgcattatcaatacctgaatgtggaatggcattaataatattattgtacataactgcaacaggtcttttatcagcaagcttttcacttatatgctctcctgtaagcatactgatacctttaggctgtgctgtagtttcaggtactgtagttgtttcagcaactgttgttgtttctttgttttctgttatctttttctctttaccactgccaaaagcaaaaatacatactgctacaatagcgataagagccactccacctgcaatgccggcaatgattttcttgtttttttccattttctaatctccctttttttctttcttttgcatttcttcttgcaagtttccatgctagttttctcttgtaatccccagattatttaaaataatgttctgcttttcttccatttcaattctttcatcatcaaccatatgatcaaatccaaataaatgtaacatactatgtgccacaagaaaagctaattctctctttcttgaatgattatattcagctgcctgttcaataactttgtcataggaaatcacaatatctcctaaaataagttctcccgaatcaggattaaagttacttatgtcatcctctgccatagagaaatctccggcaacttcataatctaacatcgggaatgacaaaacatctgtaggtctgtcaatttttctttgttccctgtttatttcgtgaatagtattattgtcaacaattgtaacattaacctcacattcataaggacactttataaaatcaactgcctggcaaactactttgttaattatatctgtataatcaacatctatttccctgtcatattcattttctatgtatatattcattttctattcctttgcaatatcttttcttaatgggtttcgtcaatatagttactctttcatttttcccttgacttgtttctattagaatttctgttgctcattttcttgtcatattcttcataagcttttacaatcttctgtacaagaggatgtcttactacatcgttattatctaagaatacaaaacttatgtcttcaacatcttttaagactttcattgcaacatccaagcctgatacctgatctcttggaaggtctttctgagttctgtcacctgttacaattacttttgagccaaaacctattcttgtaaggaacattttcatctgtgcaggtgttgtgttctgtgcctcatcaagaataataaaagcattatctaaagttctgcctcgcatgtaagctaaaggtgcaacttctataattcccttttcgctgtttgatataaagctttcagctcccataatctgatataaagcgtcataaagcggtcttaagtaaggatctaccttgctctgcaaatctcccggcaaaaagccaagattctctcccgcctcaattgcaggtcttgtaagaataatcttgtttacttcgttatttttaagtgctgtaattgccattgccattgcaagatatgttttacctgttcctgcaggacctataccaaaaacaatcattctttcccttatttggtcaacatatttcttctgacccaatgttttaggcttaacaggttttcccataactgtgcggcatataatattatcatctaagtccacaatggctgattctttattatcataagagagagaaagtgcataatctacattctgctctgttattgtatttcctcttttagacaattcaatcaactgctcaaaaacacttctggctctttttgctgcaacatcactacctataatctttacctgagaatctcttgcaataactgtcacataaagtgtcctctctatttttttaatattaccatcaaaactgccaaatacgtttttttcatgttcagcaggtatattcataatattctcaattacgctcatttatactgactgtttcctcctctattttttttacgtcaatgtatgaaactttacctatgggtttgttatatgttatttttccacataatgcataggagtccatagtctttttcattttaacatttttttgtattattttgtagcctttttgttccataacaaacattttattattaaatttattatttagtattttttctgcctgttcttcggaataatttttctctgttattttgtatttctttatggtgtatttctgcattgatattggcaaataatagtcaccgaagaatttcatttttgtttcttcacaggttaattccctgttcttccccttgtttttaatccatttgtattcaaaaaaagacggaactataaatttagtacttttttccgtttttttatcctgatattttatgtttaacttttcttcgtatttttcttttatttggcctattatttctccgtccgcattgcaatattcattaaaaagcaactgccccgattcatctgtaacatccacaacaccggtaattaaaacctgaccttttttaaccttttctttaggattaacgttaagcttgcctcttcttacaagtgctgaaacaattgtgcagtcacattctgccaccaggtcgtatggtttatcttcctttacacttatttccgtaatgtaattttcttttatatgtataatcagatttgtgccttttacctcaacgcatacccagcttatgtcatcaaaattctttcgtatggatttttccaagctttccgtatcaatgctttcttttagaaccccctctttaacgcctttttcatggacataatcaatcatttgttcagctgtataggaatagtttccttttatagttattttccaaataaaagctgaatttgcaattaataataaaataaaaattgcaaaaatatatataacactttttataaattgaaagtttgtaatctttgtatatatgcccaattcctgcctgtttactatttcaatattattttcttttaatattttttcaagatcactatattgattataatttattgaaaaaccggcatagtctttgtctatttcaacatctcttatttcattatttctgcagcagttaagcaatctatatatatgtttactattaattttaattctgtaaaaatgaaatttcacaaatatatccacctatggccattgattgattgttataatattttatgtttaaacctgttccattaatgattattttatattttttacatacaatttctatatcggtgtccgtaatgctcttaatacatttataattctcaattacaatctcgtttctgccgattatctggcacaggcattccccatgaataacatctcttggcatatccaaatcattgtctacattaaacataaaaatcctctataaaatcctttatgcttttatagtatatttttatgttttatgaatagaactttaagaatatatcttttcaaaaaaacaaaagtccggaacttacgttccgaacttttattttaaaaaattaaaattaattatatttgcgctttcttgcagcttctgatttcttcttacgcttaacgcttggcttttcgtagtgttctctcttacgaatttcctgctggataccagcctttgcgcaatttctcttgaatctacgtaaagcactgtcgattgattcgttttcttttacgataacgcttgacattttcctgacctccctccagttatggattcctaaaactgtaggtatttgtgttaaaacacttaaaatattataacatatttttctatatcgtcaatatgttttaagatactttttcgtgtttttcacgatttattattaacctcctgattatcagttattatttaagctgaccttcaagaatagttttagcagcctctactgcatcctttgctcctgcagaattctttccacctgcctgagccatatttggacggccaccgccgccaccgccaacaagcttagcaatttccttaatcatatttcctgcatgagcacccttgctaatagcatcttcatcagccataacaataacattagccttgccatcctgtgtagaaacaataacaacaacgcctccgcccattttttccttaagctggtcgccaaggtttctaagttcgttcattccaaccccttcaacatgagtagcaagtaacttaactcccttaacttcaactacctgactaagtacgtcaccaacagcttcatttgccaatttagcttttaatttttcattttctttagataattctttaatttcatcataaagagcctgaatcttttcaactaaagcaacaggttcagattttgcaagttttgcagcctgatttaaaacattttcagattctttatagtgtttcataagtcctgtagaagttaaagcttcaattcttcttactcctgcagcaacacctgattctgaaataatcttaaatgatgaaatagcatttgtgttagatacgtgagtaccaccacaaagttcaattgaataatctcccattgaaacaactctaaccttttcgccatacttttcaccaaataaagccatagctcctgtttcctttgcttcgtccaaagacatttccttagttataacatctaatcctgtagcaatctgttcattaacaagattttcaactttttcgatttcttccttagtcattgcctggaagtgagtaaagtcaaatcttaatctgtcagcatctacatatgaacctgcctgttcaacatgttcaccaagaacagtctttaatgctttctgtaaaagatgagttgcgctatgattctttgatgtatcagcacgaaatgctgagtcaaccttcatagtagccttgtcgcctacctgaatcataccctttacaactgtaccaacatgtccaatctttccacctaaaagatgaattgtttcttctaccttaaattctccaccgtttgttacaatgatacctttatcgcctacctggccacccattgtgccgtagaatggtgtttcttcagtaacaattgttcccttgtcaccatcaactaaagcctgtacaacttctttttctgttgtaagtgctgttacaacggtatctgaaattaatttatcataacctacaaacttagttgtaagagctttgtccagctgttcatatacagtagcatctgcccccatatagttagtcttcttacgtgcacttcttgctttttttctctgaacttccatagcttccttaaaaccgtcttcatctacgccaaatcctttttcttcaagaatttcttctgttaaatcaagaggaaaaccatatgtgtcataaagcttaaatgcattttcgcctgacaactgagtctggttatttttcttcatttcttcttccatatctgcaagaatgttaagacctgtatcaatagtcttgttaaacttattttcttcttcagataataccttgaaaatcatgcttttcttttcttctaattcaggatatccgtcctttgaactttcaataactgtttctgaaagtgttgaaaggaaccttccatcgattccaagcagtttgccatgtcttgcagcacgtctgattaatcttcttaatacatatcctctgccttcatttgatggcataataccgtcagaaatcataaatgtagctgatctgatatggtctgttacaattctgattgaaacatcccatttatattctttcttatattccttgtttgcaagttcacaaactctatctcttaacgctttaattgtgtcaacatcaaaaatagaatccacatcctgaactacagttgcaagtctttcaagtcccatacctgtatcaatgttcttctgttttaatgttgtataattgccgtttccgtcattttcaaactgtgtaaatacgttattccagatttcaatatatctgtcacattcacatcctacagtacaacccggcttaccacaaccatattttgcaccacggtcatagtaaatttcagaacaaggaccacaaggtcctgcaccatgctcccagaaattatcttccttaccgaacttaaaaattctttcagcagggattcccatttccttattccaaatatcaaaagcttcatcatcttctaagtaaactgatggatataatctgtcagcttcaagtcccacaacttctgtcaggaactcccatgaccaatgaattgcttctcttttaaaataatcaccaaaagagaagttaccaagcatttcaaaaaatgtaccgtgtcttgcagtttttccgatattttcgatatcacctgttctaatgcacttctgacatgttgccactcttgttcttggtggtatttcctgtcctgtaaagtatggttttaaaggagccatacctgcgtttatgagtaataaactgttatcattatgtggaactaaagaaaaactcttcatcacaagatgtccctttgattcaaagaaatctaagaacatttttcttaattcatttaatccgtattgtttcattttgtcctccaatttatacatctaacaaatattaaaattagtcagctttaatctgatggtatgattttttaccttttttgataagtaatgctgcttcttcgttaaattctgcagttgtaaatgttttatcaattgctacaaccttttcaccattaacagaaacaccaccctgctgaacaagacgtcttgcctcgcctcttgaagctgcaagttttgtatcaactaaaagtgtcaagatatcttttccttcatctaaatctgccttagcatatgttgttgtaggaatgtcgcctgtaactccacctcctgcaaaaaggtttcttgatgcagtctgtgctttttcagcttcttcttcaccatgaacaagtttagtaagttcataagcaagaatttccttagccttattaagttcacttccctgccactgttccatcttctcgatttcttctaaaggaaggaatgtaagcatctttaagcacttaacaacatctgcatcatcaacatttctccagtactggtaaaattcaaatggtgatgtcttttcagcatcaagccaaacagcaccactaactgttttacccatcttcttgccttctgagttaagaagtaaagtaatagtcatggctgaagcatcttcgccaagcttacgtctgataagttccgtaccgccaagcatgttactccactggtcatcaccaccaaactgtaaattacatccgtaatctttatataatctgtagaagtcataactctgcataatcatataattaaattcaaggaagcttaagcctctttccattctctgtttgtaacattctgccgtaagcattctgttaacactaaaatgaggacctacctctcttaaaacatctatatagtttaaatctaaaagccagtcagcattgtttacaagtaatgcctttccctctgagaaatcaataaacttactcatctgcttcttgaaacattcaacgttgtggttaattgtttccttagtcatcatctttctcatgtctgtcttacctgatggatcaccaatcatagctgttcctccaccaattaaggcaataggcttattacctgccatctgaagtctcttcattaaacataacgccataaaatgacctacatgaagactatccgctgttgggtcgaacccaatataaaatactgcttctcctttattaattaaatcactaattcgctcttcgtcagtaacctgggctataagacctcgagcttttaattcttcgtaagtattcataacatatctccttcaataaaactcaataaaatattttaacatagtaatttttatttttcaaggctatagccccatattaaaggcataaatataaggtaatgttctaagataatgtaacgtttttttataaaacgatgcatattacacctctgctttggtcatttgtgattttttcaatggttccctgcattcttgactgtgtttcaacagtcagattatttattttattaattattccctcatcaacgatttccccaatggtttttccgaaaatattagtatcccaaacattagagtcctgttctttttcattaataaatcttattaaatctcttgcctgttcctcgcttcctattattggcgaaatttctgtaagaatattagccttaacaaaatgaattgacggcgcagttgccttaattttcactccaaacttatttccacttttaatcagctcaggattttccaaaacaatgtcttccttatcaggtgttactattccgtaaccggtggtttttaccttgttaattgcctcattaacttttatatatgtgtttttctccattgacaattcttttaccattttaatcaattgaagctgattttcgatttttgtgcctgccatttcagataaagtttcataataataactttcatcaatgtcataatttaatctaagtctgcctgttgacaattctatggctgtcatttgaacgctttttacatattctttgtcagggtttaagtttaatgtttttatatcttttatttttatgaaagattctaatattctccgtgaatattcaataatatacttcattaatttgtgctctgtgcctattatttccaaccatttaggcacattaaatattatttcacttattggaaattcaaacaaaatattttctaaaatatctgttacgtctttctccgttaaacgcagacagttaatagataatgttgacacattatatttttctgctatttggtcacgaagcattttgcattccattgaatcaggattaattgaatttaccaaaattataaaaggtttatttatgtttttaagctcatttattgttttatcaagagccttattatattcttccacatctaaatccgtaaaacttccatcagaagttataacaattcctattgttgaatgctcggaaatcactttttcagttcctatctctgcggcttttgagaatggtatatcataatcaaaccaaggggtttttaccattctctctttatcctcttccatgtgacctgtagctccattaaccataaaacccacgcagtcaattaatcttacttttagattagccttttcacctaatttaatattaactgccttgttaggtataaatttaggctcagtagtcataattgtttttcctgctgaagattgcggaagttcatccatagttcttctcacttcattctcatcttttatattaggcacaactgcaatatccataaaattcttaataaaagtagattttcctgttcttacaggacctacaacacctatgtaaatctcaccgttagttctcttttcaatatctttgtatacgttaaagtccatagcctacccccttattttattattcccatgtgactattaatatatatgcgaaaaaaagacaaatataccagttttatttttaactaaaaccatatatttgtctttgtttttcttatattgattagaatttctaaatattaaaagtttgattatctacattaacggtgccaaaagtcttaaaagcattccacatattttgtaatatgtaggtctgttcctacaatccataagtgagactctctttgatgcactaagcatcttctgatagtcttcctctattcgatttataactttatttttgtaaataaagcaaccatcctcaaaatgaagaaacaaacttctatagtctagatttattgttcctactgttgccttttcatcatcactaataaacatctttgcatgagtaaatcccggagtaaattcataaatttcaactcctgcttcaataagttctgcataatatgttcttgcaagacaataagcatattccttgtcggggatccccggcataataatttttacatcaacgccacgcttagctgcaaactttaacgatgacatcataacattatctataaccagatatggcgatactatatgaagatatttagtagacgtattaatcatatgtaagtatacagactcgccaacacgttccttaccgtaaggatcatctccatagcccataacatagccttctgctgtttcaggtgtaggtattgcaatattcaaatatctgctataaccctcaatgttcttttcggtaacattccacatctgtaaaaacaaaagagtgaaacttcttactgcatctcccttaagcattacacctgtatctttccagtaaccgaatctttccacaatgttcatatactcatcagccagatttattccacctgtaaaagcaactttaccgtcaataaccaaaatctttctatgatctctgttattctgctgtgttgtaaaaaagggtcttgcaggcgcaaatggtttagacttaatacctaattcccttaactttttaaaatatcctattggtagtttagacaaggaacatagtccgtcatacattacccttacttcaacaccctctcttatcttttcacataatacttcaagcacagagtcccatacttctccctgctctattataaagtattcaagaaaaatgaacttctttgctttctttaattcatcaagaaggattccgtattttttctctccactttctaaatatgtaacatccgtatttttgtacaccggacaacctgtgttttcatatacatattttgtaagagatgaaacctgcttatccagtatttgtaattcattatatatgttctggtcaggatccaagtatttacctgaattaagattaatatgttcaagtctcttttttagcataagagaacccggttgaagcataaaataaagatacatcatacagccaatagccggtacaaacataataaacattatccaaaccagtttcattgtaggatccgatttatcgtttgcaatgtaaataataagtacaaactgtaataccattattacataattaagatttttttctacagacgcattataggcaaaaaatacaaacattagtacctgaaggacaaccattaagccgaataaaaagaaacgactgaataaaaaggctgccaatccttttttacctttatgtttttgtgaaagaactctcttggctgacattaataaactccttattttctaatcctcttcatctaaaagattttttctaatctttaacatcttcatatccgtttcataaattacatctgcacattccgtaagctgttttacggcttccacatttgaatttgaaaactttttataatgtatttcatgctcaagacttgcccaaaagtccattgcaattgttctaatctgaacttccacacgcattggtttcttctcatttgaaagaaaaataggtatttcaacaacaaggtgaagacttctatatccattcttctttggatttttaatataatcctttttagataaaatcttaatatcatcctgattagtcagcatatctgcaaccttgtatatatcatctacaaaagaacagataactcttattcctgccacatcatcaagattatcctttattgactgaatagaaagttcaaaaccttttctttctaatttctccattatgcttgcaggagactttatacgtgtttttattgtttctattggatttctaagctcgttagcctgaaattctttatttaaaacatcaagcttggtttttacttccaaaatggcacactcgtaataagtcataagcatttttatttcagaaaaagtggactccaaaccttcaaactgttttacaaattcttctttttttgcatttaaatcattcatatcctactcccaaaccaaatcaggaaattcatgtgttaaatctctcttcataatatctctcatagcttccttggcaggcttgttttcaaataatacctgattaacactttctaccaaaggcatatccacgttatatttgtgtgcaagttcaagagctgccttggctgaaactgcaccttcaacaaccatattaacttccttaaccgcttcatctaaagtatagccttttccaataagaatacctgctcttctgttacgtgaatgtttacttccgcatgtaacaataagatcaccgattcctgaaagaccatggaacgttcttgaatgaccacccatggctacaccaagctgtgttatttccttaatacctcttgtcataagagcagcctccgtattatcgccatatcctaaaccgtcagcaatacctgctgcaagggcaataacattctttaaagagccaccaagttcaatgctctttctgtcaggacttgtatatgctctaaaataatcatttgagaaaagtctctgaacaaagcttgctgtttcaaatgtcttagctccaacaacaactgctgtaggaacctgtaaacctacttcttccgcatgacttggaccagataaaactacagcattaactgtaggaattacatcttcaataacttctgtcattgtatagaatgttccatcttcaattccctttgccacgtcaacaataatctgaccgtctggaacaatatctttaagaagttctgaagtacttcttacaaaagatgatgcaactgccataactatcattttcgaatcctttacggcttctttaatatcattcgtaatcttgattttctcaggaattttaactcccggaagtccaaccttattttctctttcttttgtaagagcttcaacttccctttcaagtgcagaccataatgttacattatgaccattttcatttaatacctttgccaaggcaatggcccaaccgccaccacctaaaacagttactttagacatattacgcctccttcttttgaccgatttttctttccgttccgttaatcagtctctttatgttttctttatgtctgatatatgacaatactgtcaaaaatccaacaagaatatatgcttccactttatcctggctttcaaggttatgcaccataccaagctgcccccaaacaataaattcaataaaaaaacctgtcataaggcacaatgaactaaaagaaacatattttgtaattattaatgctataaaaaacgtacaaaaacctaatgctaaaaacttccagtcaaaaaatgcaagtgcaaaaattaatcctgctgatgctgcaataccctttccacctttaaagttcatataaaaaggaaaattatgtccaaggattgcaccaattcccgtatataaagctattataaacatatggtccttacatacaccatttctaaacagaaaatatgtaagcatcatggcaaaaacagcctttagtgcatcaccaaaaaatgttataaatccgtctttctttcctaatgtacgcattgcattagttgttcctgaatttccacttccataatctcttatgtcaatgtgtttcatctttcctataataaaccctgtctgaaacagtccaaaaacatatccgattaaaacacatactatcttttgccagatcattacttgtcttcctttctttcacgtataataaatctgagaggtgttcctttaaatccgaaagcttctcttattttattttcaatgtatcttgtatatgaaaaatgcattaactgcttatcatttacaaaaataacaaatgtaggcggtttaacagaaacctgtgtaatataataaagtttaagtctcttacccttatctgaaggtggctgctgtaatgcaacagcttccgccataatttcgttaacaacacctgtttcaattctcattgcatgattagcaattacaaaatcaatcatatcaaaaagtttaggcaatctctgacctgtcttggcagaaataaacataatctctgcatatggcataaatgataaaatatctctaaccttattagtgtattcatagactgtcttatcatttttctcaattgcatcccacttatttactgcaattattatacccttgccgttttcgtgagcaattcctgcaatcttggcatcctgctctgtaacgccttcaacagcatctattacaataataacaacatctgctctttcaactgcagttaccgttctgataatactgtatttttctatctcttccttaaccttagactttcttctaagtccggctgtatcaataaatacataatccttaccgttccatttgacgtcagtatcgatggcatctcttgttgttcctgcaatatttgaaacaataacacgactttctcctgtaatcttattgataatggaagacttacctacgttaggttttcctacgattgctattcttggtctgtcatcttcttcttgctctaaatttaagtcagcaaaatagtttacaaccttatcgagcatatcaccaagaccactacgctgcgacgctgaaataggaacaggatcacctattcccaaattatagaactcgtacacatctgccatcattttgttaaaattgtctactttgtttactacaagaataacaggcttatggcttcgtcttagcatatctgcaacttttgcatctgaatctacaagtccctgcttaacatctgtcataaaaataataacatctgctgtgtcaatggcaatctgcgcctgttctctcatttgtgagagaataatatcattactgtccggctcaataccacctgtgtcaatcattgtaaatttatgatcaagccagtcaacatccgcgtgtattctatctcttgtaacacccggagtatcttttactatggaaatcttttttcctgctaaagcattaaataaggtagattttccaacatttggtctacctactattgctactattggtttactcatatttttctcctttatcactagattttacaatattagtacatatttgtaaacatcttccaaatatctttaactctattgtcccatttatacaattgataaaaatgcacctatgtttccacgcttaccgttatgtcctctatgtgaaaacaacacatctgtgttatgacaggtacatatatctgtcacctttatattttcaggtaaaacacctgcttctttaaaattaattctattgcattcccacaaatcaagctgatattttccattgcctttatcaataagaatctccttaatattatcagggaaggcttccttaaactgaactgcaacttcttcacttatttcataacatttctgacaaattgacgggccaatacatgccacgatatcttcaggttttgtaccgtaaagttctcccatcttctctattgtaacttttccaatctttccaacagttccacgccaaccggaatgagaaagcccaatggctttattcttagtatccacaataagaagaggcacacaatctgcataataagttgcaaggactatacctttttcattagtaataagaccatctatatccgtataatttctatctctatatatgccctttccacaatcgtctttagtaacaaccttaacattagttgtgtgagtctgattgcctgtaacaatattcttaggattaacaccaatgacattagcaaaaatttcatggtttctaatgacattttcatctaaatctcctcggttaaagcccaaattcatactggcaaggtaatccttgctaacaccacctaatctggtagaaacagcattcttaagccatggaatatcatctaaaattctataactaatatatggaacaccattattaaaattaatccttgtggtacttccactttccttatttaacttaatatattccattatattcctccataacaattaaaataataccttgcctcattattttcaacagtcatcacatcaaaactgcactgagcatcatttagtccatactcattcaaaaaccatgacgctgctctcataatcctgcgctgttttctaaaatcaacagcctccaaagcagagccataactgccactgcctctaaacttaacctcaataaaacggataatatcatccttcttagctataatatcaatctcacctaacttacatctataattcctatgtaaaatatcaaatccgtttttaataagatattcaacacaaacttcttcataaaaacttcctcttcctcttttgttcaaaaaaatcccccttttacatcaaacgttaattcagcatccataaggaaccaaccgatacacaactaaataaagttatgaataaacgattttctatgaattggacatggtccatatttcttcaaagcttctatatgtttagctgaaccatatcctttgtttgatgcaaaatcatattcaggatatattttgtcgtattccaccatcattgcatctcttgttactttcgcaatgatgcttgctgcacctattgatatactttttgcatcgccttttattattgatacctgtttcattggtactccggggatgtttactgcatcatttagaagtaatgttggctgtggctctaacattgatattgcctgacgcattgcttcataagttgcctgaagtatgtttatttcgtctattactttaggacttacaactgctgtttttgcgcagactgctttctccattattacttcatatagctcttctcttttcttggctgaaagcttctttgagtcattaatgtataatatatcacaatcttttggtaatattacagcccctgcaacaacaggccctgccaatggtccacggcctacttcgtctattccacatataaattcgtaatctgagtattttctttcaaattcgcttattttatatgttctttcaatttctttattataatcatcaatcttttttgcagctcttttcacaagatttgcaactccctgacggctatcatctttgtattgttcaataaacatctgcagtttgttctcaggtgtattattgaatatatcttttatgttgcttatactttccattttaattttcgctttcgatttaaatcaaaattatctatctgaattaaacaataatgtcttctttatataataatcatttaattatcagactttgtattttatagcttgtccaatgtgattcttccaagttttcctgctcggaaatcatccattattattttgcttgttttttcaaggtcaggctgattgcctttaagcttacaacctcttgcctcagctacctgatacataacctgtaacggatcttcatgtccttcgattttgtagcgttcaactactgccttaggatatgttattgcaagtaattttacaagctgatatgccaattccgtaacgtccaaaacgttgtcattcattgaacctataaacgccaaatgcattccaattgtctgatcatcaaacttaggccaaaggattcccggtgtatccagtaattccaaatttttatttaatttaatccactgctttccttttgtaactcccggcttgtttcctgtctttgcagcagcacgtcctgcgtaagcattaataaatgtggatttaccaacattagggattccaactaccattgctcttacagggcggttaatgatacctctttttttgtctctttcgattttttccttgcaggcaatctgaactgcattattaatttctttaattccctgtttattttttgaattaatctttaaagcaataattcctttatctttaaaatactgaatccacttattgttgtctgtttcatcagccaaatccgatttattcaaaagaactagtcttgccttattttttcccaaatcatctatatcgggatttctactgcttaaaggtattcttgcatcaagtaattctattaccaaatctattaattttatatcttctttcatctgacgaacagctttcgtcatatgaccgggataccaatgataatccatatttattctcctactaatctaacttctggtgtttaaacactcttttcattataacaaaaaactctctcaaagtcattacgctatcttttttaatcttttcaaaaaaagaagcgagtgaaaacccgcttcttttatactcaggtatacatcaagcataccaatgctttctgcatagtattatttaactaattctttaaccttagcagctttacctactctgtttctgatgtagttaagtttagctcttcttactttacctcttctaacaacttcaatgttagcgattgatggtgagtataatggccatgttctttcaacgccgattccacttgactgctttcttactgtaaaagtagctctgttgcttccaccctgtttcttaattacaaggccttcaaaaacctggattctttcacgatttccttctacaatcttagcgtgaaccttaattgtatcacctacgttaaaatctgtaacttctttaatctgagctgcttcaatttccttaattaattcctgcataatagcctccttatttattccgatgttcttaatacaatattctgtaacagaggaccatcttttattttcttaaaaattggcataattctaaagccaatcttattacagcatttgttatagtaacataacttttattatttatcaagactttttataaatttaatgtcctgctttgttaattctgccttttccattaaatcaggtcgtctttccatagttctaaggatagactgctgtctgcgccattcctcaacttttggatgatttcctgataacaatataggcggaacttccctttccataaaacttgccggtctggtatactgtggatattccaacagattatcattaaaagattcaaattctgctgacacatcattattaagtacaccgggtaccagtcttgatatggcatctatcataaccattgaaggtaattctccacctgttaaaacataatcaccgatagaaacattgtctgtaactatcatttcaagaactctctcatctattccctcataatgtccacagagaaataccaaatcttcttctttggaaaattcttctgccatactctgattaaaaaccttgccctgtggtgtaagatatataacccttggcttgtatccaatcttttcagtcactgattcataacttctgtaaacaggtcccggttgcataaccatacctgccccaccaccataaggataatcatctacctgaccatgcttgtttcctgcataatctcttatatttattgcatttaaacttataagtcctttttcaatggcacgacctgtaatacttgtatttatgccctgctcaatcatttccggaaatagtgtaagtacgtgaaaattcattaatctaaaagtcctttcattatatgtactttaacaattttattttctatatctctatcaagtatacattcttcaatggatggtaataatacttcttttccatcttttgtttttacaacatatacatcatttgcgcctgtctgcaaaacatctgtaagcgttcctaatattttgtcctcatctgttattactttgcttcctataatgtcagctatgtaatattctccatcttccaaaggaattgcattctctcttgtaacaagtaaatccattcccttgtacgggataatgtcattaatattatcaaattctttaaattttaaaataaccatgtttttgaaatattttacgcttgtcacatgaaggttaagttgttcctttcctgtatcaagtattacttcttttaaatcgtcaaaacgtcttacgttatctgttgttggataaaccttaacctcgcctctaattccgtgagtattgctgattacccccactctgaacaattcttccattcaatattccttccatataataaacaaggctggattaaccagccttgttgcacttgtattcgaatagcttacgccactcaacagatttatatccgttactgaatttctacttttactttcttatcgcattttgaagctgctgccttaacaacagaacggattgcttttgcaattcttccctgctttccaattacttttcccatatcttcctgggcaacatgtaactgtaaaacgatttctctttctgtttcactttctgttacaacaacttcgtcaggagaatcaacaagtgcctttgcaattgtttcaaccaattctttcatgaattcgccctcctaacactatttttcaatgccagcgattttcaaaagttttccaacagtctctgttggctgagctccattagctaaccacttcttaacagattcttctttaagattgaatatacttgggtcctggttaggatcatatgttcctacttcttcgataaatctaccatctcttggtgctcttgaatcagcaacaacgattctgtagataggatttctctttttacccattctctttaatctcatctttactgccattttttcttacctccgtaaattgtaaataataaatatataatcaagaaaacattgttttcatgaacccactaaaatccaaaaggcatcttaaatccgcctctttttttctttcctttgccacccataagtccgggcatgcttttcatcatctttcttgcctgttcaaactgtttaacaagcttatttacctgactaatgtcaactcctgcacccttggcaattctctgcttacgtgaaggattaataacatcaggattgcttctttcttccttagtcattgaataaataattgcctcaatcttacctaactgtttctcatcaggtaacatatcgtcgttaatctttccaccaactcccggcatcatactaagtaatgaagacaagccacccatgttcttaatctgactcatatattccaaataatcatcaaacgtaaactgagccttctttaaacgctgttccatttccttagctttatcctggtcaattgactgttctgctttttcaataagtgaaaggacatcacccataccaaggattcttgaagccattctgtctggatgaaactgttccaaatctgaaagtttctcacccatacctatatataaaataggtttgcctgtgatagccttaattgataaagccgccccacctcttgtatcaccatctaacttagtaacgataataccatcaattcctattttttcattaaattcttttgcaacattaactgcatcctgacctgtcatggcatctacaaccaaaactgtctgtgtaagttcaatgttatctctgatttccacaagttcgttcatcatatcttcatcaacatgtaaacgacctgctgtatccaaaataaccacattgttgttattcttttttgcatgttcaattgcagcctttgcgatatttaatggtttctgcttgtctcccattgagaatacaggaacctgctgtttctcaccgttaatctttaactgttcaatagccgccggtctgtaaacatcacatgctacaagaagaggtctcttgcccttagccttaagctttccggcaatctttgctgttgtggttgtcttacctgcgccctgaagtcccatcatcataatgacagtgatttggttatcaggcaaaagctttaattcagtagtttctgaccccataagattagttaactcttcattaactatcttaattaccatctgccccggtgtaagactgttcattacatcctgaccaacggctctctcgttaactttcttaacgaaatcctttactaccttaaagttaacatcagcttcaagaagtgcaatctttacttctttcagcgctgccttaacatcttcttctgttaagcgtccttttcctctaagattcttaaatatattctgtaatttatcggataagctttcaaatgccaagcccatacctcctagtaattctctaaaatatgctgtgcaatctgtttaattctgttgacattgcactgattatcaggttcgtcagctaacttacatatctcagcaacatctttcttagtcttagtaaatctttccactaaatgaagcttctcttcatatccgttaagtatcttgtcgcaacgcttaactaaatcgtgaactccctgcctggaaattcctctgtcctgtgctatctcaccaagacttaaatcgttaagaataaaatcttcatatatttctttctgatgttctgttaataactctccgtaaaaatcatataaaagagagcttttaaaaatatccttcatagccacaccttttctcttacctttggtataatacactaaaaaaaatagagtgtcaagtattttttcttgacacccgcaacttttttatttttaaagacttggagcaatttcctttggattatatcctgctttatttaaagccttaagaatctgctctttgtgattgtggccaaagcactctaaagtcactttcaattccactgcagcatttctgttaactgatacaaactggttatgttcaagctttataacgttaccctgctgctctgcaatcttgtttgcgacctttacgagttcacctggcttatcaggaagtaaaacagatactgtaaatacacggcccctctggataagtccatgctgtaatgtagaagacattgtaataatatccatattaccaccactgataattgatacaatcttcttatctgtgcatttcaaatgttttaatgcggcaattgtaagtaaacctgagttttctgccacaagtttatgattttcaaccatatcaagaaatgcatcaataagttcttcatccttgattgtaataatatcatcaatgttttcttttatgtatgggaaaatctttgttcccggagtcttaactgctgtaccatcagcaatagtattggcacttggaagtgttataacttctcctgcttttaatgaagccttcatgcaggctgcattttcaggttcaacaccgattaccttaattcttggatttaacatctttgcaagtgtacttacacctgtagcaagtccgccacctccaattggtacaagaatataatcaactgttggaagttccttaaaaatttccattgcaattgttccctgacctgtcgcaacatcaaggtcatcaaaaggatgaataaatgtatatccctctttctgtgcaagatttaatgcataattacatgcatcatcataaacatcaccatataaaataacatctgcaccatagctctttgttctgttaactttcataagtggagtaactgtaggcattactactgtagcctttaccccaaaaacctttgccgcatatgcaacaccctgagcatggtttcctgctgatgctgtaataagacctctttctctttcttcatccgaaagagtgcttattttgtaatatgagccacgaactttgtatgctcctgtaaactgcatattttcaggctttatataaacctgatttcctgtctgatcactaaaataatcactataaataagatttgtatttaatgttactttttttactatttcactagcttcctcaaatttctttaaagtaagtttctcttccattatgccacttccttttactttttatttctgaatctgctctcccaattcaatgtcgcttgttatgtcttcgccattttcttcaaataacgcttcaacaaactgatgtgaatcaaacttctgtaaatcatcaatctgttcacctacaccaatatacttaacaggtattccaagctctgactggattgctatggcaataccacctttggctgaaccgtccatttttgtaaggattacgcctgtaatatctgtacattccttaaactgtcttgcctgagccaatgcattctgacctgttgttgcatctaagacaataaaattctctcttcgacagccattatattccttttcaatgattctgtctaacttttttaattcttccataagatttttcttattgtgaagtcttcctgcagtatcacataataatatgtcagcgtttttattctttgcagaactaatggcatcatacaatactgaaccgggatcagaaccttccgctcccattacaatatcaacattcgctctgttagcccactctttaagttggtcagccgctgctgctctaaacgtatctgctgctgcaagtacaactttcttcccattatttttaaactgactggcaagttttccaattgatgttgtttttccaacaccatttacaccaatcataagaataactgatttttcattttcaaagtcgtaagcattttctcctaagtccatctgttcttcaatgttcttaataagcaattccttacattcaataggctctttaatcttgttctctttaacctgttcttttaagttatcaagaatttcttctgttgtattaacgcctatgtcactcattataagaatctcttcaagttcttcataaaaatcatcatcaatacttgaaaagccgttaaatattgagtttaaattagaaacaatattatttcttgtcttggttaatccgctgacaagctttttaaaaaaattagccatttatgtctccttttttaattaatttaaaatcataatttgttttcagcttaattatttggttaaactattttctaataaatcaactgaaactaatgctgaaatacctttttcctgcatcgttataccataaagtctgtctgcacaattcatagtcccacgtctatgtgtaataacaatgaactgtgtgttcttagtaagcttatgaaggtattccgcaaatcttacaacgtttgaaccatcaagtgccgcttcaatttcgtctaaaagacagaacggtgacggtttaaggttctgaattgcaaataacaagcttatggctgtcaaggctttttctccaccggataactgcatcatattctgaagcttctttcctggtggctgggaaataatgttaattcctgcatcaagaatatcatcggcttccgtaagttcaatagtaccttttccacctccgaaaagttctttaaatacattatcaaattcaaccttaatctcttcgaatttctccttaaactgttttctcatgcccacttcaagttcatcaattattttaagaagattttctcttgcttccataagatcatcatgctgccctttcataaactgatatctttcattaatctccttaaattcttcaatggcattaatgttaacatcaccaagagacttcatttctcgacgtattcctgctatgttttctcttatggatgacttatcattaaaatcatcactcttcaattcaaaagcttttctatacgtaatttcatattcattccacatatagctttctttattttctaccttttcttccaaagcttctttctgtgaatttaatctgtaaacttccttatcaagttcagaaatatgtttagaaagattttcacgtttttcgaagaagtctttatgatcagcactttgcttttctttcttttctttttcttcttcgatttctttgtttaatctttcaatgtcctgtctgctcttatcaatttcttttacaaagcggtcaattgcgtccactcgtgcactgatttcttcattattctcgttggaattaactttaatctgctgaagttctctgttaagactttcaattatttctgttgacttatttattctttcaacaataaattcgtgtttctgctttaagttggctatttcaatgttaacctcttcaagtattccgtttttgctgttaagaacttcctttaattcattaagttttttagttttttcaacaacctgtttttcaagttctgaatttctgtcctccgtatcactaagttcatcacttaacttgttattatttttgttaatatcctgaatttcagaagcaatattgttactttcaagagtaaatccctgatactgtgtaataatattgtctttctgggtttttgcctgttttaaattaatttcaacagtatttttaataatctgctgttcctgaagtcctgcattaatcttgtttatttcttcattaacagcacttgtattacttctgttatcaagtaattccttgtctaaggcactcttttcttctcttaatttagaaatatacttttcaagttcatcaatctctctacgtcttcccaaaagattgctgttattcttaaatgcaccaccggaaatcgaaccaccaacattaaggtattcgccttcaagtgttacaattcttactgtatatctgtatttacgctcaatggaaatggcattatcaactgtgtcgacaaccattactcttccaagtaaatattttgccacgccttcgtattctttcttaatatcaaccaaatcactggcaagaccaattacacctttttcttccaaagcatccggagcattaaagttggtcttgttgctcatactgcttaaaggcaaaaatgttgcacgaccaaatctatgttttttaaggtattcaattgtgtccttagctgttgtttcagtatcagttacaatattctgaatatttccacctaaagcagtttcaatggcaacttcatacttcttgtctactttaataatatcagcaactacaccgataatacctttctttgtatctttaagttccattaccttcttaatactgtttccatatccttcatatctttcagtaatgttctttaaagcttcaagattagacttagtcttgtgatatttttcctgattttttgccaaagcagcagttatttcagagttttttgttctaagttctgccaaatgttgtctgtaatcgcttaactgttcagttacctgcttgatttcttcttcaataccttttaactgttcttccaattcagcaatcatagcatcctgagaatctttctgactctgaaattcaatcagtttctgattaagctgagactttctaatattaatctgttcaagtaaagtatcacatctctggattttagtcttaatcaaagactttgcattaagtaattcaataatttcagccttattgctttcaatttctttttcaagttcaacatgctcctggtttactgaagccatttcttcacttatttcagtctgatttacaacaatttcatttaaagacttttcattttctcttttttcttcttcagacttagccaactctttactctgagtatctatctcccctgtaattgactgtattctctgattaatatatgattcgttattttttgcagaattaatctgttccttaataacattaatctgaccttctaatttttctacattaattattgtttcatttaatgttgtttttttattttcaatagaagcattaatttcttcaattatctgctccaactttgtgtagtcagcttttattttttcaaattctgcattagcgctttccatatctgatgaagcaatttttattttttcatctatttgggaaagtctgtttctgatttcattaatttcaataagaaacatattaacgtcatttactcttaagtcctctttaagaactaaatatttcttcgctttttcgcactgtttttcaagtggaaccacctgacgttccaattcgcccaaaatatctgaaacacgaaccagattctgattctggtcgtctaactttttcatagcatcatttttacgtctcttaaattttacaattcctgccgcttcgtcgaacagttctcttctctcttccggcttgccactaaggattctgtcaatctgtccctgaccgataattgaataaccttccttaccaatacctgtatcgtagaaaagctcatttacatccttaagccttacctgagttccattaatcatgtattcgctttcacccgaacggaataaacgtcttgaaacagtaacttcatcatagtcaatgttaagcttgtggtctgcattatcaaaagtaattgccacatacgcatatcccataggttttctgttttctgttcctgcgaaaataacatcttccatctttgaactacgaagttgtttagttttctgctctcccaaaacccatcttacagcatctgcaacattactttttcctgaaccgttaggacctacaatgcccgttattccgttgtgaaactggaagtttattttatttgcaaatgatttaaatccatgtatctctatattttttaaatacattctaattcctcttatctaaagtttttaaggcatcaaacgctgcctgctgttctgccgctttctttgtatgtccctgacctttaccgataatcttgccgttaagctttgcagcagcttcatatgtcttattatgatccggtccccattccttaattatttcataaacaaggttttcgttctttacagaattaactctttcctgtaacacagttttgctatcataaaacagtttcttcttctctatgtcatttaaagcaaactttaatataaaatattttgcttcctctattccaccatcaaggaatatggctccgataagtgcctcaaaagcatccgaaactatggaatctctctttctaccaccagtttcatcttcaccttttccaagataaataaaatcttccaaatcaatctctcttgcatccattgccaaagtaggctcacaaacaaggcttgctctaagctttgtcatctttccttctggcatatctttcatattcttgtacaaatattcacttgatacaagttctaacaccgcatctccaagaaattccagtctttcattgtccttcattcccttatgcttatgctcgttggcataagatgtatgcgttagtgcattaattaataaatctttgtctttaaagcaatatcctatattactctctaatttttcgtaatcagtattcacgttttttcctttctcttgattcttttataaaaaaatcaaactttattaataatgcccttttgcttttgttctcttacggaaaattttaagcaatttccaataagagagcaaaagccccggcaatagggcttttagctttcataatctcttctaaaattatattctttaataattttagtctttataattctttctttatagcttcgaaagcatctcctgctgttacaatattttctgtagcttctgttggaatcttaattccaaattcactctcgattcccattacgatttcaagtacgtcaagggagtctgctcccaaatcttcaacgaacttgctatccggtgtaatctttgatgcgtcaatatccaaaacctctgcaattgcatttgctaatctttcaaattccataattaatcctccattgttaatttttctttaattttgttatttaaatccatttccttaaaagttgcacactggaaaatagaattttttatttctacagcttttgaattaccgtgtgtcttaacaagcaatcccttaagtccaagtaatggtgctccgccgtattcttctatttggaaagtctttaaagtcttctttaaatccttctttataagtaaagctccaagtttattcttgataccattagtaatagttcccttaatcttcgataaaagtactccgccgacaccttcgtaaagtttaagaataacattacctacaaaagcgtcacaaactacaacatctgcaacaccttcaggaatctctcttgcctcaacatttccgataaagttaattccttttgtttcttttaataactgataagcttcttttgtaagagcatttcctttttcttcttctgcacctatattaacaagtccaactcttggattctttactcctacaatattttccatataagtagcaccaatcttcgcaaactgtacaagatgtgatggtcttgaatccacattagctccacaatcaattaaaagtgcagctccgttcttcgttggaataagtggcgcaagaggtggtctctgaacacccttaagtcttcctatgataacgtgaccaccaacaaggttagctcctgtacttcctgctgaaaccattccatcagcttcacctttcttaaccatatacaagcactttacaagcgaagaatctgttttctctcttattgctgcaacaggcggttctcctgtttcaataatttcagtagcattaacaatctctaactgatcactgttatacttatacttgctcaattcttccttaatctgttcttcaacacctacaagtttaactaatatatctttattttcatttgtagcttcaacagcgccctttacaatctcaaaaggtgcgttatctccgcccatacaatctaatgcaactattgtctttgacatataatgcctccttttttcgcatatagaattactatactaaaaaaacggtgcaaaatcaaggtttgaggttttgtgtataactttatttgttatacacatgacttcgtcatgcataacacttcgaatttgctccgctacttctcagtgattatacattcgccccataattcctttcttatacaagtataaaaggaattatggggctcattgtgtataacaaaaataagactctgtgaaaattcacaaagtcttatttttataattaattccttattgacgaaatctttcgtttaataattagtcaactgaaacgatttctttcttgttgtagctaccgcatgccttgcatactctatgtggcatcattaactctccacatttgctacatttaacaaggtttggagctgacatcttccagttagctcttctcttatctcttcttcctttagaagatttgttctttggacagatagacatggtttacacctccttaaactgattaaaaatatctaatattttcgacattctcggatcgagttctgcgtcatcgcacttacaagatcccaaattgagattagcgccgcatctattgcaaattcctttgcagttttcacggcaaagaactttcataggtaaattaaccagaacctcgttatgaattaaaacttcagtatcgaagcttgtaccttccaaataataatcttcgtccagttcagcaatcttctcttctgctgttttattcatatccaagtctttgaaataatcaatatcaatcttgtaatctaccggctctaaacatctgtcgcaaggtatctccaaaacaacaaatccttcacatctggaggatatatgtttctttccttcattatgaaaagaaagttgcaagtcataatccttaattttatatgaagctgttgatgtttcgaacacgtctgcttccaactgtagatgataacttctattgccattatcttcctgtaaaagctcatgtaaatcaattatcataatatcctcttttcaaagacaccttaacaattatacatatcagtgccttatttgtcaaatactttttatttatttactatttctactgtctctcttgctattgcaagttcttcatttgtaggaacaacaaatactttaaccttagaatcttctgtcgaaatcattacctcttcacctctgctatcattagcttcgtgattgattttaactcccatatatcctaaatgttccattactgcagctcttacaaacttgttattttctcctacacctgctgtaaaagcaatggcatcaacaccgttcataactgcaatgtaagctccaacaaaccttacaacctgtctgatataagcatcaaatgctgacttagcctttgcatttccatcttcaattgcctgagttatatctctaaagtcgcttgaaacttctgaaagtcctgcaacacctgattccttattcaacatattgataacctggtcaatactaagaccatcctgttttgcaataacttcaataatacttggatcaatatcacctgaacgtgttcccataataacacctgcaagtggagtaagtcccatacttgtatctacagacttgccaccatcaactgcgcaaatacttgcgccgtttcctaaatgacaaacaatagtctttagttcatcgtatggcttgttcataatctcggctactctctttgaaacaaaactgtgagaagttccgtggaagccatatcttctaatcttattttcatcataatactttcttggaattgcatataaataagcactttcaggcattgtctgatggaaagctgtatcaaaaacaactacattaggtgtgtcaggcattaagttcatacatgccttaattccaataatgttagccggattatgaagtggtgccaaataattgcattcttcaatcttcttaataacatcatcatctactaaagttgcctttgagaaatattctccaccatgaacaactctgtgtccaacagctttaacttcactcatatcattaataacacctgtttctttatttgtaagtgctttgataactgcatcaatagcttcatgatgcgttggcatatcaatgttgcttacttctttttcaccacctgttggctgatatgttattacactgcctttaattccgattctttcgcaaataccttttgctagtactttttcgctgtcagaatcaatcaactgaaactttaatgatgaacttccacaatttattactaaaacttccatttctaaactcctaatttctgctaataattttatgttttttaattaatctgcgcctgaactgctgttattgccacaacacctacaatatcttttgcactacatcctcttgataagtcattaaccggctttgcaatcccctggcaaagtgggccgtatgcctctgcatttccaagtctctgaattaacttgtaaccaatattacctgcatccaaatcagggaaaataagtacattagcctttcctgctacagggctgtccggtgctttaagtgctgccacctctggaacaactgcagcatcagtctgaagttctccgtcaatcaaaaactgaggatattccttctgtgcaatctttgttgcttcaacaaccttgtctacatccggatgtgctgcacttccatgtgttgaatgtgaaagcattgctactcttgccttctcccctaccaaatattcaaatgactctgcactgcttgcagctatatctgccaactgctccggattaggattctggttaagtccacaatctcccataacaaataccccatcagcgcctaattctttgttctgtacgcacattacaaagaaagctgaaacaagcttgcttcccggcttagtcttaataatctgcaatgatggtctaagtgtattggcagatgagtggcaggcacctgaaacaacgccgtctgcatctcccgctctaaccatcatacatgcaaaatacatataatcgcttacgagcattgcataagcctgagtttctgtcattcccttagcctttctaagcatataaaactcttcagcatattctttagtcttaacacaatccttaggatctatgattgttacattttctatgtcataacctttcccatatttctccgcctcttcgggactggccaaaataataatgtctgcgaaatcttcttcaacaatctgttgtgctgcctcatatgtacgtctatccattccttcaggaagcacaatagttttcttgttagattttgccttgatctttagttgctcaataaaacccatttctattctccttaaatccttatattttccaatcataattattataatataagatttttcaataaacaacacctatttgttccctaatcaattgaaagtttagttcaataatgatagaatcaattcctacgaggtaaattatatgaaaattgttggaattatagcagaatttaatccatttcataatggacataagtatttaatatcaaaggctaaggaagtatgtaatgcagatgccgccgttattgtctgtagtggaaactatgttcaacgcggtatgcctgccattattaataagacttcaagatgcgaaatggcaatgctaaacggagctgatttggtaatcgaactacctgtcgtttactctactgcatctgccgaattatttgcaacagcttcaattgcattattagattctcttaactgtattgattatctatgttttggttgtgaaacagattcaatagatcttttaaacacagttgcagaaatattaataaatgagccaaaagaatataaagatttacttaccttaaatttaaaaacaggcatttcatttccgaaagcccgtgcaaaagcgttagatgaatactttaagaaatacaacttagattatagtctaaatattaattctaataactatgcaaaatacccttccgatattacttcaaatagcaatttagatattaatacttttataaatcaaccaaacaatattcttggaatagaatatataaaagcacttatgcgatttaactctaagataaatcctgtgcctcttaaaagacttggtgccggctatcattctcttgatacaagaacaaaacttgcttctgcaacaggaatacgaatagccatggctaacaaagacaacatttcaggtcttctgcctgataattgcctaaacattataaaaaaccacacaaccatagaatataatgacttttcaactgttctgggaagcaaacttctatcaatggatacattagaccatatagaaggaataaatcaggacttatcaaacagaatagcaaacaacaaatacaactttacagatatagaaacttttataccaatgctacagtcaaagaactacacatactcagctatatcaagagcattactacatatacttcttgatataaaaacagacgacctaaaagagttcgtaaataacaactacgcaatgatattaggatttacaaaaaaatccggcgtcttatcagaaataagcaaaagaacaaaaataccactggtaagcaaatttgcgaccttttataaagaggctgataacaatcagagaaaaatgttagacataaacttaaaagccgacaacctatacagaatgatatatatgaacaaaacgggtgaaacgttaccaaccgaatttcagcgacaaataataataaaataactatcactttatcttttatattcttttttgcatcctgtacccagatataataatttttcttaaatttctgggtacataatctgcaatatcaatatcctctaacttagtcatttaatctccccaaaaaagctgaaaattcaaatctcccgcctccatttatttgaatattgtcaaaaagaggatgcatgcaaacacgctacgtatatcattttgctccgtcgtctattgtaaagcgaaaccttaaacccgcctactgctcaaacagtaagttttacgctttacactatacacgcaaaattttgaaaagttgcctattgtttgcaaaacatcctcttttttgacaatatataaacaaatattaatttttaaaactatgaattggtgcaggtattctacctgttctgttaacaaaagcatcacaagagaaactgttaaccggcataattggtgcataacctaataagccaccaaattctaccatttctccaactccctttccaattacaggaattactcttactgctgttgttttctgattaatcataccaatggctgattcgtcagcaataatacctgcaatagttgttggttttgtgtcccctggaattgctatcatatcaagtcctactgaacatacacaagtcattgcttctaacttttcaatgcataaagcaccttcctttactgcatcaatcattccctgatcttcacttacaggaataaatgcaccacttaaaccaccaacatatgatgaagccattactccacctttcttaacctgatcatttaaaagtgcaagtgctgctgttgttccaggtgcacctgttctttcaagacctatttcctgcaaaatatcagctacgctgtcaccaattgcaggtgttggtgccaatgataagtcaactataccaaaaggaacgtttaatcttctgcttgcttcttcagcaacaagctgaccaactcttgtaaccttaaatgcggtttttttaatcgtgtcacagagaacttcgaagttttcccctcttactttctttaatgcgtgtcttacaacaccaggtcctgatacacctacgttaataattgcatcagcttctgttacaccatggaaagcgcctgccataaatgggttatcatccggtgcgttacagaatacaacaagtttagcacagcctaatgaatcctgattagcagttttttctgctgttttatgtactatttcgcccattagacgaactgcgtccatgttaattcctgtttttgatgagccaacattaactgagctacaaactctttctgttacagctaatgcttcaggaattgaacgaataagattttcttctgcaggtgtcattcccttattaacaagagctgaataaccgcctaagaaatttacgccaacttccttagctactttgtccaatgtttttgcaattgtaacaaaatcttcaggtttcttacacgcactgccacctatcaaagcaataggtgttactgaaatacgcttatttacaatcggaataccatattcctttgaaatatcttcacctgtctgcacaagattgcttgccaatcttttgattttgttataaatattattatttaatgtttcaaggtcgtcacttatacaatccagcaaactaatacctaaagtaatagttcttacgtctaaattgtaattttcaatcatcttatttgtttctgttacttcaaatctgttaatcataaaaccctccgattaaattctgtgcatgctgttaaaaatatcttcatgttgcattttaatactaacaccaatcttctcacctaatttatcaaggtcatctgaaagttcataaatcggcttagaagccttattacaatctacgatcatcatcatgttaaaatattcctgcacaatagtctgtgaaatatcaaggatatttacattgttttctgcaagatatgaacatacccctgcaataattcctactgtgtctttgcctactactgtaataattgttttcttcataaagtcctccttttaaaaacttctctgtgtgacttttttacacaaagaatgttggtttttattaaaattcaacaagacaggatggttttactctgcttgcgactctaatatcaagattatctgcctgatatttttcagggctaaaatttatttcatttctgactgcctgataggcaagttcaggatagttgttttcttcgcttaaatgacctaaaagtatatgctttaatctgtcacttaaaagtcggttcaacaatcttccacaagcctcgttggacaaatgtcccttgtttccccaaattcgctgttttaagctatatggataaggtcctgtctgaagcatgttaacatcgtggtttgactcaattaataccgcgtcaagattttgaagacttgataccaacttgtcatcgtactcgcctaaatctgtaacaactgcacaagatttttctttttcaaagaatctgtagcacacaggatccgccgcatcgtgactaatatgtagcggtaacaattcaatgtccttaatggaaaaatctctatcaggcttaattacattaaaaagatcactgtcaacctttccaactgttttattgttaagaatacagttaatagtgccttcagtagcataaacaggcacttgatattttctaagaaaaactccaagtcccttaatatggtcactatgctcatgagtaattactataccatctatgttttcaggctttttcccgaaaaactccaagccttcttctgccttttttctgcttattcccacatcaactaatattgatgaattattattttccacaagaatacagttacctttactgctacttgatattgacgataatttcatttgtgtacctctaaactttcccatacattttattgtattttgtgattattttcaacctatagcagtaataaaaaaaatttttaataatattatatataaaaaacagtgataaatttaatgttaatcctctctaaatcagtacgctcaaaaaaatatgtgtattcttttgtatgtctttttatcatggcatgctgtattatatattctgtcaatattacaaattatgtaattttgggaataaaaatatgcttgtattctgttattccttcactacttccttttatgcttattactaactatatgcaggctcacaatctttgtactacagtttctgccatatttcactccatttttaacaaattgatgagcttgtcggaatatggaacctttgccttaataatcggttttacaagtggttatcctatgggtgcaaaaataattggtgatttgtattctgccaacaatatttcttttaaagaagcaaaacttttaataaccttttgtaatatttcaagcatttcttttctgataaattatgtattaaacaaatgccttaataactgtattccaccctggttaataattctttttgtttatttgcctccattactaacaggcttgtttaatagtcgctttataaaatttacaaataataacaacactgtacacacagaatctactttcaattcaatacttgcaactttttattcccttgccaagcttagcatatatattatctgctttaacatcctagttaattttataattaacattaataagataccggtactgcaaaaatatataattgttggactaacagaaataaccaccgcttcattatacatatcaactgaaagtaatttataccttaaaatatatttaacatgttcttccattatattaggtggtttaagtattatgttccaatcctttagttttcttaataactctgctttaaagaaatattatgttcttggaaaaatagagcaatttcttattttcaatataatatttttcatatggatgtcttgtaattaatagaatttctattaattgttccataaaccacaagaaggcaaaagtacactggtacttttgccttcttgtagtttaaagctataataaatctactgataaattgtcatcttcaccgtcttctacagattcttcgtcctcagctccgccaagttcttttctgctttcaacaacaacatttaatgagctgttaagtgatgtcatcattgtgttctgagcactttcaaagctatccatacctgttgataaaatgctctgaacatttgcaagaatatcatccgtatactgcatagctcttgttcttaaatcgttagcttctgttgtagctgaatctaaaattccctgagcttctgcctgagcctgttcaataatctggtttgcttcttcgtaagctttctgcataatttcatgttcgcttacaagttgattaatatgagctgtagcttctgaaaccatagcttctgctcgttctttggcatcatttaagatagcatccttattagcaataatcttctgatacttcttaatttcatccggtgttctaagcctaagttctgccaacaattcatcaatgtcatctttatttacgataatctttgatgttgataatggctgaaatttacaattatcaatatattcctctatctctgtaataatctgttcaatcttactcatttttttctcctttatcctttaatctttcatatacctgattaacaacactttccggaacaaatctgctaatatcagctccataaaacgcagcctcccttacagtacttgaactaaggtaagcatactccagacttgttgtaaaaaatatagtatctatattatcatccaatatagaattagtctgagacatctgtaactcatattcaaaatccgttacagctctaagacctctaacgataatctgtgcatcaatcttcttagcaaagtcaaccaacagcccctcaaatgacataaccttcacattagggatatccctgaccacttcctccaacattttaacacgattttctactgaaaacaacggcgttttagaattattattcaaaacaccaactaccagctcatctacaatcttagaagctctcctaataatatcaagatgaccaaaggttaccgggtcaaaacttcccggataaattgctcttctcatatcactctcctataagtttaagaaatacatgtttgttagtcttatattccttttcttttattatttcatatcctaattcactggcatatgaaaaatctgtatccaaagatgcttcaacgattatccttgaacttttatttattaaatcagatttgctaagaaaaatcaatacatctttttcataaagtttatcataaggtggatccataaatataaaatcaaacttaactttatgttctaagtctttcaatgctctttccacaggcattgccataacaactgcaccatcctgtaattttgtaaaattcaaattatccttaatgcattgtacagccttcttattactctcaacaaaataagctttggaagctccacgacttaacgcttcaatgccaatggctccgcttccactaaacaaatcaagaaaaactgcctgcggcatatcgttatttatcatgttaaataatgtttccttaattctgtctgttgttgggcgtgttcccataccgtcaattgttttcagttgtaatcttctcgccttgcctgctataactctcatttaaactccctaattaacaaaataatcttttaagacaaaaagcaagcaactaagtgcctgctttttgttattatgacgagtcaatctaactcaataatattattcctcagttgtttcttcaacttcttctgcatcagtttcatcttcctgtggaagtaaagctttcatgcttaagctaatcttcttttcttcttcgttaaaatcaacaatcttagcttcgatttcctgaccgattgttaattcatcagatggcttatcaacgtgatgatttgcaatctgtgatacatgtaataatgcatcaacgcctggttcaatttcaacaaaagcgccaaaatctgtcattcttgcgactttaccagttacaacaacgccaactgcaaatttttcacttgcattagcccatgggtttgtatcttcaaacttaagacttaaagcaatcttatcgccattgatttctttaatgaatgctgttacttcatcgcctggtttaaagagttttctaggatttccaactcttccccatgacatttctgaaatatgtaacagaccatctgcaccaccgatatcgataaatgcgccaaaatcaactacactcttaacaacacctgttactgtctgaccaacttcgattttttcgaataaagctttcttagctgcttctttttcagctacgattaactgctttctgtcaccgataattcttctcttcttaggattaaattctgtaactacaaattcaatttcctgattaagatacttatctaaatctctttcaaatgcatctgatactaagctggctggaataaatactctgccaccttcaacatcaacactcaaaccaccttttaaaatctgtacaactggtgctttgagaacttctttattttcaaaagcttcttcaattcttttatttgccttctctgcagcaagcttcttgtatgataatgcaacctgtccttcaccatcgttaactttaagaaccttaactgtcagttcatcgcctactgaaattacagttgtcagatctaccggtgtgttagagtattcattgctagtaagaataccatcagccttataaccaatgttaaggactgcctcatcaggtcttacactaatcacctttccttcaagaacttctccattatggatagtcttaaatgtttcatcaagcatttgttcaaaactcatttctgacattcagtacgaacctcctcaataatattctttggggtggatgcccctgctgtaatacctatagacttcaatgatttcaattcatgtaaatttaagtctttcaccgtctgtacatagaaagtattctcacactcatttcgacatatgtcataaagcttctgagtattggaactgttctttccaccaattacaatcatcccatcaactttggatgaaattttccgggcctcaacctgtcttacatgtgtagcattgcaaatcgtatttacaacagtaatatcataccccttttttcttataatttcaactaaatatttaaatttattgtggttaaatgtcgtctgggacacaatacacgctttagtttgttccggtaaactcagtttttcaatctgttcttctttatttataacaataacttctccatttacccatccttttataccttcaacttcaggatgattgtcatttccaataataattatggtcttaccgttattactttcatccaaaacaatattgtgaattttctttacaaaaggacatgttgcatcaaccatttttaatttctgttgtttcaaaacatcatatatttcttttgcaacgccgtgggaacgtataacaactgttccttctttaatttccttaagctgttccacagtatctataacttcgatgccttttttattaaggtcttcaactacctgttcattatgaattattggaccaaaggtatatatttttcctgaattctcctccaattctttataaacactgtcaactgctctttgaactccaaagcagaatccggcactttttgccaccgtaatttccatattcttctccattactctacattcatttgaatgtacaaaattattttactaattttgtaattgcttcaactacctgttcaatagtcatatctgatgactccacaagaacagcatcttctgcctgtaccaaaggagaaacctctctgtgcatatctctgtaatctctgtcgatgatatccttttcaatatcatcaatattacatttctgtcccttttcaacaagttccttatatcttctttcagctcttgttcttgaacttgctgttaaatatatctttaaatcagcatttggaagtactgccgttccaatatcacgtccatccattacaacgttattctttgctgcaagttcctgttgcattttaactaaaatctctcttacaggtccataaacagctattgcactagtcatatttcctataacttcctgtctgatttcaatgcttacatcttctccattaagataaaccttctgtgtgccgttttcatatcctaaagatacatccacactcttgcatttttcaataacttcttccttctggtcagctttaattcctgctctgtaacatgcaagtgccattgttctgtacattgcacctgtatcaacataaatataacctaattcttttgcaactatttttgctattgtgctttttcctgctcctgcaggtccatcaattgctatattatacataattactcctttttcaccggctgcttttgcagtctgacaattactttattactataccatttttttactaattaataaatactgtttcctgcaagatatcctgtactccatgcaatctgaagattatatcctcctgtcattgcatcaagatcaagaacttcgcctacaaagtatatattaggcataatttttgattccattgttttaggattaatttctttgattgaaattcctccctttgtaattattgcctcattatatcctcttgttcctgaaatgtgaaccggaagattcttgatgattttcacaagattttctcgttcttcctttgttatctcgtgaactttcttataaggattaatttttgcaagctctataattacaggtatcattttcttaggcaaaagtttttcaatggcattattaaagttcttattaattccatcctgaaaatctttcaaaattcgcttgtcaagcatttcttcatccaatgccggttttaagtcaatatatcctacatattgatgcttttttaatgtatcacttaaatatgcactggctgataaaactaaaggaccacttatgccaaaatgtgtaaataacatttcgcccattttgctataaggtacctttccattttcatccttaattgttaaaatcacatttttaagagataatccctgtaatcttttacaatattcttcttttatgttaaatggaactaatgaaggatatgtttcctctattgtgtgccccatattttttgcaaacttgtaaccgtcaccggttgaacctgtagacggataagacaaaccacctgtggcaattatacatttgtctcccataaagtcttttccatcaaagcacttaactatcactcctgacgcatcaggcaacacgtctgttacatttttattcaaatgaacatttacaccaacgtctttcatcattttgcttaatgcccaaattacatctgatgacttatcactttcaggaaaaactctatttcctctttcaatttttgtttttacaccagcactttcaatcatattgcaaatatcttcgtaagaaaaattattgtatgcactgtataaaaacttagaatttctcataatgttagcaaaatggttctgaatatctgaagcatttgtaatattacatctgccctttcctgtaataaatatttttttgcctaatctatcatttttttctaataattctactgtatttccattataggcagcaccaattgcagccatcatacctgcagctccgccaccaattactattactttactcattattctccacaatctttttcattaaagtaaaaggggcattaactgccccttttaatgaataatctaattactatattactcttaaatattaaaccggataagctccgttttctttgtctgctatagactgatcaaccttagtctgctgagcttctctatattcaaagaattcttttgcaacctgtgggaataacgcatatgataatacatcttcatcctgctgtttccactgtgcacattctttttcatatttttcaagtgatggctctaacaaatctgcaggtctgcatgtaataggttctgcatcaccgatagccttcttctgtacttcaggattgaaaggcttaacagtctgaccatatttacctgcaagtaaatccttagcctgctggttaatcatcttatatctttcgcccataactacgttaagaactgcctgtgtacctacaatctggcttgaaggtgttacaagaggtggttcaccaaagtctttacgtactctaggaacttcttctaatacctgttcaaacttatctgatgcacccatttcatctaactgagaaacaaggtttgaaagcataccacctggtacctgataaagaagtgtattaatattaacacccataacctttggatttaataatccgttagctaagcattcttctctatatggtttgaagtaatcagcgatttcctttaataatttctgatccaagcctgtgtcatatggtgttcccttaaatgtttcaaccataacttctgttgcaggctgagatgtacccattgagaatggtgaaatagctgtatcaataatatcacatcctgcttctacagcctttaagtatgtcatagctgctacacctgatgtgtaatgtgtatgaaggtcgattggaatgtctgtaccttctcttaaagcctgtactaattctgtagccttgtaaggtgtaagaagacctgccatatctttgatacaaagtgagttagcacccatatcttcgattctctttgctgtttctttccaataatcaagtgtgtaagcatcacctaatgtgtatgaaagagctatctgtgcatgtccgccttctttattagctgctttaactgctgtttcaaggtttcttaagtcatttaagcagtcgaaaattctgataatatcaattccgtttgctaatgacttctgaacaaagtattcaacaacatcatctgaataatggctatatcctaaaatgttctgtcctctgaaaagcatctgtaattttgtgttcttaaatccatctcttaactttctaagtctttcccatggatcttcttttaaaaatctaagtgaagcatcaaatgttgcaccgccccagcattctactgcatgatatccaactttatccatcttgtcgataattggaagcatttcttcagtaggcattcttgtggcaatcaatgactgatgagcatcacgtaatattgtttcagtaatttttactggtcttttttctgccattttattttcctccgttatcaatattaaacgccaaatatagccataaatgtacctgcagctaccgcagtaccaataactccggcaacgttaggtcccatagcgtgcattaaaaggaagttagtagggtcagcttctgccccaaccttctgtgaaactctggctgccattggtacggcagaaacacctgctgaaccaattaatggatttacttttccatgtgtggcaacacacataagttttccgaataatacacctgccgctgtaccaactgcaaatgcaactaaacctaatactacaatctttaatgttgcaacatttaagaacgcttcagcactagttgttgcacctacacttgtaccaagcagaataactacgatgtacataagtgcgtttgatgctgtttcctgtaactgttttacaacacctgattctctgaataagttacctaacataagcataccaaccaatggtgctgttgttggtaaaatcataactacaacgattgtaactatgatagggaataagattttttcaagctgtgaaacaggtctaagctgttccatcttaatctttctttctttttcagttgtaaacaacttcataataggtggctgaataattggaaccaatgacatatatgaatatgccgcaacagcaataggtcctagtaactcagtctgtccaagcttacctgcaaggaagattgatgtaggtccgtcggctccaccaataattgaaattgatgcagctgccataccgttgaatcccataaatatagccaggaagtatgctgagtaaataccgaactgagctgctgctccaagaaggaagctctttggatttgcaataagtggtccaaagtctgtcattgcacctacacccatgaaaataagagatggtaaaatactccattcatctaataaatagaagtaatgaagtaacccacctgcttcgccgtcagcaggagctttcatgatgtcaggatacatatttactaaaagcataccaaaagcgataggaaccaaaagtaaaggttcatatcctttctttattgctaaatataggaaaacacaagcaacgacaatcattatatagttgcctactgtaaggctcataaatgctgtctgattaaccaagttttccagtgtatctaaaaagttcataagttacctcctaagttcaataaaaatattgattagttcaatgaggctaatgtagcgcctgcttcaaaagaatcaccaattgcaactgcaatgtttgcaactgttccatcttcaggagcaactactgaattttccattttcattgcttcaaatactaaaattgtttcgcccttctttactgcctgtccagggttagcactaattgataaaactttacccggcattggagctgtaaccttaatgcttccttctgctcctgatgcagcaggtgcagaagctggagcagccttagctgcaggagctgcctttgcagcaggtcttacaggtgcgcttgctgtgcttcctgtttcttcaacagtaacatcatatacatttccgtttactgtaattgtataacttttcattattaattcctcctaaatatacataagtgtactaacgtcttctgatagatctaactacaaagctatcagttgatgtctgttcgcttgcagctatggctgctgcgattactgctattaattccgaatcatcttcttcattagctgtaactgtttcgcttgtttcttcaactacttcaggcttttcttctactgaaggcttctttgtaaatttatccataatctgtgggataaacttaaagcatgaaataagtaatgagataaatataagaaccaagaatactgttcccatacccattaaagtatttccggcagcattagccatcttttcgcctaatgactcctcgccttcacctttagccttaattgtaactgtatctactgatgctccaattgtatcaaagcaatcaacatgtaatgttaaaatataatctttcttttcaaatgccaatgttactgtaacatctactgcatctgtaccgtcctcatctttgttttcaacaacttttacatcgtcctttgatgaaacgaaagctccatatttttctgtatcaacacttttgttatatgcttgaataattgcaactgtctgtggctggcttgaatagttttcttcaacatattctctttcactttcagtcattgttgataactgctgaactaatgatacatagttctgaacaagtgtctttgcatctgccaaagaaatctttccacctgcgtatttttcaagtgaatctgctgatgttgttgtttcaacggcataatcacctaaagtgtcggcattaactgccactgtactcatacacatgcaaacaagtaaagcagtcaggctaaataaaaaacgtaatttttttgttaatttcatatttgcacctcacttacactgttccgtgttttttaccaggtctttcttcaaactttgtatataacatttcaaatgcaccgattaaatactttcttgtgtcaaccggttcaacaatgctgtcaacatatcctcttgcagcagcagccattacactaccctgtaagttctgatattcagcaaccttttcattaataacctgatttgcgtctccacttgcaatttcatctgcatacataatttcaacagcactctttgcttccatcataccaaccttagctgttggccatgcataaacgatgtcagctcctgtagccttgctgttcattgttacgtaagcacttccgattgcatcaccaatgattaagttaacctttggtactgttgcattagcaaatgcataaacaagttttgatgaagccttagcaccatttttttcctgacacattgttgctgcaaatccgtttacgtttgtaagtgtaagaacaggaatattaaatgcatcacagaaatttacaaattcagcagctttgttgcatcccttagctgtaagcttagcatcgaattctgctgcaacattcatgtcatcatcataaaccttagttctatttgcaactgcacctactgtagctccattaagcttaatgaaagctgtaaccatttcaggtgcataatttctctttgcttcaataataaatccgtcatcagaaatattttctaatgccaataatgtatcttcgccacagttttcaattccttctgctgctctgtttaaatcatcatagcattctaaatctgaagcttcatcttcattatttgatggtaatacagaaactaagtttctgattccttcgattacttcagcttctgttcctacgaaatcaacatttcctgcttcttcgctctggaacttagctgatgcattgtcacagatttcttttctgttttctgtaattgcattaggtgagttaacgaataactgtgcattttcaacttccatgaaagtaaaatctgaaagtcctgcaacaatacttaatccgccaccacaattaccgaaaatagctgtaattgttgggattactcctgatgcaagtgactgcttcatataaatctgtccgaaagcatttaagccgtctacagattcctgaagtctaagtcctgtgctgtcgataagaccgataacaggtgaacctgttttcattgccatatcgtaaagacttgcaatttttttagcgtgcatttcgcctacagaaccgccaagtactgacgcatcctggctgtaaacatacactaaaccaccattgataacaccatatccggtaataacgccgtcagatggagtatccttggcctgaatgttaaaatcagtatttcttgcttttacataagcaccgatttcaacaaaactgttatcatcaagaagattttcaattctctgtcttgctgtaactttagctgatgtactcataagtcagtcctccattatatatattgttacatgaaataaatcatgcgtagcaaacaaccaattttttgcctattaaagtttaacctttttcttgtcaaatatcaagtaaaagaagatacttttttacttattttttcattttttacctgatatttacatattgccccgaaaagcaatatttcgaggcaataaaaaaattattttttttagtttttttatacaaactttttcactttgtaatattgtttcaagccaccatagaatctactatgcagttctaactctattatcaatccaatcctgattaattggtctaaagtcttcatcttcaaaataaaccttataccatacaaggaatacataaacagtccagattcttctgctgttatcagcctttcctgctctgtgatcttccattaatttcactaaaatatctgtgttaaagaacttctgtgcagcttctcctgttaacgtttccataaccttattgtaataattatcttcctttaaccaaacacggataggaacagggaaaccaagtttcttcttgttagctgtagcttccggaatatgtctctttgccgcaatacggaaagctctctttgttgcttcatcattgcatctaaagtcaattggaagcttctttgcgtaatcaaataccttaacgtcaaggaatggaactcttgattcaaggcaatgagccatactcatcttatcagcctttaacaaaatatctccctgaagccagaagttagtatcgatgtactgcatttttgcaatatcatttaaatgcgaaactttcttataagcatcagccacaatatcctgtggtgtcttatgcgtaagtttagtttttaatagcttttctctatcttctactgagaacatattggcatttccaataaatctttcttctactgttttgcttcctctgattataaaatctcttcccttaatatcaggcatcttctttgcaactgctgccagtccctttcttacacacttagggatcttctgatatcctttaagagaaataggttcatggtaaatattatatccaccgaaaaattcatcggcaccttcacctgacaaaacaaccttaatctgctccgctgccagcttgtcaacaaaataaagtgcaatacatgatggatcagccaatggctcatccatataatacataacagttggaatagacttaaaatattcttcactgtcaatgttcttgttataattattcttgcctaattctcttacaagaccttcagcatatctgatttcattatatttactctgtttatctaagaatcctactgtaaatgttttattacccggaaattctgaaacaacataacttgagtcaacaccacttgaaagcaatgaaccaacttcaacatcagctatcatatgagcatcaactgtatcatgtacaacttcttcaatctcgcttactgttttctcaaggtcgccgtccatagcaggttccatcattggatcaaaatatctctgaacatctaatttcccgtctttgaaaatcatataatgtcctgcaggaagtctgaatatccccttaaagaatgtttcaggtaatactgaatactggaagcttaaatactgttctaaagcttcttcatttaattctttcttaaatcccggaaattccaaaatagactttgtttctgatgcaaaaattaaattcttattaaataatgagtaataaaaaggcttaattccaaaatggtctcttgcaccaaacattgtattagttcttgtatcccatattacaaacgcgaacatacctcttaacttagataacaaatctgttccatattcttcatatccgtgaataagacattctgtatctgaatcattggcaaacttgtgaccttttgctataagttcctttcttatttccaaatgattataaatctcaccgttaaatacaattgccacatctcctgtttcattgtacattggctgggcaccgtgacttaaatcaataatactaagtcttctatgtccgattgcagcatgcttgtccacatacataccttcatcatccggtcctctgtgagcaattttatccatcatctgttttaggacttttttgctgtcatcaacttcacctataaatccacaaattccacacataactcttttctctctttcattagttaatatactatattaaatgtcaaagcttataaaatagccttaacctgatcttcttcaataatttctttaattaaaactctttcatccatcggatgttttacgcctttaatttcctgataatcttcatgaccctttccggcaagaataattacgtctccatcttttgcattaagaattgcatatctgatggcatcctttctgtcaggaacagtaacatattcaccgtcagcttttttaacccctactaatatatcattaataatatccataggttcctcaaatcttggattatcagaagtaactattgtaaagtctgataatcttgatgaaacttcccccatttcaaatcttctttcttttgagcggtttccaccacagccaaagactgttacaagtctctttggattgtactgtttaagacttgtaagaaggctctcaaggctcattgcattatgagcatagtcaatcataagagtgaatcgctttgatacaggaatgatttccactctgcccttaacttttacattttcaagggctgtctgtatcttttcaacatcttctgtaaaatgactgcaaatagcaatggcacacaatgaattgtatacactaaacattcccggaacatgaatttcaacaggaaagtccatcttaccctttaagtcataagatacgcataagcatcccggctttgtaaataatttaatattctgtgccttaaaatcataatcaccgtttacaccatatgtttcaatgtcgcaggtatgaccttccaaaactctgtctataaaatcagcatccatatttacaatcccatgtttacattgttttaaaagcatactcttgcaatgaaggtaatcgtcaaaatctttatgctcgttaggtccgatatgatcaggctcaatatttgtaaaaataccataatcaaatgtaaagcctgaaactctgtgaagcataagtccctgagatgaaacttccataactacacacttgcatccttgttcaaccatttttgcaaaagtttcctgaacaacatatgattcaggtgttgtattcttcgcaggagtgacttcatcgcctattattgtttcaattgttccaataagtcctgtcttaatgccaacgctttcaagtactgaacgaaccatatatgtagttgttgtttttcccttagttcctgtaataccaacagtaataagtttttcagcaggatttccaaaatagtctgcagacatacatgctaaagctaatcgtgtatcgtctactttaacaactgttacatcttcatcaacttccacatcatccataacaacaactgctactgctcccttagaaacaacatctcttataaatttgtgaccgtcaaaacctgcacctttaatacaaacaaaagcatctccatcacttacttttcttgagtcattctgtaaatgtgatacttcaatagtatcgctgcccttaacaaccttatattctaatttagttaataactcttttaatttcatttttttcaccaaacctttgtatcataattttaaagaaactccaaaattagtaattaaactcccctgtaaaagttattcttgcaggacctgtcatataaacagtatcttcatccctgttatactcaataaataagtcaccgcctaaaagtttaacagtaaccttgtcttctgttaagccatttaaaacacatgccacaacgctggcacatgcacctgtaccgcaggctaatgtttctcctgaacctctttcccagacacgcatttttataacgtctctgcttacaacctgaataaattcagtattaacctgctcagggaagatttctttcttttcaaacattggtccaatatgttcaatatctaaagaatctatatcatcgacaaaagtaattgcatgaggatttcccattgaaacgcatgtaattctgtattctttattgttaaccataacaggttcatctataaccttatccttttctgaaactacaggtaccttagcagattccaaaattggacttcccatattaaccctaacagttttaaccttgtcatcttcaacatttaaaactaatgttttaattcctgataaagtttctactgtaattgtagttttgtcagtcatcttattgtcatatacatattttgcaacacaacgtatgccattaccacacatcttgccttctgaaccatctgcattatacatactcattttaaaatctgcaacatctgacggattaataacgataagtccatctgaaccgattccaaaatgtctgttgcttactatttctgataatttatttggatcttctatttttgtgtcaaagccattaacatatacatagtcattgccacagccttccatctttgtaaatttcatagttcctccatttcaagtttgcttgagttttttacactcaaaaacctaaatacatttttggtataaatataccacatataaattcataagtaaaacaggaaaaattttttcattatttttttaagtacaaatctataatcatatttttccacattttcaaaagcgtacagcataatctttttcgtcttttttccattaatggttattataatatttccaacaacatcccatttttttattggtagtttataattaaaatttgtttccgatttaacattgtcatcttctgaaataagtgtcgtataaccttcacttactcctacattgattttcttttttgttccattaggaatttctatttgaaactttgttccggaagctattatttttttcccgttatattccctcttcccataattcattaatgttgttgtatctttccacttgtagcttttattaggaggccagccacaggcaagaacacagcttacaaaatgtctgccattactttttacagctccaacaaagcaatatcctgcctttcccgtaaaacctgtttttattcctatggcctcattatccatagccaaaaacatatctttattatttactgtaatacttctatttgcggaaacatcagtaaaagaataagatttagtattagtaatttcattgaattgtttattctttgtggcatatgcaccaattaatgccatatcatatgccgtggaataatgattgtcagcgtcaagtccgttaggagtgacgaaattagtattctttgcccctatttcttttgcttttttattcatcatttttgcaaattcttcctgactgccaccaatcccttctgccacaatcattgctgcatcattaaaactttcaagcatcattgcatatagcaaatcctttagatagtactgttcccccttctttgcatacatttttacctttggcattgatgcagccttagaagaaactttaataatctgattcatctttccactttcaagtgccactatacaagtcataatcttagttgtgcttgccattggcattttttcattttcattttttccataaagaattcttcctgtatttccatctatcaaaactgctgattttgatttaaggtctaaatcttttccaaaactattgacctttaaaaaatttattgtaatgcatattattaaacaaacgcatataaatatttttcctgaatcatttaaagaactattctttaaataattttttaatttacttccaattctcaatttatgttattaccattttatgtaatctataaaatatatgcaaaaaagagctatctcaaaaccatattctttcaaattggtcttaaaataactcctttgttattaaatcaaattatacactaatcttaatcgttagattttaatgttacttcttcctcagcttcctgcttaaattcttcgattacatcaggattaaccattggaaggctatcggctgattcaacaccaaatcttcttaagaattcctctgttgtaccgaacaataagggtcttcccggtgtatccattcttcccacttcctgaaccaattcgtattcaacaagcttatttacagcaaaatcagattttacacctctgattctttcaatttcagattttgttataggctgcttatatgcaataatcgacaaagtttccattaaaacatctgttaaaacctgctttctaggctgctttgcaactctgattaacgcctcatacatttcaggcttagtacacatttggtacgcaccgtctaattctatgatttttgttcctcttgaactgtcgttcattttctcctgcattgattttacaatcttcttaacttcgccgggctttaattctaaagccttagctatttttgtaatttcaacagattcacccattgtaaaaagaatggcctcaatctgtgcttcgtaatttatttccatatattaaacctgcctagtatattattctattgaatcaatataaatatcgtcaaatgttctttcctgatgaacctcaatctgacctattttaattaattcaagcaccgccaaaaatgaaacaataacttccatctttgaactttgttcttcaagcaactgcttaaagctgcatctcttctttttcttaaccttgtttgccacataatctattttttcaggaagacttacttcttccatttcgattttcccaaaggtgcttctaaccggatcaattttatccatctgtctttttaacaccatcttaaaaatctcatttaatttttcaaggtccacatccttaagaagattatctaaatctaccggaggtgcatattttgccacctcgtcaggaattgtaggttctttatataatgactttcctgcataaacctgcatgtcgcgcagttccacagccgcatacttgtataccttatactcaatcagcttttcaacaagttctgctcttggatcaatctcttcaccattctcatcaacttctttaggaagaagcatcttactcttaatatcaataagagttgctgccattacaaggaactcacttgccaaatccaaatcatctttaggcatcttgcttacataatcaagatactgttccgtaatttcaacaattggaatgtcatatatatctactttattcttttcaattaaatgtaataataaatctaaaggtccttcaaaaacctgtaacttaacttctaattccataattttctctcttcttttagtacaatttatgattttacaaaaaaaacctgtttttttcaatagtttttaagaatactgtaattgtagcaatcgtaagccaaaagattttattgtatgaaaatagtccgctttttccacatttgtaacacttactatgtcactttttccaattgatttgtcattaagataatattcaatatagcctactttttgatttttcttaacaggagccttcacttttttatttacaaataccttttttgttacttttgaaaggtcccttccttttgtatctacgtaagaaaacctattagttgaaatgtcaactttgtctttcgttccattggtcacttttattttcgttttatatccgtcattgtcagtgtaaaccttacaatttgaaaatccgtagttaatcagtttttctgattccttaaatcttattttataatcaggtgcagccataaccacggcaattaactgaacgccatccttttctgccaccgttgacacacaatattttgcttttgaggtgcttcctgttttaagaccttttacatactgattggtttttaaaagcttattggtattagacagtacaaattctttctctcccgcctttgtcttatgggttattgactccatccatattgtcgaatacttaaatatttcaggatatttttcaattaactctctggacattaaagccacatcctttgcagttgtataatggtcatcagaatccgtaagcccgcagcagtcaataaaatgagtgttgttcattccaagactttttgccctttcattcattttcttaacaaatgcttcttccgaacctgcaatcatttctgccattacaacagaagcatcatttccggaagcaataataatacactttataagtgtttccacagtctgggtttctccctcttccagaaaaacctgagagcctcccatacttttggcataagcacttgttgttgccacatccgtaagctttatttttccactatgtattgcatcaaaaataagtaccaaagtcattattttggttatgcttgcaggactaagtttttcattctgattgttttcatacaaaaccattcctgtactgctttccattaatatgcatgattttgaatcaatattaagttcatgactttcttcgccaaaaacaggaacctgcgatattattacaattaccattactattgctattatttttttcataacaaaaaaactccactacatttattatattgtaatggagaaaaaacatatatattcatattttttaagtttaaatttcttttatttagaagttgtttctgcttctttattcttctttgactttttagatttctttgactttttagttgctttcgccttttttgtttcaggtggcgtataattaggtggtttaatttcatcttcactataagtaaactcatctgtttgagttaaaatcactccatctgcgtcctgctggcatacaactactttgtcgccatatttaatgttacagtctcttaccattaacgtattgttatcaataaagtctgtttccatttcttcatcgttaatgtaaaccttactgtaagtattaaaattttcaccatagaaaaatccgtctataacatcatcttcatatacctgctgtatgtttgttaaccttgccggatgtattcctagttgcaaatctgttgcaacataaggattttcctcaccactggcataattatcaccataaagcatgtcatatgccaaatttttaaggttctccttataatcactgtcctttctatggaactgtgtatagttattaataactccggctgtcatcttaagcggctttaaaattcttgactctaactgataagccttaacctttttgtttttgtaataatcattgtcaaaattactccaaataacatactgagtctgatatacgttcttattctttagattttcggcagttataccaagagacggtaaatgatcaccgtacataacaagtatggtttcctctttacgtttctttaaagccttaacaagacttcctataaacttatccatttccctggtctggtcggcataatattcatattcccttgttaaactttcgtcatctaaacctgtaactttgatttttgattcgtagctgtcgtcaacactatatgccccatgtccctgaactgaaattgcataaataaaatcctgctcagttgtaagatcaagtgtatccaaaatttcatcttttaagaacttatctttcgcccatcctgttggagtaaattctgtaatattcatagtttctatagatgaaaatgtatcataaccaaggttagaaaataccttatttcttccataaaatgttgctgtattattatgaattgcgtgacatttgtaaccgtattcttttaagttatagcaaatgctttcacttgtatgatttgttaaaacagtcttaaatggaagttctcctgagccaaaatcgtcaaggttcattcctgtcattatttcaaattcagtatttacagttcctgctccaactaccggaacagttaaatatccacttggacactcattgtataatttttcaaaattaggtacaggattatctgaaagcttaatatttgtcatattattaaggtcaaagaatgactctaactgaagaaaaataatattaggtgtcttctctgttgcctccgttgcctgactttcttcttcatcaacaatctttttaattgagcttgctgaataatttttaggcttctgtattcccgtatttaaaacgctgttagtaaaacagtatgcaaagccatatttaaaataactatctcttaaatttccaaatttcttattaataagacctgaagcaattcccaaattaattgcccccattccaataacccatattaaagcaattgcaactatgtttcgtccatacttaatcttatggtctacttttggtgccctgaaaaacagtaacacaagaactgccaaagctgctattactccaattacaacaagaataatctgccaaacagaaaaatacttgtccataattgaaaaagcactgtcaattaatctgaaatctgatgcagtaagtggtgttacccttgttgccacaagcacaccgttggtaactccaagtattatccacattactgaaattacactaatccaaaaaatacgttttctcaacaaaagtgtaaaagataacgtcatcataactataaatgcattacatatgaacacatatggagaacctataagaaaataaactccatacatctttgagtgatcaaaagctgcaatacctgcaatcatttcaactataaaggttaacactaaggcaactacaatatacatataaattgtatgtttattatatgctgtatgaaaagaatcttttgttttttttacttttttacttagcgtagaccttatttttttattatctgtcatttttactttcctctattaatagttttattgccaaaaccgctgctctgacagcaatgtcagtatttagacagtccggctcctcataccctaatgcttttctttcctgattccaaataacattgaaaacagaaccacatcttacccccaaagaatttgcaacagtaaacaaagctgctgattccatttcacttgcaagtacacctaaccttttccaggcttcccatttgttaagtagttcataagaaactggcattctgttaggattatgctgtccataaaaagaatccttacactgaacaactccacaatgatatggttcatttaactctttgcacgcctgaaccaacgctgtagcaacctgaaaatcaggtactgcaggatattctattggagcatactccctacttgtaccctccattcttattgcgcctgttgctataaccatatcacctgacttaactttagtattaattcctccgcaagttcctattcttacaaaagtatgtgcgccacaggccactaattcttccattgcaattgctgccgacggtcctcctattcctgtagatgttactgaaactttttctcctaaaatagtccccgtatatgttgtatattctctatttgatgtaacaaatttaggttcatcaaaatatttagcaatctctttacatcttcccgggtctcccggcaaaataacatattttcctatatcttcacttgaaagttttatatgatattgtttttccatatttcctccaatctgcttgttcccatagaaatcttgcacccaaaattgtctgcaattgtctgacctatgtctgcaaaagtattcaacacgtgaagattcactccactttttgctttttttccatacataagaaccggaatgtattctcttgtgtgatctgttcccttaaaagtcggatcacatccatggtctgcatttattataagcaagtcatcatctctaagattactgataatttcaggtaatcggttatcaaaatccacaagtcccctgctgtacccgtccacatctcttctgtggccccatttagagtcaaattctacaagatttgtaaaaataagtcccttgtccatttcattcataagcattaaagtcttatcaactccgtccatattgttttcaatgtgaactgccttatttattccttttccgcagaaaatatcatttatttttccaacagcccatacattaatattattcttgtttaaaacatctaaaaggttaccatcttccggttcaactgaaaaatcctttctattagatgttcttgtataaactccatttttgtccacaaaaggtcttgcaattactctcgcaacctgatttttcccaacaagaatctttcgtgcaaccatacatattctgtacaattcttcaggtgagtacacatcttcgttacaggcaatttgaaatacgctgtccgctgaagtataaacaataggtttcttagtcttttcatgttcagttccatactgttttataacttctgttcctgaagccactccattgcacaacactcccggtattcctgactcttcaataaatctgtctattatctctttaggaaaaccattaggataagttggaaacttctgtttagtccaaatacctgtcatttcaaaatgaccaactgttgtatcctttccggcagatacttccttagcctttccatatatacctacaggctccaatttcttggcagaaccggatattatgtcatggtctgtagcatctgatttcttaatagattctgctattccatcaatgtttccaagtcctaattttcccatattaggtagattataatctttaattgtttcgaaaatgtgtcctaatgtgtccgctcccacatctccaaacaaatctgcatccggcaattccccaatgccaacactgtcaagtataatccaaatcactcttttaaacatatcactttccctttctacttttatttttcattattgtataattacagattcatagaatcttactgaactataatcccataaaatatttttgttaaaatgcattatactatattttttcattttctactatcttttatcatatttataccacattttctgacctttttcttctgcatttatgtcctttttattgaaaaataaggcatttatgttatactgtcctatagaaatttattgaacaaatatatatttctaatagggaaaaaggagaccaactatgagtagcacattttttagaaaattacccacacctttggaaattaaaactatgtaccctgttccagaggcagttgaaaaacagaaacaaatcaatgacgaagaaatcagaaagatttttacaggtgaaagtgataaatttgctgtaataatcggaccatgttcagcagataatcaggaagctgttgaagattatgttggaagacttgcaagagttcaggaagaagttaaagataagctttttattattcctcgtgtttacactaacaagcctcgtacaacaggtaagggttacaaaggtatgcttcatcagcctgatcctgaaaagaaacctgacttacttcagggtttaattactataagacagatgttcttaaagattatggaagatacaggatttcctcttgcagatgaaatgctttatcctgagaatgcaagatatttttcagattgtctttcatatgtggcagttggtgcaagatcagttgaagatcagcagcacagacttacagctagcggtatggatattccagtaggcatgaagaatcctacaagcggagacttgtcaatcatgcttaactctattgaagcagcacagtcatctcattcattcctttacagaggatgggatgttcagacaacaggtaacgatttggcacatgcaattttacgtggtgccgttaatcagtacggacagtgcattcctaactaccattacgaagatatggttaacttatacgaaatgtacaaagataagggatttgctaatcctgctttagttattgactgtaaccattcaaattcaaacaaaaaatatatggagcagattcgtattgctaaggaaatcatgcataaccgtaaacattcaaatgacttaaagggctttgtaaaaggcttaatgattgaaagctatatcgaaggtggcaaccaaaaagttgatgaacatatttatggtaaatcaattactgatccatgcttaggatgggatgacactgaaaaattattacacatcattgctgaagaagcttaaagatggtgtgaaatgtgtaatcacattacacttatataaatctacataccacactaaaaaaggaacagtctacgctgttcctttctcactacttataatattcaatattcttttcaatcataccacattactttaacttttcttttaaagtaaatcttatgccttcggatgtgccttggcatatacttctcgcactcttttatttccggatgtcatataaatctgtgttgttgatatatcagaatgtccaagcatttcttgtacagactttaaatctgccccattttcaactaaatgggaagcaaacgaatgtcttaatgtatgtggtgtcaattctgtctctatgcccgcttttttgccatacgtcttaattaatttccaaaagccctggcgactcattgctccaccctgacaattagggaacattataacgctgtcttcgttatctcccaacaaatactctcttccatctgttatataccttactaaagccttctttgcatccgaaccaaaaggaacaattctctccttctttctatcgtggcaaaccacatattcctgtgccagatttacatcatccattttcagagttattaattcagtaactctcattcctgttgcatataaaagttccaacatagccttatctcttaattccttaggcgaatttttagatggctgttctaacaatgcatcaacctgacttacagttaaaatttcaggtatcttcttaataattttaggcgcctttaccccaactgaaggattgctcttcataatttcttcatcatataaataagcaaaaaatgccttaattgatgccacattacgtgatatagttgttgtggctcttccaatgtcacttaaatgttttatgtatccttctaaatcatgcttagtaatatttttaatttcttctatactgccaatatttaaatattcaaaaaattttgtaagatctcttttgtatgaaatttcagtattgcttgaagtatcctttttagtatgcaattgtaaaatgaattcttcaattatattctgcatcttttctcactatcctctgcttttagcgtgatatacctattatataaggctttaaagggaaaatcaaacacatttttctcttaaaaaacttattatttttaagtaatacaatatatgtattattttttgctttttcaataccatatgtagttatttttcataataaaaaaatcaaaatattttctaaaaagcctcccattatcactgtagcaaaaacatacagcaccttttttctaagctgcatttcattaaagagtgttgaaattatggctatttttgttattagaattattattccacatatacaaatataattttgggtataaactattattgtaattaaacctgaaaaatataacccctgagcaaataggagaaatgccgccactacattcttctcttttataatcataagtattgaatagaaaattatatactttatcaaatataagattacaaatatgaaatttccaataaaatcatttatttttatgttataaatatcttcaaaagaaaaatctacacttattacattaaaaacaattgttccaacaattattccaagcagaaaagtgtagattttaaaattcttcataaatatattcaatgtaattcacacacattttttataaattctatgttttattttgttatttattacagtatttataataatatgccaaaatagctgccattgtctttacatcctgaatttcatttgacataactttttcaattaattcttcaatagtgtatgcagccaattcaatatcttcgtcctcgtcaaaattctgatgcgatttctgcaaatcaaatgccacataaatatctattatttctcctgaataagcaacagccggaactattgtgtggagaaattccattcttcccggtttgtaaccagtctcttcttccaactctcttgttgcacattcaagagttggttcttctacagtgtcctttgctcccgcaggaatttcaagagaaactctgttcacaacatttctccactgtttaaccataagaatctttccatcatccattacaggcacaatagctgccgcacctttgtggttaaggaaatcccatgttacatgatggcctttagatgtttggatttcatcctgacaaaactcaagaatctttcccttataaacaacttcacgtcctactcttttaaaattgccaatattgctcatatttatattagcctcactttctatattttttaatatgcttatttaatattattgcatttattaaagcatgcatctgttgcctcaaaaattgcttttctaaatccattcttttctaattcggcaactcctgcaatagttgttccgccaggtgaacataccatatcctttaattctcccggatgctttcctgtttcaagcatcaacttagcagaacctaaaactgtctgtgcaacaaattcataagcatcctttctaggcaatccacattttacggcactgtctgtcaaggcttcaatgaacataaacacatacgccggtgaacttccgctagcacagacaacactattcataagtttttcgtcaaccttctttgcttttcctgttgcctcaaaaatcttattaataacatctatttcattttcatcaaattcattttcatcaaaacatactcccgtcattccttctccaatcatagccggagtattaggcatgcttcttacaattctgccggcttttaatttttcttttaactgagtaattgtaaatcccggtgcaagagaaataataactttatcattgtctaaactgtcatttatttcatctataactttttcaaacatttgaggctttattgccaaaattatgtactttgacttttcaaccacttctgaattagacatggcataattcaccttttcttcttctgccaattctttcattttatccactgattttctatgaaatataatctgggaaccatcaaatgttctttttgctccctttagcatagccgttcccatatttcccataccaataaaaccaatcatatccattttgtatacctccatattttcacacatttatcataaagattaagttatcaaaaaatcttttgacactgtaatatattaaagtatatcccattatagaaaaaaagaaaaggtgttatatataacactaagtaatatataacacctattatttgtagatttattttgcgtaacctattgctctggattccctaacaacgttaactttaatctgtcccggatattctaactcagcttcaatctgtttagaaatatctctagccattaataccatatcggcatctgtaaccttttcaggaataaccataactcgaatctctctacctgcctgaatggcaaaagatttgtccactccctcgaatgaatttgtaatatcttctaactgtttaagtctatttgtgtatgtctcaagtgtttctcttcttgcacctggtcttgcagcagaaatagcatctgcagcctgaacgatacatgcaataagattttcaggttcaacgtcaccatggtgcgcttcaacagcattaataacaactgctgactctttgtattttctacataagtctacaccaagctgaatatgtgtgccttccatttcatggtcaactgctttacctatatcatgtaataaacctgctctcttagcaattcttacatctaatcccatctcagccgctaacaatcctgaaagatgtgcaacttcaattgagtgtttcaaagcattttgtccataacttgttctaaacttcatcttaccaagaagttttacaagttccggatgtattccatgtacacctacttctaatgttgctgcttcaccttcttcacgaatcatagtctctacttcttttcgagccttatttaccatttcttctattcttgttggctggattcgtccgtctacaatcagcttttcaagtgcaattcttgcaatctctcttctgattggatcaaatcctgataaaacaacagcttccggtgtatcatcgataatcaaatcaacacctgtaagtgattcaagagttctaatgtttcttccctctctaccaataattctacctttcatttcatcattaggtagtgaaactacagaaatagttgtttctgaaacatgatcagtagcacatttctggatagcatttactactatctccttagctttcttatcagcttcttccttagcttgagattctaattctttcactaattttgcagtttcaattttaacttcttcttcaacagtcttcaacaaatattcttttgcctgttcggaggttaatccagagattctttcaagttcctgtacgcgtttttcgcttaattcgtctactttagtctgagcttcggctaacttttcttccttattcttcagaccgttctctttcttttcaagagactctgactttctttcaatagcctcttccttgttgagaactctcttttcatatcgttgtacttcagctcttcgttctttgatttccttatcaagttcgttctttgctttaaggttctcttccttagcttccaaaagagcttccttcttcttagcttcagctgactttattgcttcatcaataatctctctagccttcccctctgctgaacctatcttcttctctacaacattctttctaacctgtgttgcgataaaagcggaaatcagtgcaactactatagccactacaatcaatacaataatccaagtagtagtattcacaggagcacctccttatttagttttcattgtacaatacaacaaatctattttactttattagtatacttatgtcaagtaaaccactaatagattttgaatagattccaacaatatgtcgtgtaagataatgagagaactaatacatattgtagcaataattcttctaacagaaaccatttaagtcaaagattactcaatcactataacgacttaaatttcatcatcaaattgactttccaaatgttcaaaatactctgataattcattctttatatctgaatatttatagccttttcccattagatattgatacaacttctgcaaatccttcctgtcatccaaattatatcttttagctctcttatcaataatcttctttaaagagtcagcatccgaataatcagttgattcaaagctttcgctaattatatccttagatattcccttaatcattaaatcctgagatatctgtcttccgcttctggttttacccttatactcaatgtacattgaagcatatctcttgtcattaataatgtcgtacttcttaaggaattcaataatcctcttgataacatcctcagggtacattccctgaattagtttatctttaatctgcttttcagtcttgaaagtcttatcaagaatatataaagctctttcttttccacgctcatataatagctgtttaatctcattatatgttactttagaaatttcctgattaatttctaatttaaactttctaatatcacccttatacagcagaaacttctctccattatccaatacaactttgtttctgttcttataaggctctatccgcacaaccctaatcataatcccttattacaattctatattattcttcacctacaggctgttctgcttcttcctgctgtgttccgtcaatgttatagaaatctctaactttctgttcaacttcttccattactgcaggattctccataaagtacttcttggcattctcacgtccctgaccaatcttctcattattatatgcataccatgaaccactcttaataacaacaccacaattagctgccaagtcaagaatatctccttctcttgatatacccttaccaaacataatatcaaattcagcttccttaaatggtggtgcaatcttattcttaacaaccttaactcttgcgcggttacctaccatctcgccacctgtcttaagtgtttcaactcttctaacatccattctaacagaagcgtagaattttaacgctctaccacctgtagttgtttcagggttaccaaacattacaccaatcttctctcttaactggttaataaaaattacagtacatcctgtcttgttcataatacctgttaatttacgtaatgcctgtgacataagacgcgcatgctgtcccatatgagattcacccatttcgccgtcaatttcggccttaggcactaatgcagcaacagagtcaactactataatgtcaactgcacctgatcttaccattgtttcagtaatttcaagtgcctgttctccatagtcaggctgtgaaatatataaattatcaatatcaacacctatagccttagcatatacaggatcaagtgcatgttctgcatcaataaaacctgcaactccgcctctcttctgaacttccgcaatcatatgaagagctacagtagtcttaccacttgattcaggtccatagatttcaactactctgcccttaggtattcctcccatacccaaagcaagatccaagcttaaagaacctgtaggaatagtttccacattcatagacttacctgaatctcctaacttcataattgaacctttaccatgctgtctttcaatctgcgcaatggctgcatccaatgcttttaatttatcttctttattcatatcgtcgtcttcctctcttttcgaacttgtgttcgtaataatattaatataatattttagtcctgtcaataccaacggaaatttttttatagaactttctgtgtaaattagcatttatcgtacattgctttaaccataaatatatcttactacttgttcattcaataagcaacataataattgaatttttatcatacatttttataattcttggggatttaatgtgattttttaaaagtattgattaatctttttccatatttttcctgtaggtaaatattttatagttacggcttattaagtaacattttcattcataataaaatttaatgaaacagaaagatgaggtagcgaaaatgaaagagattaattacaaagctataagcaacaaaatcagaagaaaacgagtttcaatgggacttacccaggaatatcttgcaactgctgcagatgtaaatgtaagccatataagcaatatcgaaaactgccatagcaaagtatcacttaacacgttagtttacatatgtaaagccatgaacacaacccttgactatgttgtcagcgaagaatattcttccgacaacgaatcacttgaccaacagataattttagaactaaaaaaatgtgatactgttttaaaagaaaaaatactcaaaataataaaagacctgcaataatagttaatctttcatataagtacaacaaagtttcatttagatttactacatatgaaataaaaaataggttacacaaaatcaatgtaacctattttctatatcgttcaatatttttaacattatttatcaagcattttttcaattgttgcaatcttagtgcaaacaattaaaatcttgctagcttcaaccaattcttcaggtgaagggaatgatggagcgattctaatatttttatcttcaggatcttttccataaggatatgttgctcctgctcctgtaagtaccattcctgcttccttacacatctgaacaatcttcttagcacagccttccattacatcaaaagaaatgaaatatccacccttagggtttgtccatgttgcaatgtcagcatcttttaattccttgtctagcattgtaataacagcctgaaatttaggtctgagtttttcagcatgtttcatcatatgctttttaactccattaatatctttgaagtatcttacgtgtcttaactgattgattttgtcatggccaattgtctgaatagtcatctgcttcttaataaattcaatattattctttgaagttgcaagtgcagctacaccggaaccagggaatgttaccttagatgttgatgcaaattcataaaccatatcaggatttcctgccttttcacattctgaaagaatatctagaatctgatcctgattagcctcgtcatcgtataaatgatgaattccataagcattatcccaatatattctaaagtcttccgctgccggctttaatgctgccattctctttacagtttcatctgaataagatgttcctgtagggttagcatattttggaacacaccaaataccttttattgcagcatccttacttactaattcttctaccatatccatgtcagggccatcttctaacaatggaacattaatcatttcaatgccaaactgctctgtaacagcaaaatgtctgtcatatcccggaacagggcataaccatttgactttttcaagtttacaccaaggtgtagaaccgttaactccatgtgtgtatgaacgtgaaaccgtatcatacataatgtttaaacttgcatttccataaacaataacgttttcaggcttagtacccattatatcagccattaacttctttgcttcaggaataccatccataacaccatagtttctacagtcaaaaccgttttcactctttaattctgacttgctgttaaatacatcaagcatatccattgataaatctaactggtcaggtcccggttttcctctggacatatcaaggctaatattttttgcacatatctccttgtaagcttccttctgctttaataactcttcctctaactgttctttagtcaaatctctgtacgccaacataattttcctccgttatttttcatagaattaatttttcaaaacctgaatattctttgccacataatcaatcatagaaataattgtaagtgcaagagatatccatattaaaatccaaccaatgatatcaaatgctttaagagggatatcaaggattaggacaataatcattatcatctggaatgttgttttaaattttccccaccatcctgcggcaagaacaattccctgatctgcagctaatgttctaaaaccacttataaacaactctctgcttataattataataacaatccataccggaatcttgcttccgcaaagacagataagtgctgcaccaactaaaagtttatctgctaaaggatccataaactttccaaaattagttacaagattatactttcttgcaatctttccatcaagcatatctgttaaacttgcaataataaaaactccaactgcaatataattgttgtaaggtatagtattaactaacattaatacaacaaaaacaggaatacatagaattctaaatattgttaatttgttaggtaaattcataaattcctccattctattcatctaactgaccaataagatcatagtcattaatacctgtaactttaactttgacaaaatcgcctgtcataagttcttcgtctgtaattatgaaaatattactgtcaatgcccggaacatccatataagtacgtcccatataagcattttcaccggatattcttccttcaatcatagcaacatatgttttaccaatatgcttttctgaattatcaaatacaatatcctgctgtaattccataatgtcattacgtctgtcttcttttacttcctcatcaatctgattaggcatattagctgccggagtattctcctctgctgaataagtaaacactcccagacgttcaaattccatctcatttacaaaatcaagattaatctggtgatcttcttccgtttctccaggaaatcctgttattaaagttgttctaagaacaatatcaggaattttcttacgaagctttccaattatttcacgtaaatccctattagttgttcttcttcccatcttctttaagatagtatcacttgcatgctgaattggcaaatccagataattacatattttcttttcagatgccataacatcaattaattcatcatatatttcttcaggataacagtacaaaactctaatccaataaataccggaaatcttagccaattcctttaaaagaatatgaagagacttctctccataaatatcctttccatacattgtagtttcctgtgctacaagaataagctccttaactccctgctcggcaagtttctttgcttcatctatcaagtattccatctttacgcttctgtaatttccacgtacctttggaataatacagtaagtacaatgtttgtcgcaaccttctgcaatcttaagatatgcataactgcccaaagttgaaagattacgtggtgcattagcggccgcaaggaaatcaacgtcctttaaatattctttcttcttatgttctttaaagtaatcatcaagggcacttacaatgctgtcaattgctgttgttccaatgcaaatatccacttccggaatttctgttttaatttcttcatgatatctctgtgcaagacatcctgccaaaactaaagctttacactgtccttcttctttatatcttgccatttcaaaaatagtctcaatgctttcttccttagcatcctttatgaaacaacaactatttataatgataatatctgcctgtgtctcgtcatcagtaaattcatagcttgccttagacaaaagtcctgacatatgttcagaatctactaggttcttgtcacagccaagagatacaaataaaatcttcaaatatacactcctctataagattatagaaaaaaagtgtcactactgacacttattcttcctcatcatctcctaaaatcttaattttagaattataaagctcttctacagctattgataaaggcttctttccctctgctttttcaactaaaggtgcatcacctgcaataatctgtctagctctctttgatgtagccataacgatagaatatctgctctgtactaccggctgttcgccatcttcaacctcactgttagctactgccattaaatctgaatatgatggatgtaacatatttattctcctttcgaaaactttaaaatatcatttttaatcttattaacacaatcagaacctataagttccggattattgtctgttacaatgtcattaatacatgctgcacaatctgcaatctcatcatttattacaaaataatcatatttatcaataacacctgtttcttctgcagccttgcttaaacgcttgttaataacttccatagtctctgtctgccttccaacaagtctttctttaagtgtatctgcattaggtggtaaaacgaaaatcataactgcctcaggcatcatcttcttaacctgaagagcaccctgagtttcaatctcaagaataacgttattaccttcatttatgttcttttcaacaaaatctcttggagttccgtaataattacctacataattagcatactccaaaagctgattattcttaatcatatcttcaaacttttcagttgtaaggaaatgataatgtgtgccgtcaacctcgccctctctgggacttcttgttgtggctgaaattgaaatcttgtaatctgaataattatcaagaatatattttacaactgttccttttccaactccggaaaaacctgaaataattaataacttaccttttttcataatatgacctactctatattttgaatttgttccctaaccttctcgatatccgtcttaagttcaatagccttatcagaaatctcctggtcagatgttttagataatgtagtattagcttccctgttcatttcctgtgctataaagtccaatcttcttccgattgttccgccattaattaacgcttccttcatagccttaatatgactgtcaagtcttacaagttcttcatcaacacagaccttgtcagcaaacattgtaacttcctgagcaattcttgcttcatcaatctgagtttcttctaacaattcatgaatccttgttgtgattttctccttgtattcttcaacaataatcggtgacttttcagtaataaactgaacatttaaaaccataccgtctaatttcttaattaaatctgttttcagtctttcaccttcagcaattcttgtttcaacaagtctctctgctgctccgtcaatagccttaataactaaagccttaataatctcttcgtcatcagcttcattctcaatggttataacatcaggacttctcataatgtaacttgttcttacatcattctcaatgccaagatcctcacttattcttgcataacattcaaagtattcccttgcaagtgtaggattatatcttacacattcattgccctctccctgattttcataagtaatgaatacgtcaacttttcctctttcaacgtatttttttagttcatttcttatgtcgccttcaagaaaattaagcttcttaggaaccttaattcccaattctaaatatctgtgattaacagattttatctctacagtaacctttctgtcaccttctgaagcctcaaacctgccaaatcccgtcatactttttaacatttttatctcccggccttagaacacatgtatattagaaaaaatgttccaataccgtattccaaaggtttttatagtttatgacctagttatagtcataattcactttattataattcaagaaagccctaccgtcaaggttgacttaataaagaaataataataaaattctactagtattttaaacacaatgattagtactcttcttttcttgcaagatgtattattcataaacacattataataggagaaatattatggcttttgacggcgttacagtggctgctcttgttaaagaattcaacaccactttaaaagatggaaggatatataaaatcgcacagacagaatcagatgagcttatgcttacatttaaagctgacaagtctcagtatagaatgcttcttagtgctaacgcaagccttcctttaatatattttacaaataataacaaaccaagtccaatgacagcacctaatttctgtatgttacttagaaaacatattaataatggaagaattgtcagtataacacagcctggacttgagcgaatcgttgattttgaaattcaacatcttgatgaacttggcgacataaaaatcaagcatcttataattgaattgatgggtaaacacagcaatattatttttacggacgacaacaatatgataatcgacagtattaaacatattacttctgtaatgagttccgtaagacaggtattgccgggtaaaccttattttattccggacaccatggataaacacaatccaatggaagctacaagagaatcttttttggaaactgttttttcaaatgctatgcctgtttcaaaagcaatctttacatcttatacaggaattagtcctgccatagctgaaagtctttgctttgagaacaaacttgattcttcaatgcccgccaatgttttggcacacggcgaccagaatcttatttggatgagtttttatcagttaattaaccgaattaaagatggaaacttcactcctttaatatatgagaaaaatggcaagcctgaagactttggtgctgttccactttcaatatatggtgattgcactgcaactaattacgaaagtattagtttattattggaagacttttattccaaaaagaatctgtacacaagaatgcgccagaaatcttccgacttaagacgtattgtttccactgctcttgaaagagacagaaagaaatacaatattcagcttaagcagatgaaggacactgagaaaaaagataaatacaaagtatatggcgaaattctcactgcctacggatattcaattgaaccgggtaccaagaaatttgaaaccgagaatttctacacaggagagcctattacaattccattagatgaaacattatctcctatagataatgccaaaaagttctataacaagtatgccaagttaaagcgtacaggggatgcattaattgatattattaagacaactaaagcatcaattgattatcttgaaacaatcaacgtatcaattgatatggcaacaagcgagcatgacttaaaggcaattcagcaggaacttgttcagacaggctacattaaacataagaaaacaaataacaaaaaagaaaagaaccttagtaagccacttcacttcgtctcctcagacggctttgatatatttgttggcaaaaacaatattcaaaatgaagaacttacatttaaagttgctacgggaaacgattggtggttccatagcaaaactttccccggttcacacgttattgtaaaagctaacaacagtgaattacctgacaaaactttcgaggaagctgcaagacttgccgctcatttttcaaagggacaggctcaggacaaggttgaaatagattacattcaaaagaaacacatcaaaaaagttgccggtgcaatgcccggatttgtaatctatcacaccaactactcaatgaacatatctcctgacataacaggaataaaagaaatttaattacatttaataaaggagcagattcacattgaactgctccttttaaacataccctatttttagtatagacaatagaatctacatgaaccactactttcaaatcataattaattctctattttaaaataaattccatctgtgtttcttttggaaccatacccattttttcataaaatctgcgggctgtatcgttgccttcccaaacgttaagtgtaacttcataacagcccattttctttgcttcttccttaacatgctcaaaaatcttctgccctatatgttttcctctaatattttgattcacacacaaatcatcaataaataaagaatcaaacggcaccatattagttgaaaatggctgtttcttctttatacaaaaagcatatcccataacactgtcattctcatctactgccacatacacaggtctgttagcatcattaaaaatttccattaattcctcttttgtatattttgttgttccaccaataaaaatgtccggtctgatttttgcatgtatatttaaaacctgtgttagtaatttaattactgaatctatatctttttcttctgctaatctaatgttcatttatattctcctttgctgtcatataacatttcttcttatattttttattaaatatatccgtaattattatagcaaatgaaataaaaaaagcacagaaaaacattattgctgcaagcatggctcccaatggacagatgtaaattgacactgcatccatccaacctgaaacaattcccatacctacggctgagcctatgcaagcaatgacaaagccggttctgcagaagagaaactctaacaggaacatatttcattttttaattttcgtgctgcagaattaagtggatgctggcaatcatgcacaatacatatttctctattaggaattttttcttttaaagaaatctcaataatttcgtttttctcaatactttctcttgccataggttcaggaacaaatgccattcctaaatctgactttactaaaggaataatctggtctgtagttgccacctcagtgtcaggattaagttcaataccatattttaaaaatatcttattataaaaatcgtatgtagtagtttccttccccaaactaattaatggatagtctttaagattttttaaagaaatattgtcatcttttatatgctcaaaatcagttccacctattaatatttccttaaatgaacataagattgttttttctaaaggcgacttaacctttacaggtgttgatacaactgcaaaatctatcttgccacttttcacagcctcaattgcctgtggcgttgaatggttatatatttttagtcttacttttggatacattttgtgaaaggattttagaatatctaataaaaatatatttaaggcagtttcgcttgctccaatagaaatacttccctgaaaaattccttcatcgtcagccagttcttcctctgcctctaaaagttgtgccatagcaattgacacatgttcatataaacgctttccttcctgtgtaagctgcacacctctgttcgttctaacaaataaagtgctgttaatctgttgttccaaacaattcattgctcttgtaacattaggctgactgttacctaatgcctgagctgctcttgtaaaattctcatatttagcaacataataaaaaattttataataatctaaatttacattcatggcattctccttggtatattaattacttattgctatcatatcaattatgatttttacttatttctataatcatagtataatctagccgaatgaaatattcaagaaagggtgcgagttgtatgagagaaggaacaatttttccaagagaagaaaaaacagaagtgttatttcagaaaattcttaatgatccctgggcatgcgaaaaacttcaggaaacattttgcaattatcttttttgcgatgatgaaatcaatagctatttatctccattagaattctcacaggcattattcaatgcttatcacaatagagatttatcagcctttttgatggctatttgtgaaaatactatatttgatttacttagaaattcatatctgattccatatagatttaatgctgacggaatagaaaatcctgtaattatgaccgacgataatggattattacttccaaagtataaatcaaaagttcacgaaaaagactacaatcattttcatgaaatatataaagaattaaataacaataaaaaaatatatcttgcaaaagcatatagctataatcataaatacacttcagacaatatggaaatgaagcagcagattcttgaaaaaaatacaggtatattaattattagagaattgcctgacactgtaacggctaacaaaactgaagccgaagcctattcagcagtttgggacttaatgattgaacttgaaaagaatctccctatggcatttgttttttatggtcaggactcacttgtggaaaataataaaagatatgatgaaattggaatatttcttccaaattccatctttttaaaacatttagaaaaacatgtagcgaaagcagaggcgattatatatgccaacaaataattacattgatattatggaaaaaaaccatatggaaattccatggcatgattataccggtgatgacagtaatacattaattaaagagtcaggtttgattgaaaaagcatctgttattggcagagttggtttaattatgctttcctgtggcacaggtgcatggcgtgtaagaacttcaatgaacagactttcaaaggaacttcatgttacatgtacagttgatgttggacttatgtccattgaatttaactgttttgatggaaaagactgtgtttcacagtctcttagtatagctaacacaggggttaatacttcaaagctttacagaatggaacaatttgttgacaactttccaaaggaagacgcccatttgaccggtgaagaaattcacaaacgacttgatgaaatagagaaaattcatacattgtattctcctgttaaattaggtcttgctgcagcttttgcctgttgtggttttacatttcttcttggaggcgggccaattgaaatgctttttgcgtttattgcagccggtgttggaaatattgtccgtacaaagcttataaaacatcattttacattatttttaaatatagcagcatcaatttcaatcgcatgtttggtttatgccatttgttttaatgttgctgagtctgtgcttggtattgcccatatacatgaagccggatatatatgctccatgttatttataattcccggctttccatttataacaagcggtattgaccttgctaagctagatttacgttcaggtcttgaacgattaacatactcaataataattatattagtagcaacaatgtttgcctggattatggcacttctgttaaagctacagccacaggatttcacaacaatacatatgagtaaaattttactattagtattaagaataataacaagtttttgtggtgtatttggtttttcaattatgtttaacagttctataccaatggctgcaacagccgcctgtattggtgcagttgcaaacacactccgtttagaacttatagattttacacacatgccttactctgtggcagcttttattggtgccctaacagccgggcttcttgcttctttcataaaaagcaataatggatatccacgaatatcccttaccgttccttccattgtaattatggttccgggactttatttatacagagcaatttacaattttggcattatgtcacttacggaagctgtctcatggttctcattagctattatgattattatggctcttccattaggattaatttttgccagaatattaactgataaaactttccgttactgcacataacggtgtgtttaaaacatagattggcttttccctttttcagtcaatgttttattcacgcttaaaagagaaaacacagttgtgaacaatggttcacaactgtgtcaaaaatctttttaccccactcttgacaaagagcccttttaaacataccctatttttattttaagttgttttctgaccttttacttttgtgaaaagaaaagctttctttccgacctttacctttttattaagctttacttttttcaattttttatctccgcaaaaagctcttctttcgatattagttacagatttcatattaactttctttaaatttacgcaatcttcaaatgttgcaaactgtatagttttaacctttttaggtacattaacagtttttaaactataattttttctgaaggctttctttccaatattctttaatgattttggaagattatatttttccatcattgtattccagcaaaacgcttcatctcctatacttattaacttctttgaaaacttaacactcttcaacatgtcacaaacttcaaaagctcctttttcaatttttcgtacagtattaggcataacaatcttcttaatgtttatttctcctgcaaaagcctcttcacctatgactttgacaccatttggaattttaacaatttcgctgtttcctgtatattcaactaattttttattttcaataagaaaatctccaaattttttcatttcatacgacacagttattttattattttttaagttcttacaatattctttcaaattcccctgaattgcttttgatgtatttatagctcttaattttttaagttttcttaagtcagttgtttttatttctgcatagcttcctgttaatgacatccttgttattttcctgcattcactaaataatccctttggtatatttttaactcccgcaagttctaaaactctcaaatcatgagcagatataaatgttttgtctgtcacttctacttccttgcaattccccgttatcttttttacataaggtgaaaacgcatcacctatcttttttaaagtggatggtagttttaaaaccttgattgatgaatctcgtaatgcactatcatcaagaatctcaagtccttcatttaaaactaattcctttgttcttgtggggattgcataactttctaactccttcaccgttgatgatagaacaatctttcttgcacaaaatttatcagtaagcaaaatataattatcatcttcaaatgcatatgtccttttatcattgtaaatttcattatttttaaatgcatctgaagcaatttttgttactccctccggtatgtaaacagtatcatcattacctttgtactgctttaagacaccattctcaattacaaaatcactatcttttgtttctgcattaactacaagcgtacctaatgataatgtaagtaaagtaagtaacaccaatcctattcttttaatatttcctttcattttttgcacctccattctttaataattgtacgaataattttccaattttattgcatgattttaaaaattattcgtacaatttaaaatcaaatgctaatattatagtaaataatttctttttcatttcgtacctcctattttcactgttttcgtcaccaatttagctttcttattaaatacaacgaaccagaatgaaaaaagtgacaattaatttaaaatttttatttttttcaaaaaactcttcgaatcttttcacttattcgaagagtttttgtatatattattctattttactttttcaacacttcttgcaacttttattatttcttccttagaaacatcaattcctgaaacagtaataatattctcatctacacgccataccatattaacaagattttccttttcagtcataaaagcctgctgtcaatttatatctacatatgtgttttttgtattttcagtatcaatggataaatctgttccattaagtgatgactggctaaacgtaatcagtttatcttcattatagtaattagcctcccatcctatttcatctttatgcatatctctcagtttaaaccctttcggcagatatgtgatttcatattccttgcttaactttattgtaaacctgtcatctgatacatttttaacatcttctactttttctcccggatattttccaatatcagtatggtcatcatttatttgtcttttcttcatgccttatacctccccattaaatatttttagaagtttttctctcgctcttctaatataagaattaacattgctttccttaatccctgttattttggaaatttcttttgaggacattttcattgtgtcgcgataagttagaagctccttgtccctttctgacattttcaaatatgcgtaaagatttttaattaataggatttttagttagtcaaaaaagagctgctaccttaagtaacaactcttttaaacataccctatttttattttaagtttattctattatttagctgtcagctgttttaaaacttcatctttgttacatgtaactttatccaatagtttagataaaatattgacatcaaaatttttgttttcaatctgaatgttattaattgtcactgctcctttttgtactttcgctctttcttcagaagtaatcttttcaggttcactttcgtatgttatatagcttttttcatctatatttttaactgtctttggaataaaaagattatcaatatgttttcttaactttgcttcccaattcaaacctaaaggtgtgtaaagaaatgctgatgtacaaatattttcacatccgtcaacaattctaacgttcttctttaatgcagctacccttacaagtgttttaccgtcttttgtataaatgtttccatctattgacgtgtaattcggatcattctttgagacttcaaaatcttcagcttccaaatgttgaattaattcaatattcaaatctgttgtaaatgttatttttcctgcattgcaaactgaaatccaatgtgctttgtctacagtaatatttcccggaatttccacattgatttttgttttatcgctatcaaatgctgccactcccattgcttttacactgtttggaattttaacattcttaatatttgttgtttgaaaagcagcatttcctatagtttcaacattattaccaagttttaccttttcaagttttttgcatttataaaatgcctgtttttcaataactttaacactatttggaattcctatcttcttgatattattgcaattccaaaatgcaaaaccttttattttagtaaccttttttcctatgttcacttttttaagtttcttacagtaagcaaaagttcccgtttcaattttcttcactttgtttggtatatttacgctagttactttcgtatgactaaacgcatattttccaattttctttacgtcttttccaattacaactttcttcaattttttacaatctgaaaaagcgtactttggaattgatgtaatgccattttttataacaacctttttaatttttttgttttctttaaaagtcattttctttggcatttcaccttttccggaaactgtaagtgtacctttgtctaatttgtaagtaacctttgtttttgttgcagcatttacatctttaatcggattcactgaaataacagtaaatgctaacaacagtccaaagcacaaacttttaaaaatgtttttcataagcaatacctccttatataattctttataagttatacgtatcaaaaagtctttttattgcatattaatccaactcacttttagaaattcttcctatttttccatttccatctgatacttttgctgcaaaataaatataatctcctcgtatttttattccttccatttcaaatttacttatgttctcaaatgcaactttaactgtacttttccatgttccactctttgtgacattacatatccaaggactatcatctatttttcctgatgatatatacatattcatattatttgttacttctattccctgaaatgaactctgaggaaatattttcttagaaccacgttgtaaaattgaatactttagtgctccttttaaggtattatttcctttaaatgacacttttgtagctttatctaattgctgatttattgtattaaaatcataacaactgtactgtataggttcactattatctcccgacagctttgcccaaatcaacaaataatcgttatttgaagaaattgccgcatcacatcttttaaccgtaccactacttttcatatccttattcgcatatgataaataatttaatctatttatattggatgcattaattgtggtgtttgctacatactgtattctacctatctgtgttgaccaataaacattgtttactttatttgattctgtagatatcaaaaaatacgattttgatttataggtataattttccaaagtttgaccatgtccaaccccttttaaaatcatactgtcaattacatttatttcattattactcaacttacatctcgacaaaatcacatcacctgctacagctgtcttattatatccatcatttcctcctgaattttgtgttacataaatataaccatcacttgcaaaacagaaattctgaattgccaacgaacatgctgcactagaaaaattaaaattatatgtaacatttgattttacagtttttgttggttttaaatccggcatagaaaaagttgatatttgttgttccagactcaaagataataaatatttttcgtaatcttgtgccgaaaggaaatcatctttatctaaacctaaatattgatttttagaattttgattttcatcgtagtattcactttcttctgctactacgtttgtagtagccattaacattacactcattaatattgctgttgttttaataaaattttttctcatatatgtatctcctttgaaaattattttatttttaagagctaaactgacttttggctttctttatcccacgcccatataccaatttttccgtgctttctttaataatatttgactgtagaatattttgttattttttcaatcacctcagtgcctgaatatattcttaccactactcttaatctataataatatcccttagtaatagcatttcttttttccaatgttttatttcctgttcccgtactttcctgactccatgctttcactttgctatatgtggatttatcactgcttttctgtaaagtcattgttatctttgattttttattctttgtcattacattttgtgcattacaaattgcagttgctccacttaatcttaaatttgctgtaaccaatgaagtatttgtatagaacggttccacgccgtaattgtcttgagcctcttccgcatatacttcaacaataaatgatgtcatcattacaaatgctaatattatggtaaataatttctttttcatttcgtacctcctattttcactgttttcgtcaccaatttagctctcttattaaatacaacgaaccagaatgaaaaaagtgacaatgtattttaaattttttcaaaaaatttttttaataaaaaaactcctcggattttttaacttatccgaagagtcatttctatgttttaatctacacttttaacactattagcaatttttataacttcatctttattaacgttaatgcaaataatacttatgacactttcatcctgcctccacactatagatattactttatcatttttcttttcattcactaacgctttatgtccgttaatatctacatatgatttttgtgtattttcggtatctattcctatatctcctccttcaattgatttttgtttgaaagatatcatatctgcgtctttataataatcagcactccatcctgcttcatccttattcatatttgtcattttaaaccctttcggcagatatgtgatttcatattctttgcttaactttattgtaaacctgtcatctgatacatttttaacatcctctactttttctcccggatattttccaatgtcagtatggtcattatatgttttcataaaaaattccaaggttttctctttcattgccggcactgatacaactgagatattgaaaattaacaaaagtactccaagagctgttgctgttctatatacttttaatttaaagttcaatgatttaattttctttttacgcagctgctttttgctgattttttcaaattcttttatttgctgttttgttggagcatactcatctgttttgtttaattcttctgcctcttttaatatctttcgtccttcttcttcctgatactctgacaacgttgttttaagtacgctatccatcatttcatcatttatttgtcttttcttcatgccttatacctccccattaaatatttttagaagtttttctctcgctcttctaatataagaattaacattgctttccttaatccctgttatttgggaaatttcttctgatgacatttccattgtgtagcgataagttagaagctccttgtctctttctgacattttcaaaagagcattgcttaaatcaatatacatttcacttttttcaaattcattaatatgtcttttttctgacatattagtgttgataacctgttcttctgtgacgtattcatctaaatactttgatttaattttgttcttccttaaatagtctatacaaacgcttctaatagttataacgaaataataagaccttgcgtgacaatttaatttatttattttttcaaaattctgaattatttttataaaagcctcatttaccatatcatttgctgtatgataatcaactattatatcgtaggcttttttcctcattattcggttatacttcttataccaatctgaaagtatacttttctcgtcttcgtttcttatttcttcgattattgcaagcataatctccctccattttttattaagtgtcttttatatctttggttatcttcatacattctagcaaaattctatagtgtattcaatcctaacgtctatctactaaatacaatacaaagcattatttcaatccattttcaaatatgcgtaaagatttttaattaataggattttttagttagtcaaaaaaagagctgctaccttaagtaacaactctttttattctttaattcaattatctgattagttttatccaattaaatcatcatataactgctgatatttctttgctgatgttttccatgagaagtcaactgacattgctctttcaaccatcttgttccaatcacgtttcttgtcataatatacgtgttcagcatatcgtactgtacccatcatttcgtgagcattgtaattacagaatgagaaacctgttcctgtgttctcatattcgttatatggttctactgtatcctttaatccacctgtctctcttacgataggtaatgtaccatatcttaaactcataagctggcttaatccacatggttcaaataatgatggcattaagaatgcatcacaagctgcgtatactttgtgtgaacgttcttctgaatagtaaatgttagctgatacgctcttgccatatttccagtcaaagtgtctgaacatattttcataacgttcttcacctgttcctaatataacaaactgaactgcatcctgacacatttcatccattacacatgagataaggtcaaatcccttctggtctgtaagtcggcttacaataccaatcatcatcttctttggattaacttccaagcctaattctttctgaagtgctgttttgtttttaaccttttcttttctgaaattagcctttgagaagttcttgtcaatgtacttgtctgtagccggattatattcatcgtaatcaatgccgttaacaatacctctcaggcaattagatcttgctctaagtaatccgtctaatccttctccaaagaatggtgtcttaatctcttctgcatatgtatcactaactgtagttaccatatcagcgtaaactataccaccctttaagtagttaccattgtcataatctttaagcttatcagatgtaaaatagtaatctgacaatcctgcaatatccttaatagtgtcaatgtcccatactccctggaatttaagattgtgaatagtcattatagtcttaattccctgatagaactctccacttgcgaaactgtcttttaagtatacaggaattaaacctgtatgccagtcatggcaatgtattacgtccggtctgaaatctataactggcaaagctgaaaggactgctcttgaaaagaatgcaaacttctctaagtcatatcttgcatcactgtatggcttttctccgccgaagtaatattcattatcaataaaataaatctttactccttcgtattcaagttccataattccaacatactgttttctccaacataagtccatataaaaatggtcaatgtatgtcatctggtctttccatttctggtcaatgcacatatatttaggaataataacacgtacatcatattcttctttgtcaaaactcttaggcaatgaaccaactacgtctgccaacccccctgtcttaataaaaggtacgcattctgacgctgcaaataatatttttttcatatatttttcctccaagtcgtctcttttttggattttgtttcttacgtatataatactagaaaatcagcttaaattaaagtactaattatctgcatttgtattctaatctgattttatctgcaattaatgcaataaattctgaatttgtaggctttcctttctctgcatttatggtataaccgaacaattcgtctattgtgtccatttttcctctgttccatgccacctcaattgcatgtcttattgcacgctctaccctgcttgatgttgtctggaatgtttttgcaattgtaggatacaaaatctttgtaatggaattaagcatttcaggatcattgaccgacataataattgcttctcttaaatattggtaacctttaatatgagccggcacacctacgtcgtggattatgtttgttacatcactttcaatgtttctgtccataaatttcttcttgtcctcgtaggctgcaacaaacttcttgttatcaggcaaacgtttgttataactttttgctgtttttaccctttcaactatcatttctgtttcaaaaggtttaagcatataataacctgccccataaccgaaagcatcctgaattactgtttcattgcttattgctgatgtaattataaaaaaaggaagctttataattgaaccgtccttatgtatcttgttcattaatgataatccgtccatctttggcattatcaaatccaagaccacaacatcaggattggttttctttattatatcaaaagcctcctcgccattttttgcttttccgactatgttaatttcctcgtccctctctaattcattacaaatagtctctactatcttctcattatcatctaccactgccacactaattttattcatactatcctcctgtcaatttcttttattattttaatctgcataactatataactttcaacaacagtactgttatattttgttgacagagaagattatagtttgaattttcccgttattcaacttaaagaaatcgcataaaatgccattattcgacaatgtggtttacatatattttttaatgtaacaataatagatagttttatctgtttttttcaaaaattcaggtcgataaaacactttttgcgtcggcaaaaaattaatttatgtaaacaatcattttttctttttctgacaattctatttcatatccgtcacggatttcataataaacttttggtcttaattttgttccgttaacttttgttccattggttgaatcgtaatctgcgattctgtatttaccatccttatatgaaataattacgtgaatctttgaaatataagtttccggtattgtaatatccgcattttcacgtccgattacaaaaggacttttgtttattacaaacttctgattattgtatatgattaaggcttctccctgatttacaacaggtttttctgctcttttaggctgaattgtgttgccaaaatttcttgttgcatcagaattaggatttgtcattctcttcttgcgaagttccaaattagcctctgtaaaaggattaattactaatccgttaagttcttcacaatcgttcatataagtgtacgctgctgaagcagacattcttataagtgaaaaattatccatatattctacaggtatctgttcaaatgttgtaaaaacaggcattaatcttgttcttttgccatcttttacaacatcaggtttaagagatgcgttttcaataaattcacccataatctgacagtcgctgtaatcaacttttgcagcaacaattacttcacattgctggaaaagttctataatatctctttttttaatctttttctcaggtttcttattgtatttctttattaattcttctatttcatgtgctaaatctgcattatttcttgccataaattcctcctgtaacttcccttacttaaatatcatagaagtttatttttcatattctctacattaaatattagtatactacatttttctacttatttcttgatttttttgcgaattctttttttcactattataaggcactattataatctatttacaagttccttttattctattcatttacttatatggacattctatttttatctgattttttattattccttttttctcctatttttccgccagttacatttttaaaacagaattaatctgcctttttttgtaatttcagatttaaaaatcatctattgcaaaaaatagctttgcaaaacgcaaagctataatcaatccatatttttatatacttttcaacatattttcagctaatataccatatcctcttgttggatcatttatcataacatgagttacagctcctattacttttccattttgaattattggactgccactcattccctgaacaattcctcctgttttatttagcagtctcttatctgttatttttattaccatattcttttcttttgcattggcatatatattctctatttctattttataaatatttacttttccatctgctataaactgtatagatgcctcacctttttttatttcagattgtagccctatttctttttcagatatgttatatcctgatataattttcttatccatatttccatacaaaccgcatacacagttttttgtaatatcgccaataatgtttttattattgtattctattgagccacataaacctcctggttttccagactctccttttctaattccccatatatttgccttaaatattgttccattattagaggacagcaattctcctgtatcaatatcacttatcccatgtcctaaagcacaatatttattatcctttgttataaatgtaacagttcctattccctgagaatcatctctaacccaaattcctaacatataatttccatttttatcagacacaggcttaatagatatcttttttgtaatattattattttttactgttaatgttactattttttctttgttttcatttataagatatgacaattgagacttattacttactgtttttccattaaattccgtaatatagtccccttttttcacaagaccttttgcaggacataatttttcgccattttttgatataacctgaccttcgtctataatcattactccttgagttttcagatacaggcccaccggcaaacctacagggtaaacttttcttttatctactacttttacttttgtatttttaattggaactatgccaaacattttgtatttcccgctatattcacctttttctcctgaatatatagtattttttccattcagccttatacttgttttattttcaacatttagtgaaacaggcatggaaaaattatatttggtactggtatttgtatttataaatattgtattaggcaatctatccttaacatacataaccgtagatactacaattattacaattgctgtcataatggatgtaattaaaaagttcctatatttttgtttgttcatttccatacccctttcgattatttttgtgaaaaaaatagaaggaagacttttgtcctccttcttaatatgtgtaatattctttaattaaaacaagttactttttgttctatctgccatatctttcatttcagttgcatgaataagtccggcctctgttattccactgcctccatttattcttacaagttcttctattgactgttgtcttgtaagtttcttaattgatgttgttgtagaattttcatctgctgtctttttaattaaataatgactatccgccattgcagcaatctgtgacaaatgtgaaatgcatataacctgatgatttctgctgattttagccattttttctgccactttcatagccgtctgaccacttattccagtatcaatttcatcaaaaatcaatgtgtcaatatcgtcttctgttgcaagaattgacttaatagcaagcataattcttgataactcaccacctgatgcaacctttaccaatggtttaacagattctcccggattagttgaaatcataaattcaacattatcaaatccgttttctccaatgctttcttttcttgtaatctgaatttcaaattcaacagcaataaaattaagatcaaccaaagcctgttttacaagaacttccagctcctttgcagctttttttctttgttcagataactttgtgcagagattatttaatgttccttccaattctgaaatctgatttttaacgctttccatttcatctgtcatattgttaagtttttccagatattcttctttttcttctttatatctaagaatctcttctatactattgccatattttaattttaaatgattaataacatcaagtctttcttcaacttccctaacatattcaggattaaaatccattccactgttataatcataaatctgagatgtaagctctctgcaaagattatcaatatcatatagttctgtctggaactggcttattttttcatccattcccttaatactattaatatccattacagccttattaattatatccccaagaccgcctgctgtttcataacttaaggcgttgtaaatttctgacaacgctgaaactatttccttgctattagataacttcttaaattcttcttctacctgaacatcttcttcaggtttaagattagctgattcaatttcattaacttcatattcagcaaactcaatctctcttgctttttgaccttcatcaatattaaattcttctaatttttttattaattttgtatatttactatactcttccttaatcttttcttttaattctaatatggaatcctttgcaaatttatccaaaatatctaaatgattttttgtatataataatgactgatgatcgtgctgaccatgtatgtcaattaataaggacattacattttttaatgtttttatattaacagtttccccatttattttagaaatacttcttccttctgaaatctttcttgtaacagtaacaatgttgtcctcttccatataaatatcatattttttcaattgttttgcgcaattttcgctaactgaaaaagttaattcaaccaaagaataatctgtgccttttctaatcatatctttagaagccttattgcctaaagcaatgtttacagaaccaagtataagtgactttcctgcaccggtttcacctgttaaaacgattaaacctttttcaaagtccacatctacctcttctattaaagccaaattctttacatgtaaatttaaaagcatgttttcctcctttcttcattttagataattgtatctttccaatcacccagagaaaatttcattgcaaacacgttgattttatcattttgctccgtcgcctattgcaaagtgaaaccctaaactcgcctacggctcacacagtagcaatcaaatttaacgaatgaaactttctatatgttccttaaccctatctgtttcctcagcatgttttaccacacacattattgtgtcatctccggcaatacagcctaaaatttctttaatctgcattgcgtcaagtgctgcagccactgccattgccattcctgacactgtttttactacaagtatatttcctgccgtatccattgttataattccatcatttaaaacacgcatatacttgctatttgatactatatctgaactgctctgtactgcatatttctgcttaccgccttttgtggctatttttgtaagattaagctctcttatgtctcttgatattgtggcctgggttacattaaaaccattttcaacaagctttgctgccaactcttcctgagtttcaatatcataattggttattaattctattatttttcgctgtctttttgttttcatggcatatctcctaatcaccaagcttatcctttattacctgaagaaagcttccttcgtcaagcttagctatctctgtggtttcaactgcttcatatattctgattctatcttgtgaaactatgttaaatattccatcaccgtcaaatgctatctttctgttttcttcattaggcgttcttgacggtccgattataacctctatttcatcatttcttgacagaagaatacttcttgttccaattgaatgaggacatataggtgtaagaataatcatatgtgaatcaggtcttgccacaggacctcctgctgaaagattgtaagcagttgaacctgttggtgttgacaatattattccatctgcctgaaactttccaagaagttgaccgttaacgtacacatcaaaattggaaatagccatatcgccacctctatgtattacaatatcattaagcacgttagacttgtacacaacttcattgtttcttataacctgaccacacaacatcattcttgactcaacattaaatctgtcatttaaaagtctgtcaattgagccttccatttcttccggtgaaatttctgcaaggaaacctaaagtacccttatttacgccaataaaaatcacatcaagtttctctaaatctttagccgcatgaagtaatgttccatcgccacctattgttataacacattcaagatttcccggaacctgctcctctaaaataacccgatactgtcctgtagctgtgtccacgttatttaaaaccacgcaactgccacctttttttataatataatctgatattttatttgcaatgctgtttttttcatctttatagttgtttgtaattatgcaaaaatttttcatccaaaaactccaatattcaaaaattataattataaacttaatctaagccagtctaaatctaactgttttcctgcttctttttatcaagtgttacatgtgaatcttcaacaactttaacagggtcaacacatatctcatctacaaccggttcttcaccattgttctgcaaatataataaatattcaatattgccctccggtcccttaacaggtgaatagtcaagatttaaaatcttaaatcctatggacattgcatattctattactttttcaataacctgaacgtgaaccttcttatctcttacaacaccttttttacctacattctctcttcctgcttcaaactgtggcttaataagacatactatctgaccattttcttttaaaagattcttaacaggtaataaaaccttagttaatgatataaatgaaacatcaattgaagcaaaatcaagtacatcatcaatttggtcaggtgttacatatctaatattagttctatccatacagattactctgtcatcctgtacaagtttccaagcaagctgaccatgacccacatcaacagaataaacttttaccgcaccattctgtaacatacagtcagtaaaaccacctgttgaagctccaacatccatgcatgtttttccttctatctttactccgaaaacatccatggctttctctaattttaagccaccacggctaacgtatttcagtgtctttcctctaacttcaatatttactttttcgtcgaaagttgttcccgccttatcctcgcgttcattatcaacgaaaactataccactcattattatggccttggctttctctcgtgaaggagccaaacctctttttactaataaaacatctaatctttctttcatcttgtcagttccattaccttttcgtatatatttttatagcttattcctatttcttccctaagcaaagccacgttaccctgttccacaaacctgtcatcaattgccataacctgaacatctgcatcaattccactttccaatatgaaagtttcaacgctttctccaaaaccgccttttttaattccttcttccacaacaattatatgtttgtgattttcagcaactcttttaataagttcagtatccataggtttaataaaaacaggattgacaaatgcaggatgtacattctctttctcaagcatatctattgcattataggtttcctcgaccattgagcctacagctataattgccacattaccacctgcattgttgccatctttactgccttcttttaatatctgaccttttccatactgcaaattaatgtcttccttaatttcaggaaaagcaatacctctcgcaaatctgattgctattggcccgtcaaaatgttcagcaaacttcattgactcttttaattctttaattcctgacggtgcaattattgtcatattaggcattgctgacagaaatgacatatcaaaaatgccctgatgggtttcgccgtcactaccaaccagacctgccctgtcaaaaatcaatgttaccggaagtttctgtatacatacatcgtgtaaaatctgatcatatgctctctgatagaacgatgaatatattgacaccacaggcttgtatcctgatactgcaagtcctgctgcaaaagttactgcgtgttcttctgctattcccacatcgaaaaatctgtcaggtaattctttttggaatcttgataatcctgttccatcaggcattgccgctgttattgcaagaattctgtcatttgcctttgccattttaaccaatgtttttgagaaaacatctgtatatgacatcattccgttagttactgtttcaaggcctgtacttatgtcaaaaggattaactccgtgatacttagaaggatcattctctgcaggttcataacccttgcccttctttgttcttacacaaataataatcggtctgttaatctttaatgcctctttaaaaatatctatcatttcaggaatattatggccgtcaataggcccaatagatgttattcccaaatcttcaaacaatccctgactaataaacagattcttaatatggtcctttgttctttttacactttttacaaggcttgaaccaaatttggggattctgctaagtgatgtttctacatcacttttaaaatcattatactgttcgctagcccttagcttattaagataattagacattccgccaacgttttttgatattgacattttgttgtcatttataataataagcatatttctttttagattagcaacattgttaatggcctctaatgccattcctccactaagtgcgccgtcgccaattacagctactattttttcatctgtttcatttagtttagctgctgttgccataccaagggcagcagaaatggatgttgaactatgacctgtatcaaagctgtcacatagactttcatgtcttttcggaaaaccacttaatccgtttaactgtcgcaaagattcaaactcgtccttacgacctgttaaaatcttatgtgtatatgcctgatgtccaacatcccatacaatcttatccttagggaaatcaagcactgcatgcaaagctattgttaaatcaacagtacctaagttagaagcaagatgtccccctgtcttacttactgaatcaataagaaactctcttatttcttctgcaagttttggataatcttttttatctatatttttaatatcatttggtttattaattttttctaaaagttcactcatttatttcactctgttaattaattttataattaaatttttaaggaattcactatctcccccaagactttcaagtaaattaaccgccttctctgagtaatcttcaactagtctttttgattcatctattccttttaaagtaacatatgtagtcttattgttcttttcatcactaagaaccggctttccaagttcttccaatgttcctgttacatcaagaatatcatcctgaatttggaatgctatacctacattagttgctatttcttccactgtttcaacagcctgctcatctactcctgccagaatggctccaaccatcattgccccctcgattaatgctgctgtcttaagcttgtgaataaaattaattgtatctatgtctttttctttattttcgtttattacatcaacagtctgaccgccaatcattccgtagattcctgccttgtaagtaagaatattcatggcaagtgctgctctttgaggatatttactctttagtattgccatactcatagtttcgtatgccatattaagaagtccatcccctgcaagaatccccatatcttcgccatatacggcgtgtgtagtcttcttgcctcttctatacatatcattatccattgccggcaaatcatcatgtactaatgaatatgtatgaatcatttccattgctgccataaacggatatgcctctttttcatctccgccaaacaatcttaatgtttccaaaacaagcattggtcttaatctttttccacctgccttaagactgtaattcattgcttcaattataatcttctgcagtccttcttccttaggacaataatcgtatacaatcttttcaacgtatgccgttctttcctttaattctgtatcaaaattattcatttatatttccctcttcaataattttaatctgcttttctattttatcaatctggttgttacaatcctgtaccaaactaagccctttattatataattcaaatgactgttctaatgttattctgtctgactgcatttttgaaattatatcttcaagctgttcaaaattatcttctatgccgacattttctgtattattcatattatttcccgtattattttcttctataatacttgtaacattattttcagtattattctccattattttctccctgaacttccaatacacttgcttttatttttccgtctgaaattgtcagattaatattatctccttttttaagttgttccactgttttaattgattctcctgaatcattttcaacataggcaaagccttttgaaatcttattaagtggagataatccgttaagtcttactgcgtatatctgaagcatatgttttctactatccaaaatagtatgaaaacaatctgtaagatgcatctgcaagtcagatatatattgctttcttgtaagcaacatattcttaggactatacatctgaatactattttccagattcttagtaagtaatttgtatttttcaataaaatgttcttcgtaagttgtaagcatctttctataattctgcaacttattttcaaattccatataatcaaacactgccaattctgccgctgccgacggagtaggtgctcttctgtccgaaacataatctgctattgttgtatctgtttcatgtcctactgcagatataataggggtattgcaattaaaaatagcttctgccacaatcttttcattaaaagcccacaaatcctctatagagccaccaccacggcctacaataatggtgtcaagattcattgagtcaagacatcttattccgttaacaatgtcttttgctgcatcagccccctgcacaaggcatggatacaaataaagttgcacatacggattacgtctggttgttatattaataatatcttgtattgccgcacctgtctgtgctgtgcatattccaattcttgtagcatattttggaataggtttcttatacataggatcaaaaagtcccatttcttcaagttcaacttttaattgctcaaatctttgataaagtaaccctgcaccttctaatataatctccttagcatatatctggtactttccatctctttcataaacacttacgctgccaagaacaacaaccttctgtccttcttccatcttaaatttaagtcctgacctgttacctgcaaacataattgcggatataactccggttctatcctttaacgtaaaataaatatgtcccgatgtgtgatatttgcagttacttacctcgccttttatatagatattatttaaggcaaagtcctgattaaacattctttttatataattgtttacctgtcctacagtatatatggatgccatattaactcctaaaataactttgcaagtacaccgttaacaaatgaaggtgaatcatctgttccatatttcttagcaagttcaatggcttgatcaacagcaactttttcaggaatatcttcatcaatcttcatttcataataagcaagtcttaatattgtaagatctacttttgacattctatctgttgtccactttacagcagccttattgattgcttcatctatttcgtctatcttttctgctattgcatcaactctgttagaaataaattttctgtcttcttctgatacttcaggtgtttcctcccaaaacaaatcatactgtttcggcatttctgatctattgtgaaaatcattacaatataataacttaaatgtattctctcttaatttaactctgttcatatttcctcctaaaattgctagtattcctatgatgtcaaaaagggtgtctgttacagacaccctaaaaaataacttgtttagttagttgctacgcttgcaatgttcacattaacattggcaacttccatacctgtcatgttttctactgttgttttaaccttgtcctgaaccttctttgatattgtaactatattctcattaattctaagaataattgataaatctaccattactgtattatctacaacgtcaactctaacgcctttagataatttcttcattccaagttttgaaacaagctctgctgtgatgtttccagccatagccacaacaccatcaacctccattgctgccattgctgaaataacagcaagtacatcgttactaatctgaacttctcctaagtcagaattgtcatgttcaatataagtagttctctgagattccatattgacctcctaatgcgtattcttgtgattattataccatcattgatgtcattttacaactgactaaattattgtatttagtttattgccagtctatgtcaggaacctttaccactaccgttttagtcttaatggcagtgtccgccacacttgctgcaatctccaccgcactgaagtgacttgccggcttttttatctttaaccatgcttctaattattaaagctactataattgctaatactattagtacaatgattgttcccatatcattcgcctccatttttcttttcaaacgcaaagttgatagcaagattttcttgcccataaaatcttgctatcctgcttggctatatattaacatttagaagttttccttgcagtagttagtataccctaacctctgttctatgtcaataacttttttctttattttggttattttataattttttatttaatttgaatatttatataataaatggtataatatggtttacgtatatgttaacggctttaggtttcacagcaccggttctttccggttacttagttggaattattttaaatttaaaagaattaagttaggatggtaataatatgacacatagtaacgaatcagcagaaaattatttagagacaatcttgatgttaagtcagaagcttcctgttgtaagatcagtagatatagcaaacgagttaggatataagaaatcaagtattagtattgcaatgaagaatttaaaagctaagaatcagattacggtaaccgatgcaggctttatctatcttacagatgaaggcaaaaaaattgctgaaatgatttatgaacgtcatcgtttcataacagcttttttaacaagccttggagttgatgagaaggttgcagcagaagatgcatgtagaattgaacatgtaataagcgaagaaagttttgcagctttaaaagaacatattaaattataattttaatattaacgccgcaccggatggtgcggcattttttattggttgtttgttggtgtaattgttatattctttgctgctattcctgtttttctttttaccacattttcaatttgggctttctttgtttcatccatctcagcatcatttacaataacatccacctgtttgtctgtaattgttacaagcacatcctcaaaaccttttgcctttaataacgtttccactgtattttccatatctgtagtttttgtaagttcagtcattgaggttactgctttctttttttgattttcctccaagtccttattgttaatcacttccaataaagtttccttattttttgaacgtgtctgttccctgtttaatcttgcctgaaccatatagctgcttactgatgtgccgttagttaatattgcagctcccggctctttggtttcttcctgattagtaccatcgtttttttcattttcaccatttacatcattccccgaattttcagcactactgtccaaaccttcaccgtccagactttttatttcaccgttttcatctgaaagattatcctgtgaataaacactgtcatatgtattattgtttgcctctttcgtcttttccttctttgacagattatccgtataattcaaataccctgcaactgcaatcagaacagccagagccgtaacaataatctgattcttttttaatatttttttcattggacatccctcctaatcaacttctaatactgatattttatgtatcggaacatcaaataatgccgataacatattaataatttgtcccttctttttttcatccgaaataccttttgccgtaattgctataccctcaacttttggataaagttccttaactatataaggctcttctccgttatttcctgaaaatatgactgttgactttttagatgaagcatttatgttatctctattttcatttttttcctttcctgacgaatcttccacatcctcctgtaatattttttcgctgcctgatttaaaagatattacaacggaaactttagatatgccattaatattctctaaaagtttttcaactttattttccatatcagtttcgtaattgtttgacgttgttttggttttaacattgctatccggcacttttttatcttttatattttcaaaatatgatgcacctacaagcattattcctgccaatgccaaaagaagtattttttcttttcctattctactgatttttcctattttgctaatatccttaatttccggcattttctttatatccattgctcaccctttcataaaccttattttcaagactctccctgttattttcaaaagtataattttcttcttttaaactgccatgagtgtagtttttaattatttgctcaatgtcaccactgttgttttttatattaataatgggattaacgattagtgcaagcaaaactatacctgcaaaaagttttatatatttcttactgctgctttccggaaatatattcaaaacaagggaaattaccagtgaaaaaatacatatattttttatatattgatacaaaaattccatttactattccttttttattatgattagagcttcaaaatgttaaaatttgattccattatgtttttacgttagttgtcatgcatataattgcaatgcttattacaaaaagaaaaccactgcttattacaactcttataagaagccttatgcccttacaaaggcagttaaggctttcaattattcgtctatctgcaacgggctggattattgccgtaaaaatctgaatcgacgctgaatatatttgaagtttcatatatggaacaaagcaaatcaatattatcattatgattccaaatgttccgatgcagtttttaattaaattagctgaacctaaaagcattcccgtaaccgcatcagccccatcaccaataaccggcaaggttccgataaacttctttattgtagtgttttttgccatatcaactgagggcaaaattaatccctgaataatatttagtccggttactattcccaccattgtcttatttacaaaatttataaaattctctattacgtgggttgttcccgacagaaaatcttctctggaaatattattaaccaaacttattgccatatatatttttattgcaggcaatgttattttcaaaaaaacgaactggcaaacctcaataatcacaagtgttaactgataaaaaccggctgctgccgcctgtcccactattgacaccgacaaaaaatacgccggaatcattccgccaacaaactttaataatagcttcactaattgggcagctataattgaaaactcctcaaacatagttaccataattgcaactgtaaccatataacatatataaaagcctgtatcgctaatgccattctttgaaaacacatttgcaaagtttgtaaaaaaagaagcaataattgtaatcaaaagcagattaacaagagttttttcgattagacttacatcccctattgttttttcatatgcagttcttcctatctcctttaaaacaagaagcacatctccgtcccttaacttttttaatatatatttgtaatcaatgttatcatacccctgagttttaagaatttttccgctgtcttccaagtcaaaatcatcaattgttataatctcttccgaaatcactcctgctttaacaggtttagacgttaaaaataacaaaataaaaaatagcaaaacaagcttaaatataaattttgtattaataattctcataatattttccttacgataattgattgggaatatttcttttctaaaagtttctcggaataataattttctcacaataataactttccaatagaagaaatcagttccgtaaaaaccggaaaacttataaccaatacagataatttcccaaaaatctgaacctgatttgccacagcctgatacccacaatcttttgctatatccgaagcaatttccgatataaaagtcacccctgttatttttaaaataatttttatatattccctgctaacagaagttatgccggcaagcctttctaccatttccacaatttcattcactcttacaagtgaatataagaaaataaaagtgcatcctaccaccgaaatcattattccatattcaggttttattgacttaaactgaattgccataagtacaacaacaattcccattattcctataactaacattttctaacctttaatttataattcaaaaagacgctgtatagtactgaacaattcatatatgtaaggcacaatccacataagaacaagaataagtcctgcaagacttgtaagaaaagcctgctcttctcttccactatgttttaaaatctgacccacaacagaaactattatgcccacggcagcaattttaaaaatcaaactaatatccatatttctccctatataagaactattcctaaaaatgccccgcaagtaattccaagcattctgtacaacttacatttttcatttttttctgcttttaattcttttattgttaattggatttgtgactgatatttttcaatattattaatctgggtttgtctgtcagttattccaagccctctgccaaaatctttcagactgtttttatcctctgattttagtgatgattttttatcaaaaatattatccacacctaaactccatgccacgcttaaaggtatttctgactttttaaaactttcctgaacatttgtcacaaactcccccaccttcccctctatcatttccgatatattttccaaagcttcctgaacagaattattgctataactaatttccccttttagcaaaatcagcattttctgtatttgctctaatctgttaattctttcaatataatctttgctaaacaaatagcccattaaggaggctgacatcataatcagaacaattcctgttattttcagatacatacatattcccccatactttttataactatttttcttttaaaaatcttatctatgtcttgtcccagcttttcccttgcttctgccaaatcttttccatgaatagttgccacaacacttaccccgctgtttactgcatattcaatcgccttaaagtcagctccacttccaatttcatcaacagctataactttaggtgccatagaccttattgccataacaatgccactatactttgtacaatcacttataacatccgtccttagtcctaaattaatcattggaactcccctgtaacttccacctatttcatttctttcatccacaactgttacatttattccttttaaattgctataaccccttataatatttctaagcaaagtagtttttcccaaacccggcggggatataataagcagattttctttttcttccacaattttatttaccaattcacaacctgcgttttttaagtcgtggctaattctgtaattcataaatttaatattttttattatattaattcccttatcatccattacaacctgtcctccaagtccaactctgtgtcctccgggaattgtaatatatccgttacgaatgctactttcaaaagaataagccgaatattcagttatcagattaaaagctgttttaatatcttcctcatttacaatatattctgaaattacatattcattattcttaataaaaattattaaagggcaattaatacgcagcctaatttcagttaaatcattaaaatccatccactgattttcgcatttatttctgatggcatttctcacattaggtggtaaatatttttcaattatttccatattttcaatctccttatgaaaatatatgtgaaaaaactgctattattctatttacttttatgaaatataaagtaaaataatattaagtacacatattattttatgtaacaattttataaataattaggaggagcttatgaaaaatacacgtattataggcataatttcagttacagtgcttctacttagcacaataacaatctacggatatgaaagttcaggcaacaaaaacattaacacttatgaagctactcaggaatcaacaccaagtgttacaacaattcctgcaactacaacacctgtaactactaatcctacaacaaagccggtaacaactactaaaccggtgacaaaacctacaacaaagccggtggctactactaaaccggtgtcaaaacctacaacaaagccggtggctgctactaaacctacagctacaaagcctaaaactacaacagctgctaagaacaatgttaaagaaacaacaaagatttacaacaaagtaaaatctatttcattagacaagaaagctattcgtttaaataagggggacaaaagaactcttacttcttacgtaaaatacaagaagcgtaaaaaaggagttaacgaacctttaatctggaaaacatcaaacaaaaaagttgctactgtttcccagaaaggtgtggtaaaaggaaaatcaaacggaaaggcatacataactttaaaatcaaaagtcacaggcaaaaccgtaaaatgtaaagttaccgttgcaaagacaaaatacgttgccttcactttcgatgacggtccgggaatctacacagacaagcttcttaaagctttaaacaagaacaatgcaaaagcaacattcttcgtagttggctcatgtgtaaactcacataagacacaattaaagaatgaatataaacttcatatggaaataggtagccatacatacaatcacagcaacctgaaaactttatcagtgccacaaatcaaaaaagaacttggcttaacaaataaagtagtaaaaagtgtaatcggtacaacacctacgctacttcgtccaccatatggaagctataataaaacaacaggaaagtacgcaggcgtaccaatgatatactggtcagtagacacacttgactggaaatacagaaacgtaaactacgtatcaagtacaatcctaaaagaaacaaaagcttgggatatcgtacttctacacgatatacaccagacatcagtagacggatttataaaggcgttgccaacactaaaaaagataggttacgaactggtaacagtaagcgaattgtacagccttaaaggcaaaaaacttaaaaacggagtaatgtattttagtcctaatagggattaacttttccacaaaaaagaacaaccaactcaacgaaagcacacttttgctgctctcggctcgtagcggtactaagaatctatgacagtttcactgccctatcttctaagaaccgacggcctcaaagcactttctttagagttggttgttctatttttataaatttaattgatttttgctctaaaattttaacttaaaaattttccgttttgccattaaaatcttagcctaagagttcttttaccatttcgccgttaaattctacttttttaagattgtttacttcgatttggtataatgcgttagctgccagatgttcggctgcctgttctaaatctcttattccgcttgtgtttttgtatatttccattactgcatcaagtgcttcttctgtcattacacattcgtcttcttttaggctcattctctttaatacctttggaagtgcaaattttgaaaagatgattttcttttcttcgattgtgtagtcaggaatgtctattactgcaaatcttgacattaatggcgcgcttatccggtctttctcgttagctgttgcaattgggtaaacaccaactgttggaatcatacattccatatagttgtctgtaaagccaagattgtcaagaagtgttaataacacgtctgccggattaccattaccctttcctgatgctgctttgtctaattcgtttatgataaatacaaggttagactcgcctgccattgagaaggcatccattataattcccggtttggcgtttgagtaaatacgtgagctacctgttaactgttcagggtcgttgattgaactcatatcaagtgttgtccaaggaagttttaatatccttgcaaccgcataagctatctgtgattttcctgttcctgcaggtccgataagtaaaagtccgtatgcaggaagtgtatgtgtacggttaatctggataattgtttccataatacgctgttttacccgttccataccatataattcttcgtctaatatttttcttgcttccacaggatcaatagcttcaaaataattatttttccactgaatgttcatcataattgaaagtgctctctgtgcgtgatgtctttcttcctgtgaaacttcatttgaacgggcaactgctaagtttcttcttgcccaaagtctgatattatcaggtaaagttcttccggcgcagttcataaagtcagtaatactctgaatacttgtaagcttcatgctgtccccttcttcttcctgattctcgtctaattcttcttcaataggaggattgcttgcaagaagtctttcgatcataaactgaaggaatccgtcttctgctgaaagctttgtaactccccctgctgctgtttccctgattttgtaaacagcataaccattctctgtattctcacctgaaagtcttacattaatatggttttcacctagccactttaataaacttacaaaacgtgaatctatttttaaaatatctgctgtaactgttccgtcttcctcttcaaactcaaaagttgtagcttttgtaggattagtgaacttaccgcttgagtgatgtttccactgtcttttcttattgtccaatactaatattggcttctctgctgaagttgttttctcattagagctaaatgttgtatatgtacatacaacttcttttttctcctcaggtgcattgttaaaatcaaatactggcataacttctactctctcttttttcttttttattctctgttaattttaaagcatatttcaaaaattacaacacttttaatagaaataatgtattaaatgtagtacattccctgattgtattcctcataatctttgtagctgctttctaagtctgccaaagtggtgttttcaagtacttcatccagtctgtcattgattttgtcaataattaagttctgaattgttaaggcaattctaggattttcgctttctgatacttcttctctctcaattttgtatgcaccatctaaagcttcgataattgatgccactgtaattcgtgaagggctgtccccaagtaaatatccgccctgagcaccttttatactcttaataattcctgcacgtcttaatgaggcaaaaatatgctctaaatactgtggtgaaattccgtttctttctgcaatgcttattaatgaaacatgaccttttgtagaatgaattgataaatctattaaggctgttaatccgtatctgcttttctttgataaattcatttttctcttccttctctcttttataatttcttttcccgatttttatgattttaatgtaatttgtacttttcctactcatttggtaggtattatattagtactctaaatcttttacttaattttgtcaagttcttgtatatttttccatattatattactatttatactatagtacacagggggcaatttttgtcccacttatataatttttaggaggcacatatgagcgatacatatatttcagattctattaaatacattggtgcagatgatactactttagatcttttcgagaaccagtatattgttcctaacggggtttcatacaattcgtacattattatggatgaaaaaattgctgttatggacactgttgaccagagaaagacagacgaatggtttgataatcttaataaggcattagatggaaaaacacctgattaccttgttgtttcccatcttgaacctgaccacgctgcaaatattcagaattttgttgaaaaatatcctacagctaagttggttttaagtatgaaagctaaagcaatgatgccacagttttttgaaattgataacttagatgatatttgcattactgttaaagaaggcgacacacttgaacttggtgagcataaacttacttttattatggcacctatggttcactggcctgaagtaatggttgaatatgaagaaaaagaaaagatacttttcagcgcagacggatttggtaagtttggtgctctttctgctgatgaagattgggcttgtgaggctagaagatattactttaacatagttggtaaatacggtgctcctgttcaaactcttttaaagaaagctgcaaatcttgatatcaagacgatttgccctcttcacggaccaattcttaaagaaaatcttggatattacattgataaatataacacttggagcagctatcagcctgaggacgaaggcgttcttgttgcatatgcttcaattcacggcaacactgaaaaagctgccaaattaattgcaaaaactttagaggaaaaaggtgctcctaaagttgccattactgacttaacaagagatgatatggctgaggccattgaagatgctttcagatatagcaaacttattattgctacttcttcatatgatggtggtgtttttccacctatggaagactttcttaacagactttcacacaaggcttaccagaacagaactgtagggctcgtagaaaacggttcatgggctccatgtgctgcaagggttatgaaaggatttgttgaaaacatgaaaaatattacaatatgcgataacacagtaacaatcaagtctacattaaaagatgctgatatggatagtgttaatgcattggttgatgaaatcttaaataaataaactttaaacaaaaaggagacttgcataaaacttaagccttatgcaaagtctcccttttgtaaagtttatatatattacgcaacaagatttttgccgatgtaattatatacttctatatagtttcaagtgcctgtgaaagatcatttattaaatctaaattagagctttgcctaagtttttgcattcactttctgcttcttcatcaggtgtttcctgacagattacgaaatcacacgccataacggctccatcaccgatacatgtttcttcccatgtacgcatccattcaccatcgccccatccgtaagaaccgaataaagcaatctttttgccttttaacttaggttcacattccataaacattggttcaaattcactttcttcaagctgttctgctcccattgaaggacaaccaaatgcaatggcatcatatgaatccatcatttctgcgttaaactggtctgcaggaagaattgttgcttctccgcctgcttctgttactccttctgcaaccttagttgccataattcctgtatttcctgttccactccaaaaaactactgctaccttactcatttttgtcttcctttcctgtattgaaatgatttatatgtatagggacttttttattattttcattttttattatatataacgtttattatatatttttaagtttctaatatgtaatgattttccatacaatttatttcatatataacatttattacatattttctttcaaagtcctaatatataactattttatactaccgtaagttttaaaacgctcttgccggctttccactgttccatgtaaattcttgtacatttattgaaaagttcaaatctacgctcagcttcacactggtcgcaataaactttccaacatccacagcacttaaaatttttccccttgttttttatgaatcctacaacgtcccccaccggatatcctaagaacaatccaatttcgtgagggaactgtgtagtttcacttaatctcattttaagtttttcaatagccttctcaggctctgtactgtcgtacccgtaataggtcaacacctctttaacccccggcttcattaaatccttcgccaacatatctattctatatacataaataaggactgattttttacttttacgaagagtttggatttttattcctttgccgttaagcaaaagatttaattctgccatgtctttttcaagttgtttttcatttatgaagtaacaattaattaaacttgctgttttaagtgatgccaatgtaggtgagcataaatcaattatgtacttttccaaaacattatttctgctcataaacatcctcctttagacttatacggaagaggctactacacctccccctataaatccggttcaaaatgatttattctcggttagttttttctaactgtcattatattaccctaactttagggatattgcaagcactgtttttgataaaatttcccaactagtttgttatacttctagcttcttaattaaaaatttttaccatattctttaatatctctacagcaaaaatccctacagatttagttttttctaaatctgtagggattataccttttggtccgttgcctaaatcctatagactaatctaatttcgaagcaacggcattattattttgtttttatttgtgataaggttcgttatttattattctatagcttctataaatctgctctaacaaaataactctcattaactggtgtggaaaagtcatcttagaaaagctaagtttaaagtttgctctctttgaaacgtcctgatgcaatcctaaggaaccaccgattacaaacacaatatggctttcgcccattattcccaacttgttaattttgtcggcaagttcttctgaatcaagcatcttgccattgatttccaatgttattacaaaagcatcatcgggaatatttttgagaattctctcgccttccttagcttttataatatccatctctttctcagtactattctcgatggtcttctcgtctgccacctgaataatattaagtttacagtatcttgataatcgctttgaatactcatcaatggctgctgtgtaaaacttttctttaatttttccaactgttaaaactgttatcttcattagtccattccttagttaattcttataataaatcttattaatttcaagttactttctaattctaaataactttgaaccttattgatttcaagctacattctaatttgaaagaactttaaatctttacaatttatccttactagttcctcttttatcattttatttaactataatgtttcgcctgggtattatacattttaaaatacaatcccttggtattttctattaatttctcatggcttccctcttcaactactgaaccatcctccagaactattattctatcgcagaatctgcatgatgatagtctgtgagaaatataaattgctgtttttccatggaccagtttgtcaaagttcttgtatacttcatattcagaaataggatcaagtgctgccgtaggttcatcaagaacaactataggtgcattcttatacaatgctcttgcaatggcaagtttctgagcctgaccgcctgacggttcaacgccgttttccacaaacattttatagatatgtgtggaatctttttcttctaggctggtaatccaatcctcaattcctgcaatcttgtatatttcttctaagtcaacttttttgtcctgaaaaactgttacattttcctttattgtaaaagcaaaaagtctgaaatcctgaaataccactgacaacaatctaatatatcccataaaactgtactctccggcttccctgccatttattaatatttttccttcgtaattatcgtataaatgacatagtaactttatgaaggttgtctttccggcaccattttgtcctacaatggcaacatgttctcctgccttaattgttgcagacacgtttttaagaatatacttttctgtgtttggatatttaaaacttacatccttaaattcaatttcacacttatcaaagtttgccaaaatatcttctgtttcttctaaagttatattgtctgacaatccgttttccgctgctgaactatcaaattcattgtcttcaacagctacactttcaacaaaatcaatatagaactttaaaactgaagatgtataattcatttcaagatatgaattaactatgtttctaattgcacttgcaaactcgcctgtagcctgaaataaacttgaaaactcgccaatggaaatggttttgttaaaaatatttaccaccagcaatatataaatggtcatatcacttacagaataaaatatattatttacattccaatatttcaagaatcccatgaaatattttttacttgtatcatatattctgtccacatagccgtcatatttcttttcaaatatttctgacgcgtcataaagacgaatgtcctttgcatatctgctttcctgcaattcagtattaaaatatgtactgcctctttccacattgctcatttctttgaagaacttacgtctgcccttgtttactttcgatgtggtataagagtttaccgcaaaagaaataattacaggaatcattaaccaaggaattcttgtacaaacaagaaccacaactccaagtgctacaaagaacttagtgataatgtttgccagtgctgtaataagaccattaacctgtcctgtttcatttaatgctctttccgcatttttaataatatctaaaacatctgtgtcctctgtatttttaaacttcattttaatgcagttcatacataaattggttttaaatattctgtcaaacttttcgccaattcttgatatgttttctcctgtccacttcttaaggtttgaacaaataaaacttccaatacaaataaaagctacccaaaacacaatccaaaacatatttctcttagattcatctgcaatttcatcaataagatactgggttccaagaattgttacaaagggagacagtgaatttacaattatgtttaaaataagaaaagcataatatttcttgtcattctgccacgcaaattttccaaaaaacttaaagcaacggatattatctttattatttttcatactactgtcctccctccatttcaacttttaatgcttctacaccttcattgatttctaaatcagcatcttccacattatcgctgtttttttgtttttcatcataatattgtgactgaatgccaaacatataagcatattttccattcttagccattagttcttcgtgagttccttcctcaacaattgttccatcttcaaacattgcaatcttgtcgcagaaccttgtacttccaagtctgtgtgaaataaaaactgctgtttttccataaatcatattttcaaattcacgatacattctgtcctctgccaacgcatcaagtgctgctgtaggttcgtccaaaataacaacttttccatctttatacaaagcccttgccatggcaagtcgctgtttttcccctcctgacaaatcaattccttctttatcaaaaatttttaataaattagtatgtatgcccttttcgtatgaattgattttttcacttaaaccactttgctccagcacctcatttatcttattcatatcagttttgtcttcctctgcaaatgaaatattctgatagattggcattgcaaaacattccacattttggaatacaggtgaaaacagtttaaaatattcttccctgttgtattcttttatgtcaacatcatttaaaaggattcttccttcacttggttcgtacaacttcatcataagttttatgaaagtagtttttccggcaccgttaacgccaactaccgcaagtttcgctccattcttaatggttagattatcattctttaagacataattatcgtgtcccggatacttaaagcttacattttcaaatctaaattcaaacttatcaagatttatttctgtaatgtgaccatatttttcatctgctgtttccctgtcttccttccagtcaacaaagtttctgtaatcattaatcataagactattagttctcatatctgaataaatccagttaacatatcctactgacgcatggaatgtagatacaagtccaacataaagaacaaaatccgatatctgatacgcacctgtaacaacattgtaaacaagccatgtgtacataagaatcttctgaacaatcaatactgatccaaggcttacttcccacaaaaccattctgttgtgatgtttcctgtttaattctttgtatgtttcatttacacctgataactgattgaaaaatgcatttgacatattaaaaagtctgatatcttttgcaaaatcaaaattctttgtagttgactctaagtaattcattttacgccatgttggtgccattgcatctgaaaacttgatcttatctctttttgtaaagaaagatgaaatctttactattccaaaagatattacaatgaaaattatcatcattaatatattttggattcctattaatgccgctgacaaaatcattaatgttccctgggcaataaaatttctactttggtataaaactccatgaaatcccttgcctctgttcaatgctgtttttgctctttgggcacaatcaagaaaatccggtgattccatgtttttaaagtcagtatgaaataacttgtccattctcttcttttcaacatagccttctgtctttcgatattcaaactcgaaactgttgtaacatgtagtgctgataacatctaaaatcatcattattaagcaaataattactgtatacataattattgtgttaaatggcaaatcatcctcaataaatgacagcacatatttaggagcatatgaatttaacaaagtacccactatgtctcctataggcttaattaatgtaattgccagtagtcttaagttactctttctctcaatattcagggcataaataaaattatttaaaaacccatacgttttctgtttttccatttttttctcccatattcgtccgatttatattaacatcttaccatatggattttatgttctcaatcttaattataatgtttcgcctgggtattatacattttaaaatacaatccattaatattttttcattttctcctcccatgttttctttactcggtgtattcttattttttatcaattaactactcgcagacttttttattttactgactgtttatttttatcaaaatcagttatttacttgttataaatttagttttagtttatacttgttttataagatatttacggaacggagaattaatatggctgataataataatattttaaatgaagctgaaacagcttctgaaaatgataatttagataataatttaactaatgaagattataacggaacaacagataataaagaatcacagtacgttcctaacattgatgttttttcaactgataaggtcaacagctatgtgaaactttcagacaaatatgaagacattaaatcttctgctgcaacaatgcttattgttggtggagttggacttgttcttatggctttaattattgccaaggttattgttcttccaatcagtgcagaaacttcatggttgttctactctgtaatgggtggtgtttttattatttttgtaatagccggaattgtttcttttatgcatgctaagcaggttaagattgaagctgctgaagaggataaacttattgacagcattaatacctgggctaatgataatttgaaaattagcgatttagatcagggacttgacttaagccagcctgatgaaattcttttcttttcaagagctgaacgtattaagaaggctcttatgatggaatttgaaaatgctgacgaacctttaatagatgaacttacagaacagatttttcatacactatatgaagaatagtctttattaactctcttgactattcttctaatcctctgaagctataggttacctatccctatagcttcttttatatactaatttcaatctttgtaataaaaaaatggtttcaaactttattttctttaacgcttgaaaccatctttttttatatgtaaatatttctaatattattcatcccagttatgatatacctgctgaacatcttcatcttcatcaagtctgtcaataataatgttcatcttcttaattgcttcatcatctgttaattcaacataattctgtggaatcattgtaacttcagcctgtgccatagcaactccagctgcttctaatgcttctcttactacgctaaattcgttaggatctgtaataacttcatagctgtcttcttcgtcctggaaatcttcagctcctgcatcaattgcagtcatcataagttcatcaggatccatatcacattcttccttatcaatgataatctgtcccttttcgtcgaacatatatgctacacaaccctgtgttcctacatttccaccaccttttgtgaaacagtttctaacattagctgctgttctgtttctgttgtctgtaagtgcatcaacaataattgcaataccattaggaccatatccttcatatcttactgtttcatagttaattgcacttgcatttcctgctgctttcttaattcctctttcaattgtgtcattaggcatgttgtttgcttttgcctttgcaataacatcacgaagcttgctgttattatttggatctgctccgccttccttaactgctacagcgatttcttttccgatgattgtaaacatcttaccttttgctgcatcattcttttctttcttatgtttaatattcgcaaattttgaatgtcctgacatattaatcctctcttccgtaatcttctttatttctatttctaatttaaaccactagaaattttaacattttatatattaatagtcaactaagcttatgtatctaattccaaactaattaataatgctttgtccactattttaagcatttcgctgtctaaatgacaaaccttatctttcaatcgcttcttgtctattgttcttaactgctccaataaaataattgaatcttttataatattacatttgtcacagtctatttttacatgagtcggcagtttagccttagtcatttttgatgtgattgccgcaacaattactgttggactgtgcctgtttcccgtatcgttttgaataaccagaacaggtcttattcctccctgctcagagcctacaacaggtcgcagatctgcataatatatatcccctcgtctaataaccatttcacactccaaaaattgtttatttatatataagtattccaatttttgtaatgtgtattcaaaatataataaaaaattatatttctacttcataatcatcttcaaagtagtcctttgtgccaactattttgccatctttaacaaatactcttggcactctttttccaaggtcacagacaaactcataattaaatgttccggctaacgttgccaaatcatcaattaatatttcctctgaaccatcttttcctgcaagagtaaccttgtccccttccttaacgtccatacctgttacatcaaccataaactggtccatgcaaactcttccaagaatgttacatttcttaccattaattagaacatagcctttattgcttaagtttcgtggatatccgtctccgtatccaacaggaatagttgctattgtcatcggcttatctgccacaaatgtctgaccatagcttacgcctctgcctttttcaatgttcttaacatatacaacatgactgtatatagacattgcaggtattaatttcatattatccttatccatctcttctgatggatacaaaccatacattgagattcctgctcttgaaattgtaagggaagtttcaggcatttccatcatagctgcactgtttgcacactgatgaattggtattataacaccttttgcttctaccttggcaataaaatcattatattccttaaactgcttttcagcaaaagacttatcgacataatcagcctttgcaaaatgagtaaatgcagattcaatctccacatttggaagcttgcttatttctacgacctcatttactgcttcttcacttggaatataaccgattctgctcattcccgtgtcaactgcaatgttaaatttaactgttttgtttaacttaactgcgtgatctgaaaaagctttagccatcttatatgtaaatataggtggtaacatttcttcgttaattactaaatcgcacaagttttcaggaacaactcccagtatgtacaacggcttatcaatgccgtgtcttctaagattgtgtccttcccaagctgttgctactgcataaccaacgcattcattttcaagtgcttttgcaatgggtacagctccatgaccatatccatctgtcttaataactcctacaattcctgtttcaggtttaattttttctctcatcatttctatgtttttaattattgcatctaaatttacttcagcatatactctaaagtatttttctatatctttcattatctcattcctttaaataaaatctttattccttcaataatatctgttgccatcattgatgtctttgacacatattccatggctttatcccccgccaatccgtgaatgtatggtgccaaaacagttgcgttattaaattcaacacctatgcctataagcgccgcaactatccctgttaaaacatcgcctgaacctgctgtagccattccactgttacctgacagattaatgaaagtctcctgttccgttgtaataactgttcttgcatcctttaaaatacagttaatgttatatttataattaacttctcttccatatttaatcagattagaagcaatctcctcaaccggaatatttaaaaatctgctcatttctcccaaatgaggtgtaattacaacattcttgtgtaacttctttttcaatctttcgtcttctgaaatattgttaatcccatctgcatctataactgttggcaaattatattcaagaactttttcaatcatattcttttgaattacgcctgttccaattcccggtccaatggcaacaacatcacaccacttaaggcatgcttccaatgatttcatattaaaatgatgtacatcataagtattcaccattgcttccggaagtaatctttgaataatctgtctgttctgttctgcagtaaatacgcgaactaatcctgccccaactctaaatgccgcttcagcacaaagaaccgccgcaccggaaatatccttacttcctgcgataatcaaaatcttgccatatgtgcctttatttgaataattaggtcttggtggaataaaattaaaatcctctaatgttgcagttttaacctgctcttctatctgttcataagcttcctgaggaaatccgatatctgccacaacaacctgaccgcaatattctgctccaggatataaaacagtaccaattttataacttccaaaagttacagtgcaattagcctttactgcaacgccacagattttacctgtgtccgcactaacacctgacggaatatcaactgaatatacaatgttccttcccttattgatttttgaaataacatctttatatacaccttccacattacgggataagcctactccaaaaatactgtcaataataacatctgcatcgttataatcaccaactatgttaattccaatattatgtgcaatggaaagctgctgtttaaattctgtactggcttttgatatgtcacctaaaatgtacaactctgtgttgtaaccttttaaatgtaatattcgacagattgcgacaccatctgccccattgtttccaacacctgctaccacaagtattttcttatcctttaactggtttttgcagacaatctctgccacactcagtgcagccctttccattaaaaccaacgacggtattccaattgtattaatggtataactgtctacctttttcatatctgtacctgtaacaatatttttcatatattactccttagaatcgttcttttctgaaattctatatgtaagcttcattaaactttctgataagtgaacattttctactataatatcgtctgaaaaacttaaatctgtatgtgcaaagttccaaaaagcctttactccacactctacaagcttttgtgctatctttttagccggtccctttggcaatgttaatgcaacaatttccacgttatgtttttttacataatcataaatatctgcaatatccaaaatctgaccgtgagctgtcttctttcctattaaatcaggattcttgtcaaacaatgcagcaatttcaaatcctctgtttctaaagttaccgtagtttgcaatagcctgaccaagatttcccgctccaactattatcatcttgtgctttacatcaagtcctaaaagctttccgatttcatcatatagatactgtacattatatccgtatccctgctgcccgaaaccaccaaaattgtttaaatcctgtctaatctgagaagcagttacattcataagtttactcagttccttagaagatatacgctccacattctgctggcgcaactcatctaaatatctataatatcggggcagccttgtaaccaccgcctttgatattttgttcattaattattctccttgcttaagtgcttgtaatccgacactatccacagactacaatatatagtttcaattatagttattagcctaaagattgtcaaatatttgtcattctaatatgtttaaaattttgtctttttatggtaaactgttcactgttagcaaacacaaatattttaggaggatttatcatgatattatcatgtaatcatatatctaaatcttacggtgtagatacaattttggacgactgctcttttttcgtaaacgatggtgagaaagctgccattgtcggtaataacggagcaggcaaatctactattatgaaaattataatgggtgaacttagtgctgataacggtacaatcacccttggtaaaaacaagactataggatatcttgctcagtaccaagatcttgcttcacacaattcaatctatgatgaagtaaaatccgttaaggctgatattataaatatggaaaagaaacttgttgaatatgaaaaggcaatgtccggtgtttcaggtgatgaacttcacaagcttatggaaaattacactaatttggaacatcgctttcaattacttaatggttattcatacaaaagtgaaatcgaaggtgttattaaaggtttaggttttactgaggatgactttaacagagaggttggcactctttccggcggtcagaaaacaagagttgccctttgcaagcttcttcttgaaaaacctgacattattatgcttgatgaacctaccaaccacttagaccttacttcaatcaagtggcttgaaacatatttatctaactataatggtgcagttctcataattgcccacgacagatattttctcgacaaaatagttactaaggtaattgaaattgaaaatacacactgccacgtttatgatggcaactactctgatttttcggttaagaaaaaacaattacgtcaggcacagctgaatctttacctgaaacagcaaagtgaaatcaagcaccaggaagaggttattgcaaagcttcgttcttataagcaggaaaagttctataagcgtgctgaaagccgtgaaaaggctctggctaatatggaactaattgacaagcctgaagaattaaaggatggcatgaatattaaattagagcctgactgtataagtggtaatgatgttttgacagttgaaggactttcaaaatcatttgataatcttcatcttttttctgatattagttttgaaatcaaacgtggtgaacacgttgccttaattggcgataacggaacaggaaaaactactattcttaagattattaatgatattatcagtgctgatgccggaactgtaaagcttggcactaacgttcatataggatattatgatcaggaacatcacaaccttgaagattctaacactctattcgaggaaattgctgatgcttaccctgatatgactaatactaagattagaaatactcttgccgcttttatgtttaccggagatgatgttttcaaacttgtaaaggatttaagcggaggcgaaaaaggtcgtctttctcttgctaagcttatgctttcagaggctaatcttattatccttgacgaacctactaaccatttggatatgacatctaaagaaattcttgaaaatgccattaataattataccggaactgttttctatgtatctcatgaccgttattttattaaccagactgcttcaagaattcttgaacttacaaatactaaaataattaactatcttggcaactacgattattacgaagaaaaatgcgaagagttaaccaaaacatatgcgcctgccattgaaaaggagaaaaaagttacttctacttcttccggcaagcaggattatttagaaaggaaggctgaagccgcaaggactaggaaattgaaaaatgatatttcaaaagtcgaaaaagaaattaaagaaaaagaagacagattaaatgaactggatgagttattagcagatcctgctgtttccactaattccgcaaaacttaacgaaattagtaaagaacagaatgaaataagtgaacgattagatgaacttatggatcaatgggagattttatctgaccaacttgactaataatattgcattttgtgctaatttatcttaaaataattttatagtttttacgtttaaggagacagtattatggagaataaaaaagtagttgttgctttaggaagaaatgctttcagtgaatcatttcctaagcagcaggaacgtgtaaaggcagcagcaaaggctattgctgatttagtagaagaaaaatatgaagttattattactcacagtaatggaccacaggttggtatgattcagacagccatgactgaatattcaagacttgatcctgacagaacagttgctcctatgtcaatttgtggtgcaatgagtcagggatatatcggttttgaccttcagaatgctattcgtactgaattacttcacagaggaatttacaaacctgtaagtactattatcactcaggttcgtgttgatcctttcgatagagctttcaatgctccttctaaggttatcggcagattaatgactaaggaagaagctgaaaacgaaaagaagaaaggtaactatgttgaatacgaagaggatcaggatggttatagaagaataattgccagccctaagcctattgatatttatgaaattgatgctatcaaggctttagttgatgctcaccagcttgttattgcagcaggtggtggcggaattcctgttcttgaacagcgtacaggtttaaagggtgccagcgcagttattgaaaaagactacacagcagctaagttagctgacatgttagacgcttctgctcttatgattcttacatcaaacgattaccttacaatcgacaacaacggcacacaggaagaattaaagaaccttactgctgaagaagctaagaagttaatcgatgaaggacactttgatcctgtaacatcattacctaagattgatgcttcactttcattcgtattagccggcaagggacgtaaggctataattacaaacctttcaaaagctaaagaaggaatccgtggaaaagtcggaacaataattgaataattcaggtttggatatattgatatttgatatttggatatattgatatattagtatattgatatttggatatattaaaaccattattaaaacaagatataatgacaatggcacagggctgtgaatcagccctgtgttttttgttgtcagaatattgtgtcggtattgtatcaccagtgattgggacaaaccttttctttcatttacggattatatagcgcgtttcagttgctagattccgtaatcggtgacgaacagacaagcttttttctatgatttacggattatatagtgtttcggttgctagattccgtaatcggtggctattggagaagaaaattgacatattttacgttttacaggggtgattttgtctcacaattcgtaattgtattttcaattacttgtcatatgataatttcttttgctgacacgtaatttttcacgtgatagcaagctttttgcttctgattacgtgtgtcacaatatttctttcatatgacacgtaattttagacgaattttctagatttcttcattgaattacgtgtgacacagcatttacttcatgtgacacgtaatcgcagacgaattttctagatttcttcattgaattacgtgtgacacagcatttacttcaaatgacacgtaatcgcagacgaattttctagatttcttcattgaattacgtgtgacacagtatttacttcaaatgacacgtaatcgcaggcaaaatatcaaagatttcttcaataaattacgtgtgacacaatgtttctttcatatgacacgtaattcctacaacaatcataagtatactggaccccgtggcgtgggcaccgccccagacgactttgtacggaaaatgagaagataaatcttcaaagaatcaccttacttccaaagaaaaagctgtcaggaaatcaattaaccattcaatatttctctaccttatgttctccataagcttcctcaaagaagtattcctgtgaattgattgcttcgcctgtgatttcgtctttgcaatattttccattaggcttcattcttcttccttttacgttatctgaaagcattatgttaaacatacctcttatacgtttctttattgcttcatcgtatattggtgcagcaacttctactcttctgactgtgtttcttgtcattaagtctgctgaagatatatatattttgtccaaaggctccttaccgaaaatatagattcttgaatgttcaagatatcttccaactatactttttattgttatgttttcggtatatcccggaacgccggctataagacaactaattcctcttataaccatatcaacctttacacctttgttagaagcttcaataagttttttaattataactttatcagtaagtgagttgcacttaaatcctatgtatccttccttaccttctgctattttttcgatttcattgtcaataagctccactattttgctctgcatacatttaggtgatacaagaagatgctctgtttcttcaactacctgttccaaacatattttgttgaagacttctgctacttctttagcaatatcttcgttagctgtcatcaatgacaagtcagtgtaaagctttgacgtcttctcgttataattgcctgttccaacctgtgtaatatgcttaacctgattgtctttcttatatgaaataagacaaatttttgaatgaacttttgtatggtcgattccgtaaataattctgcatcctgcatcttccattctccttgaccactcaatattgttctgttcatcaaatcttgctctaagttcaaccattaccacaacttcttttccgttttcggccgcgtcaattaaagcctcaactacctgtgagtttttggcaactctataaagagtcatctttattgaagcaacatttggatctgcggcagcttcctttaaaagattaataaaacttgtcatgctttcaaaaggataacttaacagaatgtctttcttttcaatctgatcaaacataggttgtgttttgtcaattgctgtagaaacctgtggaatccttctcttaaagaataattcttttctatttctaagcatatcctgaatcttaaatacaaaatcaaaatcaagtggtgtttcctgatggaaagtctgctcttttttaagatttaattctttacaaagacttctaataaccttttcatctaacactcttgaatattccattcttattgggcaaagctttgtacgcattctaatcatttcttccattgattctctgtaactaatgtcttcgtctgcaaaaatctcatcaatatcaatgtctgcgtttcttgtaattcttattaaagacttgctttttactgtataattttcaaaaatcataggcatataatgaagtataagttcttcaataagcatatatctgccactacccggcactatttgaacaagcctgttaaaaacactacttctgcaaggaacaatgcaaatcttatcattgtttttggactcaagaagtgcaacagcatatatttcctgattatttaggaatgggaatggatgcttctttccaattacctgtggagataataacggcataacattattcttaaaataattctccattccatctttttcttcttttgaaagtttatcaaaatttacaatctgcacgccataattcttaacttttttcattaagtcattatatatatgctctttcttctttaacaattccttcgttcttttaaaaatacattctaactgctcgcttgatgtcatataagttttgttttctctttttttgtcagaaataatcatctgatcataaattgagcctactctaactctataaaattcgtcaagattagttgaaaaaatacttacaaaagttaatctttcacacaacggaacatcttcatcactggcttcatctaaaactctttcattaaatttaagccatgacaattccctgttatcatagcaaggcaaaactttgtgctttcctctaacaacttcttttacattttcagcttttgttccttctgcctttagttttttcttttcctgtaacccacttttcatttccggctgaggaactttattcttctctatgattggattattttcagttacgtctatttcgtttttcttatttatttccatattaaaccacccgagtttacttattaatctcctaagcatatgcctaacattctaacctgtcttataatttcatcatttggatctacacgttttggtttttcaaccgctgtacttaatggcacacttgtaatattgttgctttgtacggccaccattcttccatattgcttattaaggatcagttctgcacctttaacaccgattcttgaagtaagaactctatcaaaagcacaaggattaccacctctttgaatatggcccggtacaacaactctaacttcgccgtcaattttttcactaagttcagcctccaaacggtagcctgctgaaatatatccgtcttttgctcttttctgcttaagttctttctttgaaagctttgtctcttcctgtgaaataattccttctgccactgcaagaataatatgctttctgccatttttaagcttatcttttatatattggcttattttctcaatattatatggaatttcgggtattaagattacatctgcctttcctgctattcctgaatataacgtaagccagcctgccttatttcccataatttcagcaatcataattcttccgtgtgactttgccgttgtatgcaactcatcaagagttcttgttgcaatatcaatggctgactgaaatccgaaagtcatatccgttccattaatgtcattatctatagtttttggaagagttacaatgtttaagcccttctctgacaaaagatttgctgttttgtgggaaccatttcctcctaaaaccacaagacaatcaagttccatctttttataattagaaatcattgcctctactttgtttctgcctttttcatcaggctcattaatcttcttaaatggttgtcttgaatttccaaggatggagcctcccaaatttaaaatattctcaaactcttccggcttcattttcttatagtcaccattaataagacctgtgtaaccgtccaaaatcccataaatttcaaccttatccttattggtttcggttaatcctttaaccaatccatacattgctccgtttaatccctgacaatctccaccacttgtaagtattccgactttaatcacaaccgcacctcctgattttttgttttattataataaaagaaaacccggcagaacattccaatcatatgtctcttcaatattactatatcaatgtaaatgttctgtccgggtttggttaaatccgcgttaaatattctattattttgtctctttgttatatgtttcatagtacacttttaaatgatattatacaatatctttttatgtgacatttttatttttcaatcacattgtacaaatcatagtatattccatgtttgtccattaattccttatgtgtaccctgttcttctattcccttgtctgttaaaactagaatcttttctgcatttcttatagtagacaatctatgggcaattaccattgttgttctgttctttgccagtttttccattgattcctgtactatcttttcactttcgttatcaagtgcagatgttgcttcatcaaaaatcaatattggaggattcttaaggaatactcttgctattgaaattcgctgtttctgtccgcctgacagcttaatacctctctgtcctatatctgtttcaaagccatttggaagtgacataatgaaattatacgcattagcttcttttgcagctgcaattacttcctcccttgtagcatcagggcgaccgtatctgatattgtcatatactgttccaacgaaaaggtaaacatcctgctgtactatacctatattatctcttaaatcttttaattttatgtctttaatgtcttttccatcaatagttatttttccacttgtggcttcataaaatcttggaataagattgcaaagtgtagtctttcctgctcctgatgaacctacaagtgccacataagagcctgccttaacttccagattaatatgtttcaaaactctatgagagctgtcattatacttaaatgaaacatcttcaagtttaatgtcacctttaacattacttattgaaactgcgttttcactatccttaatttcaggttcaattgaaagaatctgtagaaatctttcatatcctgaatatccattctgaaactgttccgtaaaatcaattaacgttttaataggatctgtaaaaatatttatatataataaaaatgtaacgaggtctgttacagatatcatgttcttagttatcattaatccccctgaaactataacaagaagattaatcattgttgtaaaagctgtaagtcctgagttgtatccacccatatacttatagttattcttctttgcttcaaggaaagcatcgtttcccactttaaattttttattttccaagtcttcattggcaaaagattttaccactcttattcctgaaagattgtcttctatttgtgcgtttatttccgctattttgattctgttaactctaaacgcctgtttcattttcttattaaagaaatatgcgtaaacaagcataaatggaactaataaaaatgctataagagcaagtcttacatttatgcttaaaagaattgccaaagctcctataatctttattactgatatggttacgttttccggaccatgatgtaataattcagtaatatcaaaaaggtccgatgttattcttgacattaactgtcctactttttcatcgtcataaaatgaaaaagataatttttgaaaatgtccaaatatttctgctctcatgtcatattcgatttttgcacccattacgtgaccataattggcaatgtaataattacaataacactggaacaaaatcaaaattcctacaacaatagctatgataatcattgtttttacaacctgttctgctggcatatatattacttttgccgtaacatatcttaccaccagcggtattagcaatgctataaatgatgccattattgcaaaaaacatatctgccataaaaactttcttataaggtttgtaatatgacacaagtttctttaaattctctaacattttctcttcctgccttaaatatattttgctcaatttcttttaaaataccaataatcttattgaatattttttatcataaagggaccgccaccacgacgatccctttgttactacctgcaatcattacaggcaaatacttttagtataaataatagcagttaactgcttttgatttataagttttcttgccttcttttctgtttgccactacataaacatagtatgttttcttcttattaagcttcttctttttgaattttttagctgtataagcacgcttctttgttgtagtaagtttcttgtaaccaccagtctttgatgtagacatgtaaactgtataattctttgctccactaactttcttccaagtaatctttaacttcttacctgacttcttaagtccaacctttggctgtaatgcaaaaactgtgtaatcagaccaggctccatagtagttcttattattaattgttacataagctcttactcttaacttgtagaactgattcttaatgttctttaaagtattatatgatatacttgacaaattgcctgaagatactttctttttcttgtatgtataaagttcatatacataaccgtcgtggtattcaggctgtgtaaatccaaaagtaacctcttttaaagaattataatagtttgtaattgctaatccctgaaccttttcaggaacaagattaatcttatatggactcaagtattccgtattatagaatcctgttgtctttgcagaaaatccattaactgttctaacaggtcttacaccaacgtaagtatcgttcttaagtttgttgttaaaaccgtctactgtatatgtagttgatgttgttgaacctactacatattcattattatttacaaatctgacaatctcataagatgtagcaccttcactagctgtccaactaattgttatgcttgatgttgtagctgttgtctgtcttaaatccttaacatcagcaggtactgatgctacctgaattgaatcagaaatagcataaactgtgttctcactagtagtacttacagcctttactcttacataaacaggctttaatgccttaacataaagtaaatctgatgctgaataacttgaatctgttcttttgaaagtctgattatcataagatgtttcaattatatatttcacattagttcctaaatagttatcccaagcaatacttacagtattagttgaagccttctcctgctttaatcctgtaacctttcctgttgcaccaaaagctgtcattgcaaataacaatgaaaacaatgctgccaatgtaattactgaaatcttcttactaattttcatatttccttctcccttcgtttttaacctcattaataataaaaaatatataataaaatattattacagtgtcaaaagttctttcccatctgtgcttgcacaatggtagaaaaataacctttggacacgttctaatatttattaccctacattaatccttctaatgtctttctaatagccataatgaactcttctgtatttaatttcttcttgttttcaagtgttgaaattaaatataaatctcctgtcatttcgccattttcaattgtgtcgatacatgccttttcaagcttgtctgcaaattccataagttcaggaagtttgtcaagttctccacgttttcttaaagctcctgaccatgcaaaaattgttgcgatagggttagttgatgtttcttcaccctttaagtacttgtaataatgtctctgtactgtaccgtgagctgcttcatattcgtagtaaccctgtggtgaagcaagtactgatgtcatcattgataatgaaccgaatgctgttgcaaccatatctgacattacatcaccgtcatagttcttacaagcccaaatatatccaccttctgatctcattacacgtgctactgcatcgtcaataagtgtgtagaaatattcaattcctgcttcatcaaatttttctttatattcaacttcaaaaatttcagcgaaaatatctttaaatgtgtggtcatatttctttgaaattgtatcttttgttgcaaaccaaagatcctgctttgtatctaatgcaaaattgaaacaacttcttgcaaaactttctatagattcatttaagttgtgcataccctggataattcctgcacccttaaaatcgtgaattaattctcttgtttcttctcctgcttcattagtgtaaacaagttctgtcttgcctgctgcaggaatcttcatttcaacacccttgtaaacatcaccatatgcgtgtcttgcaattgtaataggcttcttccagttctttacgtatggttcaataccttttacaatgataggtgctctaaatactgttccgtcaagaatagctctaatagtaccattaggactcttccacatttccttaagatggtattccggcattcttgctgcgttaggtgtgattgttgcacattttacagctacaccgtatttcttagttgcttctgcagaatcaaaagtaacttggtcattagtctcatttctatactcaagtcctaaatcataatattctgtctttaaatcaacaaaaggtaataacaattcttctttgatcattttccaaaggattcttgtcatttcatcgccatccatttctaccaatggagttgtcattttaatcttttccattatatttcctcctaaattaagctatcaaactactccactaaattataactaattacagtgctaaagtaaacaaattcccctgcttttttttatttcttacaaaaattaaccattttttcagggttgatttttccccagccctgcctgtttccttccatttttaaatcaattgccgtattccttatcaacttcttgcactgtatgttagacatttccttattaatgcctaaaatcatacaaatcacgcctgaaactataggtgttgccattgatgttccgctttttggtacatagctgtatcctgactttatgccattactgcaactgtatatgccattggccggagccaaaatatcaggtttttgaacgcactcttttgttggacctctacctgagtaattctttgtaatcctaccgtttactaccatcttaatattatcatctaatgccccaactgtaattatcttcttactgcttccaggaattgacacagttccatattccggtccattatttcctgctgcagctataataacatatcccatgtcccataaaagttccacagcctcaattaatttcttattatttccctctttattaaatgtgccaaaagatatgttaaccacttttatgttatatttctttccattatcaataatccaccaaattccacttattacgttatcttccttgccaatgcctcttttatcaagaaccttcagtgatactatgtccgacttaggcgcaattcctttaaaaaagccgttagacatttttccatctcctgccagtattcccgttacatgagttccgtgtccctcatcgtcataaatggctgtttttccgtttacaaaatccttatattttattattctttccccaaaatcaggatgattgtatattcccgtatcaaggactgcaactgtcacattttctcccattatattatttttgtgcaaactatctatgtttagaatttgtcttaccttcttcattatatttaccattattttatctgatatttctactataatatatggcttatttttgcttttgtccttgtagctttttaacattttttatttttttgtaaccggaacaggtcaggttacatatactttagtgtaaacaaaaattaggagattcaaaatgagtgatttagcagcaacaaactgtggatgtggttgcggagatggtggaaacaacaactgtttactccttatccttatacttttgtgttgtggaggttgtggcaacggttcaggctgtggttgtggcggtaacgactgctctaacattatctggattattttacttctcagctgctgtggtggttgtggttcattctttggtaacggaaacggctgtggttgcggctgctagttgatgcagacgacttttaccaatacgactttctatgtctgaccaaaaacgctcttttatacaataatatagaagacacaaacctgtttgttttacttacaagtattatgtgcgcatatttttaatttagtattttatttgtttttacagcataaacttaataaaacagacaacacaatattatccggggggattatggttatatggaaaacaaccgttttatgcaaacaaaattcgattccatggtaactaatcagactatgcagttagtaaaagccataatcccttatattgataataatcttgcaactgttctcggggtttatatcaagtttatagagctagaaaatacctttcgtgttaaccaaaatgtttccattgcagctatgaatgccaatcataaagggcttgaaagtatgcttgaagatattaaggaatttttaaatgacggggacaaggaaactcttgaaactttaatgactgttatggaaatgatgaatatggatgacggggcaaagcaggatattttaagcggatacatggatatgtttggtatgtgatttaaggaggttctatgattaataacaaatggatggaaaatcctgtactttcagatatttctactgaaaaaatggaagttctaactaaaatattaaatggtgcaggagatatggatgcgaagcaaatgcttacatattttattaaagaaacaaatcaggcatccaaaaatggcataaacttcaccgacaaagaaacagatgccatacttgaagttctaaaagctgatatgtcgcctgaggaaatcaaaagaattgataccataaaaagaatggtaagcatgcttgggaaacgaaagaaaatgaattgatgtgtgtcccaaagtcactcatcctcttttgtttcatcacaagtggatgaatgactttgtacactgtaatcatatttcttccatactgtctttcggcaaagaacggcttgctattaaaatttctataagcaccagcaattccttacagacacaaactcgcctttaagcagtctaaagaaaatatctaaaattctatattttttgtcctgtaattccataacctcttactccatattatattttctctcttcactataataccaacgctcacataattttgcctagccaatttgatatttaaattgccgcccccttagtgttatctttttcaagattttatcacacttggtatttcttgtctataaagataaaagctgccatcaggtcatcacaacctaacaacagcttttcaactaaatacttaattatttagcaactatatttataattcttcccggaacataaatttccttaacaatgtttcctgttaacttgtcgcctaatgcttctttaccctgagcaatagcgtcatcctttgagatgtcagcaggtacactgattacaacttttgtcttaccgttaatctgaacaggaacctggatttcatcatccttcataagttcttcgtcagcttcaggccacttgttgttttcaaatacgctacctgtatttccaagtctttcccataattcttcaccgatatgtggtgcaaatggagctaataatgtaacgaaagtctgaattgtttctttgtcaattccgccttctttcttagctaattcaataaacttgttattaaattccataaaacctgaaactactgtatttaaactaaagtcttcaagacgtcttgtgattgtatgaaccatctggtgacgaagttttatcatttccttagttggctcaacattagcttcaatgctatctactgctaacttccagaatcttgtgataaatctatatacaccatcaattcctctttcatcccattctgaatcaagttcaggtggtcctacaaacatttcataaagtcttaatgagtcacatccgtaatctcttaccaaatcatcaggtgaaacaacattaccttttgacttactcatcttaatgccattcttacctgtaatcataccctggttaaataatttcttaaatggttcgtcaaaatcaactactccgatatcatgtaagaatttagtatagaatcttgaataaagtaaatgaagaactgcatgttctacaccaccaatatacatatctacaggaagatacttgtcagctttttctcttgaaacaagttctttgtcattcttattatcaatatatcttaagaaataccatgatgatcctgcccactgtggcattgtatttgtttcacgctttgcaggttttccacagcaaggacaagttgtgttaacccattcatcaattgctgcaagtggcgattcacctgtacctgttggttcatatgattctacgtcaggtaataataatggcaactgatcttcaggaaccggaactgctccacagtcaggacaatgtacgattggaataggttcaccccaatatctctgtcttgagaatacccagtcacgtaatttatagttaactgtagctctaccaaatcctttttcttcaataatgtgaggagcttctttcttaagaacagaagattccataccattccactcacctgagttaatcatagtacctacagcttctgtgtaagcttctgtcatattttcgatttctttaccatcttttgcaataacctgaataattggaatgttaaacttagttgcaaaagcaaagtctctgtcatcatgtgcaggaacacacataattgcacctgtaccataatcagcaagtacataatctgaaagccagattggaacctttgcaccgtttaatgggttaattgcataacttcctgtaaatacacctgttttttcttttccctgaagtctgtctactgatgacttattagctgccatctgaatgtattcttcaacgtctgctcttgtttcatctgttgcaagggcctttgccatagcatgttcaggagcaagtaccataaatgttgcaccgtaaagtgtatcaggtcttgttgtatatactgtaatcttctcatctgagttttccaatttaaagtcaacttctgcaccatatgattttccaatccaatctgcctgcatttttttaactttttcaggccagtcaagcttgtctaaatctgcaagaagtctgtcagcataagctgtgatttttaacatccactgcttaaggttcttctttgtaacttctgctccacatctttcacaacatccgttaacaacttcttcattagcaagacctgtcttacatgatggacaccagttaattggcatttctttctcgtaagcaagtcctttcttaaacatctgaacaaaaatccactgagtccatttatagaacttaggatctgttgtgttaacttccatatcccagtcataaagagaagcaatttcattaatctgtctcttaatgtttgcaatattagctgctgttgaaatagctggatgtgtcttcatcttaatagcataattttctgccgggagaccaaaagcatcccatcccataggatgaataatatgataaccatgaagcatcttatatctgctccatacatcactaataacatatcctctccaatgtcctacatgaagtcctgatcctgatggataagggaacatatcaagacaataatattttggttttgtagtgtctttattaataggggttacatcccaattgtgacgccactttttttcaatttccttatgattataaggtgttgccataatttatttcctcctaaaaatatgtataaaaatttaatctttagctatagttgttgtgttctcattagaagacttagttgtttcggtctgcttaacattcttctttgtttcgcttaccttctttgttgttttttccttagtctgcttttcttttgtttttttctcagactctttaggttttgaagtttccttcggtaatttaagctttttcttttgagccttggacggttcaaatttcttattacccttagattcttttatttttatttcacacataacctgacaggagccaacgtttcctgccttgtcctgtgccttaattgaaaccgggaagttgccttcctttaattccaatggatcaactgttgttattgtgattgttacgtcactttcattacaggatacatactttctaaccatttctttaatagccttagcgttagattccttgttcatatccttttggtctttgctttttacttcataagtaaactgagtcttagaacatgtaaccttaggctttgttgtatcaactaccttgtatgataatgaagctgttatcttcttacctgatttaagcttgtaagtatatgtcactttagatgttcctgttttggaagaatcaatcttattatacttaagctttcctgtaatattctttcctgtttcatctaatgctaacaggttactaaaataatctatcttttcacctttttcaacattaacaggtgtgtatcctgttgatattgtaccattagctttcttcaagtatggattgcttttatcaggatctgtaggatcccatccacaatacttgtttgtttcagtcttttttccaacctgtagtggaagttggtctttctttgaacctttcactatttcaagaactgtcttgtacttacagttattgtaaacccaagctgcatctgatgcatacaaaataattgacttgtcaactttcttattcttacctactgaattataagacttcttaactaaagtatcaggatatctgtcgctatattctgctgactgaatccacgctgaataagtatataaagtattgtacctgtgccatccattgtttttaacccatgaatagctcttttcagttttgtatttgccctttttaacattctctcccaatgtgcatggaaaaatcttataggctgtcttgttcttcttatcagcatcatatctgtagactaccataacattctttgccatattaatctgcaaataaaattcatctgactgtttctgtactgtttcctcttcttcatctgtggcgatagtgtttccaacaccgctggtcttatctgcatctttgttaatcttgctttgcatatacattaacgctgcaaatattattcctgccacaacaagaatttctactattgttatcagtatatttttaaactttttactttttaataaatctttaatattcaacttagtacccctgaatctgtaggtattttgttattaaaagaaaaaggcttctaaaaaaatgcctacgcataccacaatattatacatcattgtgagcatttttcaagaaacctttttattttatattatttttgtaggatattattctccatcaactgcctgtgaatcagtgccatcgcttgatgaactgtcacctgaatctgatgaatcgctactacttccgttattagatgaatctgagccatctgaatctgagcttgaacttcctgaatcagaacttccactagaatcgctatctgacttttctgaacttccactggaactgtcatctgaacttcctgaatcacttccagttgaactatctgaaccattatcagaacctacatcatcgcttccgtttgaatctccactgtttgtatctgacttgctattcttatttacactttcagtctggctctcattattatttctattctgataataacgtttatatacaaacaaacctcccactgcaactgctgcagccatacaaataagaattaagaataataacaggttagtgaagaaatgatgttgctttctctgacgtctgcctcttcttcctcttctctccctgcgacctaagcttggagtgcttatgcctcctcttgactttttgcttctgcctctggtctttttagtcttagttttctttgtcttttttgttttgtttttattattgtcagactgcttcttagcattgtcttctgacttaggtttgttctgactttgctttttgacattgttgtctgtattaatctgctgtgtactttccaaatctttcttaggctgttcattaacaaatttttcaggatgaaccattttctcatatgtggtttttaatccctgccaatccggttcgctgtaaaatgcaggtggctggcatgaaacctttgcctgttcattcatcatacatacaacagttttgtcgtctgtaatttggtctaatgcccaaattggatagctatacttagccattccgtcgcacaatctttttgtaagattttcgtcaaaaaacttactatatccattcttcaagcaattagaaaaaacatttctgtccatatctccgtctaagaaactttcaagaatgttcttaggattgttaaatgacttattattcataacacagtcaggattcataagaaattctgctgctgaattgtaaactttcttctgacctgttgcttttgcaacactgtctgtggcatttaacaaaaatggtgaaataagttcattaagaataccatctgtaacaagcataactgaagcaatgttgttgtctaactttccaaagctccaactgccttctcctgctctcaacggcttaacatactgcttgttctcaccctgttgctgttcagttatgatatccatagttccgtcattcttttttacaactatgccaccatccccggcgtgtccataagcaatgctttgtccatcataaatcgctccgctaagagttgtatcgaaatcttcaatctgtgcattgttctctgttgcatactggttaatgctatttaatgcataagaaaaagaatcctttaatacctgcaattgttggtctaaattcataccggaattaatattttcactacaatattctcctgctttttctactgcaatctttgctcctatatcagaagattttgcacttcctacaccgtcagctactaaacctactgagcatccattattaagttgtattactttattagcgtcctgacaggccatatttctggtactgtgggactttccttttattgaaaatccataattaatcatacatttctccatttcccatttggcacagattatatatgattgttctttaagtcaaaataatctgtgctacttatttagcctttttaaatttactgactataatacatataataacagtaactgccatatcaggcaatgtatttccaacaattatatcaactgtcataagatatctgtatagaataaatccaataacccagattataatatttgtcacttcaacgtttttatcttcgctattgtttttgataatgaagaagtctgcaatttgaattgcaatcataggtgcaaatactgaacctattaaataaagaaaatcagtaatatcgtccattgggtaaataattgctgctattgtaccaacgattgttactgcaatcgccatatactttccgttaattttgctaaagattgtttcacttgaaacacctgctgaatatgcatccaaatatgttgttgtaactgttgaaaaaacaattataagaagtcctgctattccaagacctgcctttaacattatctggtcgattcctgcattctgtgcaaaaatagctgcacccattccaataatgtacatccaacagcttacgatgccgtaaacaattgcacttgctgctgttgccttaattggcttttctgcttctcttgtgtaatcactgattaatggaagccaggaaagtggcattgctactgcaagttctactgctgcaccaaatgttaatccatctgccggaacacttgttgccacaccattatcaaaaaataccaccttgcataaaataattgtaagaataaataaagctgtcattgcaacaacatttactttttcgatgttttttattccaataaaaatccaaataataataagtacaccgattacaatgcaccacacccagtttcctgtattaaaaattccgttagcagaaattgccccgtcataaatcataatggcggtccaacctgcaagctgaataacattcaatactgaaaagagaatacttcctttctgaccgaaacttatctttactgtttccattgcacttttctttgtctttgcaccgattactcctgcaaggaataaaagtgagcagccaattaagtgtccgataataatcgcaagaatgcctttttccattccaagtgaagcaagatatgtacctgttacaatttctgcaattgatacacctgctccaaaccaaattaaactattactaaatactgatgttccttttttatccattttatgtacctctttccttttttagtcgcacttaattgcaaatgcatgattcatcggtccgctgccttttcctaaatcaagcattgctgataatgctcctgaaatatattcttttgccttttccactgatgtatccaaatctctgccttttgcaagatttgaagctatggcactggaaagtgtacatcctgttccatgtgtattaggattgttaattctcttaccatagaaccacttgtattcaccgtttctgtaaagaagatcgttggcatcatttatgctgtgaccgcccttgcataatacggcgcagtcatatttttcgctaataactgctgctgcctttatcatttcctcttcgttatgtatttccatattggataatacttctgcctccggaatatttggtgttattactgttgccaaaggaattaagtattcctttaaagtgcttatggcatcatcgcttattaattttcctccgcttgttgcaaccataacgggatcaagaactatgttctttccattgtattcttttaggcttttagctattgttttgattaagtcacttgatgataccattcctatttttatggcatccggtgttatgtcttcaaatatagcttttagctgtgcctgtaaaaattcagggcttacttcatagatgtctgatacgccggttgtattttgagcagttaaggctgtaatagcactcatggcataaactccattagctgtcattgtctttatgtctgcttgtattccggcgcctccacaagaatcacttcctgcaattgttaatgctgtgttcattcttttctccttttccggcaaaactttactgatagttttcctcaccggcgaaagaaaattttgtcacaaacacgttgattttgttattttgctccgccgtctattgtaaagcgaaaacctaaactcgcctacggctcaaacagtaagtttctcgctttacactatgcttgcaaaattgccaaaatctgcctattgtttgttttcaaaattttcttccgccggtgataatagtactttcactatataatgttttgcctgtaagttttttagtttttgtggttcacaagttgtacttttttacttgtgttttgtatagcgatataaggtggtgcccccaatttatcgctttgtcagggtttattattttttgtttgaataataggaaaccctgttgtttgtttttggttaaatagtttttcctttttgttttttgtttaggttgtttctacttgttattttgtatttgcttaagtagggttttgtgttctgtccaattttttatgtagatgtttgttaggtttcttattttttcctggtctttttcgcttgcaggatcgtagattcctattgtttttatgcctagttgtttggctgtttctattgagtatgctccatcttcaaatagccatgtttgctttggtgttgtttccatttcttccattgcttttatgaagatgtccggtttgtcttttccatgtccaacctctgtcgtggtaaatatttttttgaaatatttatctatgtgcagtcttttgaaagctgcttctatcattggtctgtctgttgacgttgctattgtcattgggattttgttctcgtaggcttgttctataaagtctataacttttggttttggcattgcttctttttcgtagaatttgtatacacggttgtttattccggtgcatatttcttctgttgtaaggtttagattgtactttttttgtatgtattctgcaccttcattcattgtcatttcgaatagaatttctccaagatttggttccgcctttattcccatatcttttagatatagttctcctacgttcatccatattcccattgagtctagtattgttccatctacatcaaatataaatcctgttgacatttgttctcctactttacagcttttattgtgttgacttttagttcttttgttgcagtttctatgtctttgcttgcaaatatggcacttattactgcgattccgcaaataccgcttcctgcaagttcttttacgttgtcctttgttattccgccaattgcgattactggtatgcttaccgcttcacatatggcttttaatgtttcaaaaggtacatcttctgcatcatcttttgagcctgttggaaatactgctccaactcctaagtagtcagctccgtgtttttcagctaaaattgcctgttcaactgtctgggctgaaacgccaataattttgtcaggaccaagtttctttctaacgtctcctgcttccatgtcgctttgtccaacgtgtactccgtctgcatccatttttatggcaatgtctacattatcatttattacaaatggaacgttgtactttttgcataactcttttatttcaatggcttcctttaaaaaactttcttcatcaagttttttctctctaagttgtacaaaagttactccaccctttaatgatttttcaacctgttcataaagtgtttcgtttccaagccaggctctgtctgttactgcatatagtaataactcatctgttgtagtattacttgatttcatattttgctcctttttccaatgtgtctccatccatgttgtagatagcatcaataattctgtttctgtatgttgagttaccatcaccatcctgcattctgtcataagcaatctctcctgcaagtcccattaagcaaactgcagctgcggctgcttctaacttgttgtcagagttagctactaaatatgctgtcataagtcctgaaagctgacaacctgttcctgtaatggaactcatctgtggcttgccatttcttattacataacatttttcgctattacatactaagtcaattgcacctgttacggcaataatgcttcctgttgcttttgaaaaagcttttaatttagaaatagtttcttcaagattttcatctgtaactttatcggctacgtcagcgtcaacacctttagtacttccacttccaagcattaaagtcttaacttctgaaatatttcctctaacaacatcaaactttactttttccataagttcgttagctgtgttagttcttaaggcacttgctcctgctccaacagggtcaagtaaaacaacatgacctaattcgtttgctttctttcctgctgcaaacattgaaggtatagtattcttatttaatgttccaatattaatattaagaccgccacatatagatgtaatatccactacatcatcaatgtcatctgacataatagggcttcctccaccggcaagcaaaacatttgcaacatcatttactgttacataatttgtaatattgtgtactaatggcacattctttctaacattttctaaacattctttaaacatctttgtcctcctgaatttaatttttcacaaaagaaaaaggacaaacctatttggtctgtccgcaatgaatcttaaaattgatttcttcctacgttggcattatccaaatcaggttcatgggtcgaagttgattacttcctctcagcctgcccacaagctcccctgttataattattaaattttcctttttctctgtgtccataagcactttacagagtatattttacaacctattagctaataattcaacaaattatttcattttatttataaactattttaaaagcaaaaacataacaactttattacataacttcaaacttttctctgaaatattctataaattcctttgcttcattattgggattcgccaatattgttgcctcctcactgtaccaagaatattccaagtcatgaattataatgggtattttaccaaattttttatttacaattccatgaagttgcaaatctcttgcaacctcagaaatcatatttaatacttcataataaccatttggtccttttcctatgtagttcatattttcatcatatgatttttcaaaatcttctgaaccaatattttttacaccattggatacaagaaattctaaaataatttccgctgtttcatcatcttcctccgcgtttaaaattacttttaatcctttaacgtcatcactgtcatatttatcatctttctgaatatatccaattgatatttcaaagaaatttttaattcccttatatacataggtttcatttgaataaactaatattgatattgcagctatttcatcttctttccattgattaataatttcaataaatttatcataaaaatactttttgcaacacataattaaatctcctccacttatttttcaaacatacttttaaggcgtcttcgagcttgctgccaacaataaagcttttataaaagtctaactttttggggtcacatcagatgtcatacttctttccggtctttttgtatgtaacagtttcccttatgagttttgtctcatatttttacgttattacttaaaacttattgtcaattaagcaacataactatattctcttttataaatagtatataaataatcactgctaaaagataaactgttctctttataattacatttctaaatttaaaattaatgtgttcactataatccataaataatataaaagacacaataatagctaatacatcagttggttttattggaaacagccaaaaatcataacatatctcatatattcctaatattatacatgcactattaacaattataattattatgttatttgtaatatttataaaatctgcatctattgctattgttattgcaaataaaattacaaatatcacaaacataataaattcaaacattctaacttaaccctttctttatatataatacgcccctaggcaaattaacaaataactttttaaattgccatgcaactcctatcaaagtacccgctgtaataataaccatccaccattgttgcaatgtactgcacgatattattgcatatgataaacgtactattgttttagctacaaacgatgtagctcctgccgccattaacccatatcttccatggtcataagaatatgtcttcgtgcctatcttgttgcataattaagatacatctaccctttatttactatcatatcacaatgtgtgttatgtaatctattcaaaaacaaaaattgttcaattcctatttttcaaacataaaagcgaggatgaaaatcatcctcgcttttataatatcattattatacttgtaagccaccaggtgctattcaaactcggcttgtaccgagcttggcttaaacatattggtttaggttttgtgtgtttttatctgttgatttacctatattatattatttgtattatccttctgatttcgtgttgccatagtgttgccacgaagatattataacataagttagctttttagtcattattttcattatacttatgagaataagcactaaaacaatattactactattataaccaatatgatattaccgcctattttttctaaattactcaataacaaaaatatcttctaactattattgcgtggaaaaaaaatataattatatcgatttataaacaataaattctcttttttctccatctgaatttcaaaaatatcattatcgtaagtaattctaactttcccagtctcttggtcataatatgcattgtaatgattgctccttagctctttaattacttctgtttctgacttgaaactactaaacctatagaatttatgtccataatattctttatgatttttcagttttattgatacttccttattattttcattaatttttatatattcttcattatttgaaaactttataaaaataacactcataaaacctataagtataattactattgttgaaattaatactattctttttttattttttatgccttttgcaactataagataaatcaatgataacaatataataataactagacacacatatatatacataatgttataacctccattctactttttgttaaaagtcttattttttcataatagttgtgttaaatgaacctaattgacttcttgcaaatgcattataatctatatagtgccttgtcgatgaccaaccatcgtaaacttctatcattcaataattttcattgaaaatttattaaataaccagttagttttattgagtatcatgtctccaactcataatctcatcctgtgtaaaaggtgaatcagggttttcactatatctagaaattacccattctttcatttttaaatcctttggatttgaattcaaatattgtcgaataaaaaaaccaattactgaatatatatcaaagaaaaaggtatcagtatactctaaaaaatcgcatattaagattacatttcgaaaagtattttcatttgatatcaaatatatcaaataaataaacttatttaaacttgaaatcatagcaaaatctttttcgaaattatcaatcttatactcatatttattcattgctagatactcataaacatatttataattttttttcttaaactgttttaaaatttttttcaaaatttatcaccttttatgaagtgatttttataaaatgtgaactgcaaaaatcaccacaaactttcctttcataaaatattaacacttatacaaagataattcgttttattttatccattaactatttatttgctacataatattcctatataaattatactattcattgataaccacctattgtatgtaatagtccttattactttctaaaaataatattcaattgtaaaagttaaagatttgtatcgctttcagtatctgtgcagcttccgtcatagtagtatcctctgtacaatacatgatttaactcaaagggaacctcatatccttcataacagaaactctttccatcatttgtgatgacatttccccatacatcatatgtatatgaagtgatttttgctcctctggcatcaagcagacctgtcacatctccctgcaggttcttttcataatagattcttgtggtttttaatgtttcgtctatctcacttaactgaattttatcctgaaaaaaatctacgtgcatatcccggaactgttcgtggaactgaagagtggaataaaacctataaattaataatattttctatcatccattcttgcttaattggatttctaggaaaaacatattgagtaccattaatatattgaccatgcaaatttaaaatgtttcccccaagagcatcaaaaaaaaaatttttataatcaaaataactattctaacagaatattaccctcttacaacatctttcatttcttttacatactgtgaaacatattgtacactgtcttttccgtgttctgccacaattcttacaatagcactaccaacaattgctccgtcggcatatttgcatacatcttctgcctgctttggtgtggaaattccaaaacctactgcacaaggtacatctgaaacttccttaacaagttcaatcattccgttaatgtctgtttttatttcttttctaacacctgtaactccaagtgaagatacgcagtaaagaaatccctgagcttcctttgcaatcatttttattctgtcgtgagatgttggagctatcatagaaatcaattcaattcctgcctctgtacattcaggcaaaagttcatttttttcttcataaggacaatcaggtacaattattccactaattccacactgattgcatctatccataaatttcttttttccatatttgtaaataacatttatgtatgtcataaaaactaatggaatatgaatccggtcttttatttcaattaaagcatccattagcttatctgttgtacagcctgcttccaatgatcttaaatctgccttctgaataacctgtccttctgcgattgggtctgaaaaaggtattcccacttcaattatatctgcccctgcattctgcatttcaataataagtttctttgttgtttcaaggtcaggatctcctcctgttataaaaggtataaatgcttttccattcttaaatgcttcttttattttactcataaatctgtactcctctatatcttgctattgctgctacgtccttgtcaccacggcctgacacgttaactactacgattttatctttgtccaaagttggcacatacttcattgcatatgcaattgcgtgagaactttcaattgcaggaataattccttctgtttttgacaaatattcaaaagcattaactgcttcttcatctgtaattgccacatattctgctcttttttctgcctgaagcattgcatgttcaggtccgattcccggataatcaagtcctgctgaaattgaataaacaggggcaatctgaccatattcattctggcagaataaagacttcattccgtggaaaatagcttctgaaccgttagccattgttgctgcgttctttggattatcaactccaagtcctgctgcctcacaaccgattaatttaacgtctttatcttcaatgaaattgtagaaagcaccgattgcgtttgaaccgccacctacacaggcaattactgcatcaggtaatttgccttctttttccattaactgttcttttatttccttgctgattattgcctgaaaatcacgtacaatagttgggaaaggatgtggtcccattactgaacctaaaacataatgtgtatcatctattctgttagtccattccttcattgtctcatttactgcatcttttaatgtcattgttccacttgttacaggatgaacttttgctcctaaaagttccattctaaatacgttaagtgcctgtctttggcagtcttcttttcccatgaagacttcacattccattcccattaaagctgctgccgttgctgttgccacaccatgctgtcctgcacctgtttcagctataactcttgtttttcccattttctttgcaagtaaaacctgacccatggcattgttaagtttgtgagaacctgtatggtttaaatcttctctctttaaataaatttttgcgccacctaaatcctttgtcattttttctgcataataaagcaaagatggtctgcctacatagttatttaaaaggtctgttaattccttattaaattcaggatcgtccttgtaatgattatatgcttcttccaattcatttactgcgttcattaatgtttccggaacatactgtccgccatatcttccaaatcgtccttttgagtttgtattatttgtatcgctcattttatctcctatctgcaattattgccttacaatttctataacttttttaattttttctctgtctttaaatccgtcagtttcaactccgctgcttaaatctactgcatatggattagtatctttaattatctccttaagattttctgcgtttaaacctcctgcaagaaaataatttccaatattttttggaatatattctctattaaaagtcttacctgttccgccgtattctccactgtctgaaaaagtatccagcaataaataatctgcctttattttttttgtttctataactgactgagaatttttcacccttacagcttttataatttgcttattcgtaatctttcttaaattttctatatactctttgtcttcgtcaccgtgtagctgaataatatcaattatgttattgtttgctaaggaactaatatgctctaatgtgtcatttacaaaaacaccaactgctttaattcttggattcaatacagttttaagctcttttgctttttcatcagttattttacgcttagtccctgcaaagacaaaacctataaaatccggcaaaaactcatttacatattcaatatcctgtaatctcttcaagccacatattttaatctttgtcataaaactctccaataccttgtaaccaattcctacattgctgcaagctccttaagcatttctttcttgttttctgacttcataaaagtttctccaataagaaccgcatcaacttttgcttctctaagtctctttatgtctccattattctttattccgctttctgccacaaaaagaatgttttcaggtactaacttccgtaaacgttcgctatttgatatatcaactgtaaatgttttcaaatctctattgtttacaccgataattcttgctcctgcccttattgccttgtttatttccatttcatcgtgagcctcaactaatgctgaaattccaagagtgtcacatattcctatataatttcttattgtactttcactaaggagagaacaaataagtaatacacaggatgcaccatgaagctttccatcatatatcatatattcgtctattacgaaatcttttcttattaacggcaaagacacattttcacttatttcctttaaatattttttatcgcccttaaaatattccggctctgtcaaaacagatatgcatcctgcccctgcctgttcatattcctttgcaatctgaacatatgggaaattctctgcaataattcccttagatggtgaagcttttttcacctcacatataaaggttatgtcgttgcttcttaatgcattttcaaactcaaaatttccttttttcattgacagtgctttagcttttacctcttcaggggaaatctgatttttttcttcttctactcttttgtatgtggattgtgctaatttatcaagaatcattcttgtctcctttcaggcttatttaaatgaattagacatttcaataaattgttcaagcttttcctttgcttttccactttcaattgtttgtcttgcaatgttaattgcttctttgtatgtaacatcatctcttgtcatataaatgcaggcacctgcatttaataatactgcatctgtctttggtcctttcttaccatttaaaatctctcttgtaatttctgcattcttgactgcatctccacctaccaaatcatccttgctacaaatcttaaatccataatcttcaggattaatttcgtatttatttgtttttccatatctgatttcacatactgttgtttttgcactaagtgtaatttcgtccataacatcttgtccgaaaacaaccattcctttctttactccaagctttataagtacttctgctaaaggttcaactaatgcttcatcataaacaccaagaatttccatatttgctcctgcagggttagttaatggcccaagaatattaaagattgttcttatcccaagttgttttcttacagggcctacaaatctcattgatgagtgatatttctgggcaaacaagaagcaaattcctattttttccagtaattctttgctttgttccggttcaattgttatatttactcctaatgcttcaagtacatctgctgcacctgacttacttgaaacacttctgtttccatgctttgctactttgcaacctgcagcagctgcaacaattgccgatgttgttgaaatgttaaaagtaaacgcttcatctccgcctgtaccaactatttcaagtacatccatattatgttcaagctttattccgttatttctcattcccatagccgagcctgatatttcgtcaattgtttcacccttcattctaagtgcaacaagatatgaactaattaattcatttggtgtttccccactcattatttcattcattactttttcaaccgtctcatatgataaatcttctccgtttactaatttatttattgcctctttaatcattttaatcctcccattcttattgtttttcatcttacttaaaatgtatcttcttttatattaattcaataattttgtattttaagattttcgtattagttatttagtttcaaaaaattatttaccagtttctttccttccggtgttaaaactgattccggatgaaactgtaatccatatataggatattctttgtgctttacagccattacttctccgtctttcccgtcaatggctattacttctaactcatcaggtattgtatttctatctgctgaaagagaatgataccttgctcccttaaaactttcacctaacccttcaaaaataggatcttcttttaaaattgtcatttcactttgtttaccatgcattaactgttttgcatatgtaacctttgctccaaaaacttcacatatactttgatgtcccaaacatacaccaagaattggatattcgtctttaagctgtcttacaacgtcctcgcatatacctgcatcttccggttttcccggtcccggtgataaaataatgctttccggattcatttttcttatttcatctattgttatttcatcatttcttactaccttaatatttccatctgttaattctccgattagctgaacaaggttataagaaaaactatcataattatctattaaaagaaccattagccgtttacctcacttcctcgttttatagcatctataactgctcctgccttatgagcacattccatatattcgctttcaggaatactatcagctacaattcccgcacctgcctgaacatataccttgttctccttctttactgcagttctaattgctatacatacatcaagatttcccgacaaatcaatgtaaccaattgctcctccatacacacccctaggttctttttcaagttcatcaattatctgacatgccctaaacttaggcgcccctgataatgttcctgccggaagaagtgcagccaccgtatcgcatccatctttgtcttctctaatctgtccacaaactgttgaagcaatgtgcataacctttgaaaatctatgtattttcatataatcttctaaataaacactaccatattttgcaattcttcccatatcatttcttgcaaggtccactaacatgttatgctctgctaattccttttcgtctgctaataattctttttctaatgtcttatcctgctcatcattaacacctcttggtcttgttcctgcaacaggaaatgttgtaagctttccatctacaagttttaccattgtttccggtgaagcacctgctatctgcaaatcatctgactgaataaaatacatataaggtgaaggatttgttgttcttaaaactctgtatgcattaataagactactcttataatccgccacaaatcttcttgaaattactccctggaaaatgtctccttcttttatgtaatgttttgttctttcaatcatccggcaatattcttcttttgtaacattacatttaaacttaacatctttatctgcctctaaaaccggaagttttctctggtcgtttattaaagctatcatcttttcgatttctaataatgctgtgttatatccctgaattccatcttttgacttcatattagctataaccattattttctgctttaagtgatcataaactataaccttatcaaaaagcattaagttatagtcatcaaattcactatctttaatatttaactttagttccgcatatcctatcatctcgtaaccgaaatatccaacaaagccacctgtaaatgtaggcattccctcaattttgggagatttgtatttgtgtaacaactgtcttaatgcatccattggatccactgtaactgtatgttcaatttcgccgcttttctgagtaacctttccattcttgcatgttatatgaagaaccggctcgtatcctaaaaaagaatatctcgcccacttttctccaccttccacactttcaagaaggaagaaattcttatcgaaagcttccatctttctaagcaactgaattggtgtaattacgtctgcataaatctccttgcatattggaatcatactgtactctttagtcaaattttcgatttcgttaaacgattgtgttttcatgttgtcctccttatttttattttgggacaaaagaaaaagcttttgtccctctacttctcgtaaagggacaaaagctataataaacttctgcggtgccacccaaattaatgtataacacattcactcattgcataccatcatatgctaccttctataacggtaaggatccgtcagcgtctacttcctatgattatcatattggtttcaagctgccctctcaggtccattcattactgatagtttattgtctcacaccaaccgacaactctctgaaaaacatctcttgtaactacttactcccgatcaacggtttaatcattgttggaacaattctatattgtttttttctaaaaatcaatgactatttttatctaatcaattgattatttttattatttcactatttttactttattttgatttcattgtattacttaattagacatcgtagtcatttgttttttaagtttgattatttctgctcttcaatcactctgttttgaacatctgccggtgtctgctcgtattttgatactacatattcaaaatctccacttcctccggtaattgaacgtagtgaagttgaataacccgacaattctaacattgggacttcagcctctataatctgctttcctgtatctgttggaatcatgttagttattcttcctcttctcttatttaaatcgcccattatgtctcctgaatatttatcaggtgctgtaacgcttaaaagtgcaataggctcaagcaataccgggttagcttccataaaacctttcttaaatgctaatactgtagccatcttaaatgccatttcagatgaatcaacagggtgatatgagccatcaattaaagtagccttaattccaactacaggataccccgcaagtggacctgctttaacacattcctgaatacctttttctacagcagggaaataatttcttggaactgctccaccaaaaatcttctcctcaaactcataaggtttcgacaaatctcctgacggctcaaattccattacaacatctccatactgaccatgaccacctgactgtttcttgtgtttgccctgaacctgaactttcttctttattgtttctctaaaagcaattctaggtttctctaatgtaatcttaaccttatatctttcttcaagcttggatgctgcaacttctaactgctgttcacctattccataaagtaatgtctgcttattttcatcatctacaaccaccttcaatgttaaatcttcaattgtaagcttgtttaaagcctgggctattttttcttcttcacccttgttaactgctttatatcttacatatgtataaggctttgacattgttgttggatgatattctataggccattccttagttgataaggtatctcctgttcttgtgctggcaagcttgccaattgctccaatatctcctgcgtatagtttttgaacctctattacattcttgccacgcattacgtaaagcttacttagtttttcttctacatcttttgtggcgttgtaaactgtatcccctgcacacaacactccggttctaacttttacaagagaatacttaccaacaaaaggatccattatagttttaaatacatatgctgaaacaggtttgttccaatcaaaatcacctataactgcttctcctgtttctaagtttgtggcaatcttcattacttcagctttatctgctgatggaaaatatttctcacaagtctgaagaaagctgttaacgccctgacaatttactcctgaaccaatctgtaccggaacaatgtcacacttaataacacttcttctaagagccattgaaatctcctcgtatgtaaattcttcccctgaaaaatatttatccataagaacttcgtctgattctgccactgcttccattaactgttccctacaaggttcaagttctggtgttaaatcctcaggaatatctctttccgtatagcttccaaggtcgtcggtaaactttctacctcccatttttaccacgttaacatatcctgttaactttccatcttcaataataggcaaatggaatggagccactttctttccaaatctttctttcaactgctccacgatttccatatatttagcattaggatcatccatgttggtaataaaaaatattcttggaatctgtcttctctcacaaatctcccaagccttaattgttccaacttcgattcccgccttgccatttacaacaataactgctgcatcagcaacactcattgcatcttccatctgacccacaaaatcaaaatatcccggtgcgtcaagaatgttaatcttcaaaccattccactctaccggtataactgaagcatttatggaaaactttcgtttaatctcctccttatcataatcactgatagtattaccgtcctgcacccgtcccattctggtaattactcctgtagaataagaaatagcttctgccaaagtagtctttcctgatcctccgtgaccaagaaaaacaacatttctaatactggatgtttcatatacgttcataactccggcctccttatttaatttttaaaatccgttacaattctatgtaatatattttactctatatgccggttctttacaacaaagttaaatctttaacaatcagtataagcaaatttttggggttctctacttttttaatttgtatatactgtttttgttatatatttataactttgttttttaatttttatattttagaatatattttttttaataattttagataattttaaatttgtgcttgcagttttaactttaaagtgttaaactttaaagcgttaaagttaaaagaggaggaaatctaatttatcagagtttaatagagttatgagagaacatattacttttggatttgtaggaattggtttaatagggggttcagttgctaaggcacttagacgtgtttacccaagttgtaagattattgtatacaatcgaagcgctgagcctagagttatggctatcaatgacggaactgccaatgttgctgttccacaagttgatgaaacttttaatgagtgtgattatatttttctttgcactcctgttgaaaaaaatgttgaatatttaaagattcttaaagatattataaaagatgattgcattatcactgacgtgggaagtgttaaaggcaatatccataaggctgttaaagaacttgggttggagaaaaattttattggtggacatccaatggccggttctgaaaaaacaagctacacttatgctaacgaccgtctggttgaaaatgcatactatgccattactcctactgacgctgttagtaaagagcgtgttgaagagtttactgaaatcgttcagggcattggggctattccaattaatatatcatatgaagaacatgataaggtagttgctacaatcagtcacctgccacatcttattgctgccagccttgtcaatctggttaagcataatgattcaaaaaaagaatatatgaaaactatggcagccggtggttttaaggatattacaagaattgcttcttcttcacctgaaatgtgggaacagatttgtatgacaaacaatactaatattagtgacatgttacagaaatatgttgacagccttcttgaaattaaagaagaccttgatcagcataagggacagggcatttttgatttaatttcagaaagccgtgactaccgcgacagcattgaagaccgtaacaacagtcttatttcaagaagctacaatgtttactgcaacattatagatgaatccggtgcaatagctacaattgccacaatacttgcaacaaacggagtcagcatcaaaaacatcggcattatacataatagagaatttgaagatggcgtattaaagatttcattctatgatgaaacatcagccgacaaagctgtggaacaacttgaacgccatagatataatgtaataaaaagaaaatagagttataattttgccccctcgtttagagggggcatttgcttcctttctattccacattctttagtgcctgttccattggtattttcttgattttcttcatctgaattatatgaaccacaaaataacatacaacgcctattaataccatacccggatatatccatggtgcaatatagtaatcaagccatccattaaaatctttcatcattacataatatatatatttaattatatatgctgagattggcacgcatataatcattgatgcaataactattattgctgtggcaatgttgtaaagtgagcttacttctttgtctgtgtatccaagaatttttatcattgaaattgactgtttgttcttttctataatcatctttgcaaggatgtagattactatgatatagattaatgtggcaaatccccagaacaaataaaatgcctgccccattgagtcttctaactggtctgacataactgttaagtctttttcagtaataattgatgccacatgcatatcatctatatccagcttcttatttgaaaaatatccacagaaataatctttatccttatcgaatactttgttaaagttctctcttgtcataaagatacataatgatgccggataaacgtaagttccttttattgtaaatttgtattttttactgccaaatttttctttaagctctattgtctggttttcttttaaaccatacttctccatatatccttttgatacaagtacctgattccttgtgtcaggaatattcttagtgttaatatatttagaatcttcgttaacaccatatattgttatttcttcttcgctatctgttgtattaagtgctgatactgcatacttttcagtatctttgtcatctacttcaattggtgctttcaaaatatattggtagtttgcaatttttgaatccaatactctatccttaaagtttgtaagtaaaggtgacatcatcataccaaacataagaaggacgctggcaaacaatattcctaagaataatgttatatacgttgatgtattttgaaaaattattcttaatctaaatcttgttttgaacttaaagtttggaagttttactactttgctcttcttgtttttctttaagtcgtgacgtaaaaactgtaacggtgaaattctaagtgaaacattaagtacaattaatgttacaacaaatacaattatgcaaggtattacagttgtaagaatgaaagcgtctgcgttccattttgttacataagttggaagtgaataacttccgtaatacattgaagcaacataaaatttcattactgtatagccaaggatgttaccgattactgccgcaataaaagtaataagtgccggcaatacgaagtaatgtcttaccatttcctgttttgtgtaacctgaagctctaagtgttccgattgctcctgcttcctgttcaattgtatttcttgttgttataccaaatacaaaagctataattgccataacgatataaagtaataccataaccattaccatatcgccacccatatcttcacctgtaaatttaattgcctgattatctctttgtaaaacataatctgtcaaaagacctgattctgtaagaatatcctgaatcttttcagacttttttgtaagttgcctgtctgacatattcttttctgaatcattagtataattccatgtataacaatacttcgcctctgtttctacatcatcaaaagccttgtctgttacaatagcaactgagaacttatttgcatcaaacatcatatcagtattgtttttaaataatgcactgtaatctgataatgcaatatagccagtaactttgtagtctttattacctatatcgattttagcgccaattgcaatattattattttctccataaagtctgtcaattgcaatttcatcatctgcttttggcatattgccatccattaaacatgctttattaaccttagtacgattcttgtataatctgattgtgtgattattctttctgtccacatccttatagaacaactggcctattgaaagattttctttttcaagcttatctataaggctactgtctgcttcttttgcaagaataaaatgaccgtcttctatattgtacttctcgaagctttcatcatatgcaccctttgtacttccatcggcaactaaaaatcctgaacaaaatccaatggtaactataagaaagagacacaatgctatatacttgccaaaatcattttttaattctctgaaatatcttttattaagaggatttttcatgtctgcctccttaccattctaattccattgcaggtattttattttcattaatgtctgtctttctaatctgaccgtcttttaacttaattacatagtcagccatgttctttatggcatcattatgggtaacaagaattacagtgtttccatatttcttatttacatcttcaattaactttaatatctcttttgaagtgttgtaatcaagggctcctgttggttcatcacagagaagaatgcccggattctttataatcgcacgaccaatggcagttctctgctgctgtccacctgataactgatttggagtcttattctggtgttcccataaacctaaagttttaatcatatcatcaataggtaatggattactgcttaaataagctccaacttcaatattttccctaactgtaagatttggaatcaagttgtaagactgaaatacatatcccaaatgctttcttctataaagagaaagtttcttttcattcattgactccattaactcgccatcaattgaaatacttcccccgtctgccttttcaattccacctatgatattaagaagtgttgatttacctgaacctgatggtccaagtaacacacatatcttccctttttctataccacaactaatcccctttaaaacctgggttctattctcccctgttccaaatgactttttaatatccttaagttccagatacatattcttctcccttcaaattaaatatgttttttagatatatctttggcaaattagattgacctttttaagattgcatatatcttacttatgttagcatatcctaactatataaaatatagcaccgttattattttttgtcaaaaaaatatcccacaattctttgtgctatttacacttagaattgtgggatattcaagattttttattttcctattacaatggcgtatgccggcgtcttattactgttaagttttgtatttgaatatattgatttaatcttgtaataatactttttattcttcttgacctttgtgtctatgtacttaggtttagtagttgttgcaattcttgtatatgagcgcttagttgaaagtcttctatatacataatacttaacagcatttgtatttttagtccatttaactgtaactctataggattttttcttctttgtaatcttcttagatttctttgtaagcttaacacctgtaggtgtttttaattttacacgaacataatgaacaactttaatgccactggttgttgttgctgtgatttttgcaattcctactttttttgcggtaatgtacccattgctgtttacgcttacaacgcttggcaagtcactttcccatgttatcttatctgttgtatcactaggtcccatttctgtagtatactgaccactataaccttttactactttaaggattttgtcttctttaatagttaaagatgtagcaggctgctttacatcaattgttgaataacagataagaccactatctgtagttgccataacctgatattttcctgttttaagagctgtaaattcacctgtcagcttattaatggatacgcctgctaaattagtgctatcccatataatgttattcttataatctgtcaatgtttcattcttagcattagctgtaaatgttgctgtaagctttgaactttgacctttattaatggttgtataatgagtgttaattaataatctgccatcagcaatctgctgtaaaattaaagcatcatccattgccaactttgatattaacttgtcagtgtcatattcgcttcccggcaaaaacttatttccataaggactcttgttaaacattctatagtaaattgtgcaggccgccaaataacttcctgcaactgtaggatgaagattatctgtacgatacaaagttatgtcaggataatcagccattactctcataaagtttgttcctgatgcagcaacaagaccttcatagtcattagctattttaaagttatttcttgtaagaatctgttcaatctgcaaatcagttaaataaaaagatgttgaattaacactaaaagtactgccgatattgttaggctgtgtagcataaataatcatctttgcacctgcttttttaattaaagaatgaagagtatttactgctgactctgctttatactctttttcaactaaaacagcacggttctcctgtacaacaacataatcccatgtattctttgtaagagcttcgtataccagtgatccatatgtgtctgttgtgtctgcaaactgactaagtttgtatcctgcagaagtaattgatgacacctcacaatcaatgccatctgccttggctattcccttaaaaatatttggcatatcattataatatgtatgactgtttccaataaatagtatcttgtatgtctttgctgtctgtgcatatgcattgtcttttattgttaaagcacataacatcaaaagtactaaagctgccaatcctttacaaaatccatacttattcttcatctttccataactcctctcaactgttttttatcctcttagtttcactttttttaaactgtactaaatgcaggccagaatttaagtaataatgtacatacgattgtcatggatataataataaatactgtcatcttccaaccttccttaagcatatacttaggctgtaatccgtatccaacaggaattgctctaatagatgttggaagcatatatgataagtttacaccaactgatgcaacatatacatatggaataggattcagtcccataccttttacaattgagattacaataggaattgcaactgccgctgttgcagtattagatgttacgtctgacattaataatgtaactgtaacaataacaaatactgttgtaagaccacctgtaagtcccatgcctgatactaattcaccaattctttctgctgcccctgattcattaattaatgtaccaaccgcaagaccccctgcgaagatataaatcatttcccaaataatttttgtctgaactgacttccaaagcataagcctttctccatcagaacgtgttattaaaaatgataaaattgcacatataataaatacatatgccggcttaagtcccggcaataaattctgatagaactgtcttgtaaatgccaatactgtagcaattacaaataaagccaaagagattttttcctctatagttgttggtggaaacttcttgtactctttcttaaaatactctcttgaaccaccaaggctttctccttttttaacatctcttatcataaatataatatttattaataaaaggacaatcataataggaaggaatcttacaacccatgatgcatacatatattccttacctgttaactgttgtaaataatcaactgtcacaagattcattgcaccgccaagtggtgatgtaagtcctccaagacctgcaccatatgcaatatataacaataactttgaacctatacggctatttgcaatatctccttcaccaatatattttaacattgacactgcaataggtgtaattgttgcacatacaactgcgttaggcaaaattgccgacaataaagttgaaagcataaaccaaaatattaactgaattcttaaattatcaccaattaatcccagtaaagatgctgcaattctcttatcaagtcctgtttcttcccatgaaacagtaagaattgatgctcctaataataacaagatagtttctgaagcataatttgatattactgcagacatgtcacacattgtcactaaagcattaatcgctattggaagaaatgctgtcactgcataatctataggtgctgttacccaccaaaatgccatccatgcaacagtacctattgccgctctttccgctaacgccggaaaagcacttttaggtattgcaagacaacataatacaaataggactggtcctatcattaaataaattcgctgttttgtttttgacatatttttctcctttgtttaactgataactctaatttatattagattttttcatatatattaatatttataagttgctttatgcacaagcttaaggtgtctacatttccttaagcttacgcttaattacttttccgttaaatgttcttggtaatgcatcaataacctgcactaccttcggaactctaatagcctcaagtttttcaagcataaatctatgtaatgccttctcatcatactcaaatccttcattaattacaataaagagcttaggtgcttcccctgttatttcatcgggaatcggaatacatgcacattccttaatcatctcattctgtgccactacttcctctatttcagatggtgctattttaataccccccatattaattacatcgccttttcttccaagcaaataaacaaatccgtcttcacccatataacctaaatcgttagtgtaaagagttccttcatcatccattacttcttttgtaatctcaggctctttcaaatatcccggcatattcattgctcccttaaaagcaagattgcccggattctgtgctgaagccttaacaatatttctattatcgtcaacgaaaataatttcagcattaacattaggcttaccaatactgcccttcttatctccatacttactaaactcaagacttactgtacatcctgattctgttgcgccatagatattaaataacttagtattagggaacatctcttttaaagtttccttagctttttcacttaacggtgctgaacctaactgaatatatctaagtctgtcactatatgttccaaatctgtcctttgcaaacttaagtaactgttcaagtatagcaggtgcaaatgtaagacctgtaacattatacatatcaagaagtttaaagaaatcttcaataaacttaactccgtctgttaaaactacagttccacctttgtagaaaactgtataagttcttctaagtgccatagaatgattcattggtgctgtaaccatttccacatcagcatttgttatgccaattgcttcgctaacattctgtgctatggcaacattatttctataaacaatcttaattccctttgacttacctgttgttcctgttgtaaaaagaatctctgacaaatcatcttccttaggcaaatcaaacttatattcaacctcatagctatcaaaatcaattgcttcattaaacatatcttttaagctaattgatttcttgttttcattctttaatttcttcttatcaaggaaataatctgtttcaacaaaatccataatttcaagaatcctgtcttccttaactgctttttcaagtgggcacgcaactgcacctaaaagctgtattgaaaacattgcaaaaagatactcaaccttctgagctccctttaaaacaacaacatctcccttttttactccattttcttccaaaaatgaagctcctttgttaatcattttccaaaactgtttatatgtaactttattttttttgtctcctaagcatattttgtcaggagttacttctgaagcactctttatggcttccaaaattgaactgtaactcattacaacctcctaaaaccatgtatttcaaagttctatatcaaaaaactattcattacaacaattgtatttcaaaactctacataccttagaacttaccatagaaaaatgcacctgcattatatcctgaaccgtacattccaaatacaagaatacctgcaataagagctaagtacaataaccatctgaataaaatattctgttttgcaataacatctcttattgtcattccgtccttgttaaatttttcctgcaacatacttacacaccaaactaatgcaactaaaagcattgccaatgtgaaattatgctggtcaagtccataagaatacaaactttcatcccaaagagtatgaagtccaaactgtctgaaattaaacattctctttaaaaattcaaagaatgttgtaaatcctgcagaaactgcaaagaatatacgtccaatagttgataacataaatgttcttgccattctgaaaagattaaagctgaaacattctgtatccatatgcaagaacttgcataatttttgaattggaatttcaaacaatccacttgatacgattaaaataccgtggtaaatgccccaaagtacaaaacaacttgccgctccgtgccaaacacctgtaacaatccatacacatgatgcagggattacaactgaaagtgaacgtgaaacctgattgccccatttctttcttgtgaatttattaatcttcttacacaatgctgacattgatacaggatataataaataatccttaaaccatgcaccaagtgaaatatgccatcttctccagaattccggcatattctttgagaagaacggatgccaaaagttcttatctaaattaataccaaatatttctgacacaccatgggcaatatccatacatcccatccaatccaaatacatctgaattgagaacaatgatattgcaagaataagtgggaaacctgtaatctggtcccattttgcaagagcaccattagtaaaagtctgcaatctgtcagaaataaccattttttcaaagtaaccccagagaattaactggaatcccttagttaccctgtcataatcaaaaggatggtctttaaaaaactgtggtgataatttattgtatcttccaataggtccctgaactatatgtggaaaatacattgtaaacaatgctaatttaaaataattagtctctgctctatatcttttccaataaatatcaagaatatatccaacaaccataaatgtatagaatgatattcctaatggtaatacaaaattaaattccttactccaatcaagtccgaatcttccaagaactgaagaaactcctgacaaaataaaatcagtatatttaattacacataaaattccaagatttattgcaaagtcaagaagtaaaattctttttcttctcttagtaaatcttttcttaaaagccttcttagcttcctttgaataaaactctcttgtctttgtaattctgctttcatcgtcgtgtaacttctgaatctttcttgccaatgtatatgtactaagtgacgagataaaaataaatattatatattttggtccggcaaataaataaaatgctatacttgccaaaagtaaaaatacccactgacattttctaaatattgtaaaatataatagtataacaattaatagaaaagggataaatgataatgtgttaaaacccatcttactactctcctctgtgcattacagttgcattgttttcaaaatgaagaaatgctgtatctgcaacctcttttagtttcttgtcataaacaataatgttcattccccatgaaattaatcctgtgtatttactattgtttaatctcattgttccacctttggaattagctgttatatcataatcagtaccacaactaagtgttcctccaagggttgtaacttttgagttatcttcaagctgtttctttactttattcttagagttatctccatcaagaacacaaataacattatttccataagtactgtctgtaaataacgcttcatcagctcccatactaatcaaagtcttcttctgactgtcagtaaatgtgatattcctaacatttgaaccagaagtaataattactgaatattcatcagtattaatagccttaaggtattcatcaaagttagttataagatttaactttccttcatttaaagcggcctgatagtttgatttctgtgactcaaaatccttctttatactattatctgtttttctataatctgtaagtttgtaattatcagcaatatactgacctacgaacttggtaatcttctttgcccctaaaatatttacgtgaaccgtatctgccgcatcctctgaataatcaaactgcatcttatccatatttgatttcaaattcaaatcaagaaatttaatattattcttgtcggcaagttcctgtatataattgtgctggtcttcatgccatgttgtgtcaggtgttcttacaaataataattccacaccctgttgttttgcttccttaataagcttaagagcatattcttcattaataggatttggtgtttccttatcattggacttaacttcaaatccatcatactttccttttgcttctttttcagcgtcaaaacttgttgaatttttaaactgtgttgaaagtactgaaaatcccttagtattactattgttttttcctaagaagaaatcatagtcatcataagacagttcagaccatcttgtgtgatacaaagataatgggaaaagatatgaccacaaatcaacttcttcgtctgtgccatcagcttccttatggaagtccttgtaatccaaggcatattgaatcttgttcttaccccatttcatataatcataagactttcttgccttttcttctgctttttcagaagaacgtccggcagacttaatctctattactgctaatttcatattctgagtttttagtgcttccttaaaccaataataagttccaatcattggctgagacataacacctagattatatgaagaaattccctgctcctcatatagctggaacggatccattgctgctgaaataatacttgctccaaaaaagacaacctctgcgctgttatcctgcaattcataaaaacttttgtttgttttcgccgatacccacctgttttctaaccacttaggctttaaaaggtctgttaaccctccaaccattaaaactgccaccatgcaaaaacatatgatttttgtaatacgaactaattttaatttcataataaactccactgcttaatcttttattgttttttcacacacactagtcccctttacactcaaaaacaaaaatataatatataataatttttatataattgtgataaccaaaaagttttacaaagattttatgatttttacaaaatgaaacttttgtttctctttttctactttctttggcaaaaaattaggcccctaagttaacttaagagccctacaatcatatttgtcatattattgctgaagtctttcaatcatttctgctaatgcatcaatgctgctaaagttctcttcattcttttcttccattgtaatttcaatatcaaaagcgtcctctaattcttccattaatgcaagaatatccattgagtccatatcttctgcaatgttaaaatcctcatcttcaacatccatgccgggatttacacttaaaataatttctttaatcttatctttcatttgtaattctcctttttcgtttgttacacgttctttaattttataatttaactcattatgaattacttactactcataacttttttcattctattataaaaatagcaaatatgcaacaaatattttttttatattacaatccatgtgactaaaatctattcgtcttccttttcaattgtttccagaacatcaaagtagttttcaaaagtctttctgcagcacattggattctttattacaattccatcaactgcaagacctgccactgcaaaactcattgccacacggtggtcgtcataattttcaatttctgctccgtgaagtttgcccggcgttataattacatctgtactaccgccttcttccacaatcttagcatcacatcccattctgttaagttcgttaacaataacctgaacacggtctgattcctgacctcttatatgaccaatatttcttattcttgtctcagtctttccaaaagctgccacaacagccattgtaagcgcctggtctgaaaaatcagacatatctatatcaatgccttcatatcctacagcacttgttccatccacttcaagaccttccggcttatctgttattacacaaccgattctttcaagagcataaataaacttaatatccccctgcattgaatctttatgtattcccttaacaatagatttaacaccaagaatagctgccatagcataaaaataacatgcagcagacatatccggttcaacattatatacattacaaatatagctttgcttctttattatatatgtattgccttctctatcaaaatcaatgtcaaactgcttaagcatatttgttgtaatcttaatataggcaccgtccactcttgaacccgtaagttccacattcataccattcattacagatgccataagcaatgcgctggcatactgactgctggtagtcgtgtcgattttaatattacctgacttaattcccttagaatgaatttcaaaaggaaaatgtccttcttcttctaaacacttaatctctacacccttagctgtcaggctgcctagaagctcactcattggacgcttcttcatctgttctgaagattgaagagtatagtcaccacctgccacagcaagaaaaacagtcatgaatcttgctgctgttcctgcactttgaacattaattgtagccttcctgttagggattcttccattttcacccttaatcactaccttagcactttcttcatctatctgaacactaaaacctaatgaaataaggcagtcaagaaaagctcttgaatcactgctaaacaatacaccgttaagtgtgcatatgccatctgacatagccgccagcattaaagctctgttagtgatacttttagagcccggcactgacgcatttatattattttttttgtttaatttctttactgcatatttttccataggatgctattcctttataaacattgcatcgccaaagctaaaaaatctgtatttttcttctacagccttattgtatgcgttaagaatgttctctcttccggccaacgctgaaacaagcattaataatgttgattcaggcaaatggaaattagtaataaggcaatcaatagccttaaactgatatcccggataaataaatatctgtgtccatccacttccaggatgtacaataccattttcgtctgttacagtttccaatgttcttgtgcttgtagttccaacagcaataactctgccgccattagccctgcactcattaatcatatttgcatcttcctcgtcaaccatataaaattcagaatgcatatggtgttcaagaatattttcaaccttaaccggtctgaaagttccaagaccaacatgtaatgtaacgtgagctattttaatacctttttctttaatcttttctaataactcttttgtaaaatgaagacctgctgttggtgcagccgctgaaccttcgtattttgcataaactgtctgatatctgtttttgtcttcaagtttatgtgttatatatggtggaagtggcatttctccaagcttatccaacacttcttcaaaaataccttcataagtaaacttaattaatctgttgccttcttcaacaacatcaataacctcgcccgttaaaattccgtcaccaaaacttataacagtacccggcttgcatttctttcccggcttaactaatgtttcccaaacatcgttttcctttctctttagaagcaacacttcaatctttgcatcagtgccaaccttgcttccatataatcttgcaggaataacctttgtatcattaattaccaaacaatcatttggattcaaataatctataatatccttaaatatatgatgttctatttcgcctgtgttcttatcaagaaccattaatcttgaactgcttctgtcctctaaaggatcctgtgctattaattcttcaggcaaatcataataataatcatgtaaactcatttctttttttaacataacttttatctcttttctgtataatactttttttacactgtaatctatattatttgcatatttcagaactgtcaagaacaatagtgaaaggtccgtcatttaaaagacttactttcatgtctgctccaaactcaccctgctcaacaacctctatttcttccttgcactttgaaataatgtattcatacatttcatttgccatatcaggttttccggcattaataaatgatggcctgttaccctttttgcaatcagcataaagagtaaactgggataccaataacaactctccgttaacatccttaagtgcaagattagtttttccatcagcatcatcaaatattctaagattaatcattttcttaatcatcttgtcggcaatctctttagtgtcttcattagacacaccaattaaaacaagaaatcccttgttaattgaacctatctctttattatcaacctttacggaagcttcatttactctctgtattacaaaacgcataactttcctctcttttcatcaaaacaccacccgccttgaaacatagatttattccaaagcgggtggtttaatgtttttatgctcttaattcaatacccattgattcaagttctttcaaaatcttattcatagctgactgaatatcactatcttccaatgttctgtccttagctctaaatacaattgaatatgctactgacttaaagccgtcttcaatctgatcaccttcatagatgtcaaataagctgtagctttcaaggttctttcctgccttgctttcaatagcttcttcaatcttaccaacaggaatatccttaggtacaaccatcgaaatatctcttgatacagcagggaacttagcaattccttcgtacttcttatcaaatgaagacatttcgtatacatatggcatatcaattactgcaatgtatgctctagtcttcatattgtagttttcgcaaactgttggatgaacttcacctaaataaccgataactgttccatcataaacgatgttagcctgacgtcccggatgaaggaaagtctttcccgccttagcatcataataaactctcttcttcattccaacctgttccaataattcttctacaacacccttcattgtaaagaaatcaccttcgccatagaaacctaatataagctgcattctttcatcaggaagttccttaagtggtaattcctttggaagataaacattacccatttcaaaaagtcttacatctttgtttcttctattatagttagtagcaagtgatgtaagcattccacctaaaggtgtagttctcataacactaaagtcttctcctaaaggatttgaaataacaattgactgtctgtattttgaatcttttggaagtaataacttatcataaacctttggactttcaaatgaatatgacattccctgtgaaaatccgctgtataaagctacccttcttgcgatttcatcaattcttaatttgtatgataattttcctgatgtagcttctccacttggaagagttgtaggaatgttatcatatccatagaatcttgcaacttcttcagcaatatcacacataccaactaaatcctgtctaaatgttgggattgtaataagttttgtttcaggatcatattttaactctaaagcagggaagtaacttaccatctgctcttctgtcaaattaaatccgattaatttatttacatagtcaggatcaaacttaattgttgtttctgtcttcttttcaggataaacatcaaccatacctgcaacaacttcacctgctcctaattcttcgattaactgacatgctctgttaatagctgattctgcattgttaggatcaagtcctttttcaaacttacctgaagcgtctgttctaagaccaactctcttagatgaaagacggatgttagttccgtcaaaacaagctgcttcaaaaagcatatccttaacatcatcagtaatcattgagttttcgccacccataattccggcaagacctacaggcttttcaccatcgcaaatcataagcattccactgtctaattctctttcctgtccgtcaagagtaacgaagttctcaccgtcttctgctcttcttactacaatcttatggtctgcaatagtatcaagatcataagcatgcattggctgaccaaattcttccataacatagtttgtaatatctactaagttattgataggtctgataccacaggctgaaagtcttctctgcatccattcaggtgatggtgcaatcttaacattcttaacaacctttgcacaataacgcttacataagtcgttatcctttacttcaactgaaatgtaatcattaacatctccgtctgttccaaccggtcctgtaacaggtgccttaaatggcttcttaaatgttgcagctgcttctcttgcaataccgataacactgtaacagtctactctgttagatgtaatttcatattcaaaaactgaatcgtgaagtcctaaaacttcaattgcatctgctcctacctgaacgctgtcatcgaaaatataaattccgtattcaggtgcttcaggataaaattctcttgttgagccaagttcttcaatagaacacatcattccatctgaaggaactcctctaagttttccttttttaatcttaattccgccttcagtctttgaaccgtcatgacctccggcaacacgaccaccgtcaagtactacaggtactttctgtccttccttaacattaggtgctcctgtaacaatctgaattgtttctgttccaatattaacctgacaaataacaagcttatctgcgtcagggtgtttttctattttttcaatctgtccaacaacgattttgtcaaggtctgcatcaagtctttcaaagccttcacattttgtacctgacaatgtcattgcatccatgtattcctgatcagtacattcaagttcaggaacatatgctttaatccaagataatggtgtattcatttttatttctccttcctgctaactagaactggttcaggaaacgatcatcgttttcgtataacagtctcatatcatctatttcatattttaataatgcaattctttcaagacctacaccgaatgcaaatccctgatattccttaggatcaataccgcacatttcaagtacgtgtggatgaaccataccacaaccaagaatttcaatccagccttcacccttacagaatctacatccttttccaccacacttaaagcatgaaacgtccatttctgcacttggctcagtaaatgggaaatgatgaggtctgaatttagtctttgtttcaggtccaaaaagttccttggcaaattctgccaatgttccctttaagtctgagaaattaatgttcttgtcaattgcaagaccttcaacctgatggaatgaaggtgaatgtgttgcatctacctggtctgaacggaaaactctacccggagaaataattctgataggtggctgagttttttccattactcttgcctgtactgaagaagtctgtgttctaagtacaatgttcttatttatatagaaagtatcctgttcatcttttgcaggatgattgtcaggaatatttaaagcttcaaagttataatggtcatattctacttcaggaccttctacaacttcgtatcccatacctgtaaaaattctctctaattcttcaagagctaatgtattaggatgcttatgtccgattttattcttcttagccggaagagtaacgtcaataacttctgctttcaacttagcttctctagccttagcctgaagttctgccttaacttcttccattttttcttcaataatctttcttgtgtcattaactaactgaccaactttaggtctatcttcaggagcaacatctttcatgcccttaagaacttctgttaactgaccttttttgcccaaaacttcaactctaatctggttaagtttgtccaaattgtctgaggctgtaattttggaaatggcatcttccctaattgcctgtaacttttctttcatgataaattcctctctttatagattttaaaataacaggtttgtgagtcaattttttgttttcccaacggattgctacgcactgcgtgctctcgcaatccgttaacttcaattcgcatatcacaaagctttcgctttgtttttatgctcattgaagtacgcaaaaacaactctcacactttttcatattttattttttggattgctacgtgcttcgcactctcgcaatccttttcccatcattcgcatatcgtgaagctttcgcttcacttttatgctcattatgggagcgtgtagaaaggtcttaaatccacatttatgcaagcatatgtggattaagacttttctacactaaaaataaaaaaaagcacctgttccatagggacggattgctccgcggtaccaccctagtttccgtaatcattatcacgaacactctatctgcttaacgcgctacacacgtcattcattacttagattagtttccttctttagtattattcatacgtataatctgttggtgaatgcagctcctgtgggaatttcaatatatatctgaacctgaaagaccttccagcctgtgagtctttctctctgacggaaaatatatatctacttacacactcatcgccttttacaatacgacaattctaacacacaaaaaaaacagtgtcaaacaataatgcacagattagcattttttctgcttttctgtgcatttgcaagttcattatatgtcaattattcctgttcttcttcaaagtatccctttgaaaattctccatactgataataccagttaggtgctatttctattctttcatatcctgtatcaacattttccatgccttggaatacgtaagctattgagttgattattccagtgtcgtaaactgtaaagtctattctgttgaatgccacatatcccttatgcacttctacagttataggcatgcttgaaataagattaaatattgttttttccatttcgctgcttatggaaatctttttgctcattgaaagatttcccttgtcgtcaatgtcaaatgttgtttcattatttttattttcaaattcaaaataggaaactatttttgtcatttcagccatatgctctgttacaagtggtttaatatcatcgcttaacatgtacatttttttaatctttgacggatatgcatagttttcaatattaattttaactttctttgttaaaccattgtgagcctttgcgtatattattacagtaccggtcttcatattgttgttagctttaacaacgcctcttgcatttaccgttgcaaggcttgtgtctgaagaactccatgtaagttttctgctaagtacttttttcttttttaatttcttagacggatatgcttcgccctgtagtttaacttttccgttaagacttattgtgtactgattctttatgtatttaaatcttcctgcgtttaccttttttgattttttatcagttacaattattgaaactgtctgacctgaattgctaaaaactttcttaccattagcaatagtataagcctttattttgtagctatacactttattcttctttacctttttgtcagtaagtttgtttttctttaatgttttaaacttctttccgttcttatatataatgtagcctttcacattcttagacttgttccactttaaaacaaccttttttcctttttgttttgcaatgaattttatcggttcattaaccgtgttggtctgagatgttgtgtctgcaaaaacttcaactgcaccaatgcccacaaaaacactcattgcaaatataaaaattgctataatcttacttgcttttttcataatccttcgctccctattttaccttaattgtaattccattgctgtatggagaatattctctcttgccgtcttcattaacatagaacattctcactttgtaagaatattttttctttttcttaatactcttatcagtatatgaattttttgttacttcctttaatttcttatattttttgtcattgttaacttttctataaattacgtaaccctgcttctttgtatcttctctcttaagtttgttccatgacagggtattgcttttcttgtttttctgttttcctgaaagtgttagtgtaccattagtaactttgactatgttactaacttttttgtctaaaatcgggaaatcaaatgaatcccttacatattctttcttcacaacaactttataataataggttgagcccagttctacatcatcatcaatccagcctcctccacagagttgtccactttgacttttataaaagctccacttaaatgtaccatccggtcttttaactcctctgaatactttacactcagtagctcccttgcaacgtgtatattttaaaacattgcgacctgcagttttctctaccaacttcaatttaaaatcaccaagttttgccgtattactgcctttcagcactgtaatcttgcatgctgttgatggtccttccggagactttgcaataacagtagtattacctgtgccaactaccttaatctttccattttgatctacttcaactactcccttcttagtcacagaccaagcgattgtctgatttgtagcctgtgctggaaaaacttgagctttcaactgacttccctcattttctttcagccttaactccgatttatcaattttgattgaagtaacaggtacgttgccctcgtctgttgcatatacattactatgtattccacagccaatacatatgcttaataaaatgcctaataaactcgctgtaatctttttcattacacccctcctaaatatttttgtaattactttacccattatagtaaataatttgacatttttctattctttttctatacttttattgaagtggaggattgaaaatgaaaaaaatattaaacttaactattctttttataactatgttatctttaacttttattcctgtagattcagttaatgctgcaaaaaaagttaatcttacttatcacgttggtaatggctatttcaaagcaaagctcaatcgtagtaagcaaaaaatcacaataaaaaacaaagtgaataaaaaacgtggatatgctcctgccatcagacgtgaaggatatgcttttaatggttggtatactaagaaaaaagggggtaaaagatatttaccttcaaccatagttacaaaaaagcaaaaactctatgctcattggttaaaaaaatataaaattaatactaaatattttactcctatgggattaacttattttaaattgaccgattttgaaccctactggggcaaatttaaagtcataaaaaagaaaaaatggtcttccggttacgactataccctaaaaaattccaaaggtgatttatttaccgtatattcagatgataacagttcaaataataaccattctactgaatatggatattcaagtacggattgcaaattaaagaacattataaacattaaaaaacctattaattaccaaaaatttcttaaaaagttaggagtaactgcctacaactatgatcctgataacaactactttgagttcgtttgtggtaaaacactcattgaagatgaatatagctacgatgatgaggatgaagatgatgaggataataatggttatgaagatattgatatagtttggatgatgtctcttaataacaaagagcaggttacaccaaacacttctgtttcctttgaattaaatgatgattgggaaatgtggtaatattttcccttacttatttcaggtctgccactttcatggcagacctgttttttatattttgtcatctacttcttcatcttcgctgttgcatgtatttaatatttcttttaaacactggtttatttcgttattgtcttttatttctcttttagtttctccctcacacattggtggttccagttccagtggttttacatcgtttaataacaagtctccctctacgaatttaaggcaaggattgctttctgcttcgtgggtgttcattttcggtggcattgtttttcctaatgagttgaatttgtatgcctgataataaactgttctaaggtataatgttattccggcagacattgttcccgttgttggattaaattccataactttcgcaactgcattcatatttaaaccattttctaccatattgtcatacatattaaagcctacgtagttgatatagtattcttcatatgaattgtaaactgttgatgctccataaggtgcatacatgtcaacggttacacttcttggatttgtgtccggattgtagtttgttgttccaactgccggcaaatatactgcttctaatgaaactgttgtaatgtatttcttacaattatcgtatagtctgattttaaatactactcttaggtttgtaagttttacacgcaggcagtttgctcttcccggtatggttgatactgttgaaaaagtaggtggatttcccatttctgccaattcctcttcagtatattcaactgtttcttcttcacctgtaaaatagccttttcctgaatatatttttatatccgccaccaaaagctgaacgtaagttgttgttggataaagtgttaaaacattctcaggtatggttattgttctacacagatttattcctacctcatcatatattataggggaatatatagacaagttttcaggttcaccacatccggggcttacacatacatcacaatcttttccggtatggcaacactgattgcacgacatcattttataatctgacatttttatctcctctttttgtttattatattttatgccgtattactcataatgttgcttacacttttatatttttatttattgttgataataataaaaaatgctatactaactcatatgattaagtaaaggattttattatgaaacataaattatttaattttataaaaaaagcatatgactttattgacactattgggcaggacaaagtaggtatctatacagctcaggcttctttctttattattttgtccatttttccatttatacttttgttttttaatttaataggtcatgcttcaattaatcagaatactattatttatttgattcattcatatgcacctgattctcttaagcctttatttgttcaggctgttagtgaaatatatgaacatgtatcaagtgctgctgtgtccattacagccattgctgcaatatggtcagcatctaaaggcgtgttgtctgtaatgtttggcttgtacgaaatagcaaaaattcaccagaaacgtaattatttcatatcaagatttgtatcaatgctttatacaataatatttactgttgcattggcttctacaatggtactacttgtttttggtaataagctctttaaccttgccatgtcactggctccatggttaagacagatatctattgttacattaatgcttagatatcttttggtattcttacttctggtacttttcttctcattaatatacagacttgccaattttaagcttgctacttttggaaaagtatttccgggtgcttttttctcagcacttggctgggttgttttttcctatatcttttctatttatgtagacagcttttcaggaatgtcttatatgtatggaagttttaccgctgtaatcgtatttatgttatggatttattttttgatttatataatgtttattggtgcggaaatcaataagcttctcttccctgaaactgaagctacagttactgtaaagatgtaatttcaacgtcattataaaaggttgcaagtatttccttgtaaccttttcctttttttgccatttggcaggcagcactttggctcattccacttccgtgtccaaatccacctccgtatatttttattccatccaatttgttgtttttgtacacactttttattgaaataaacgcacttggaagcatgcttaattttgttctcttggttttatcgcttagttttattgttgagtaatatgagcttagtatttttctaatctgattttgatttacaatggatatttgtctcttatctccataaatagtcatttgggcaactattccccctgcccctcttttgtttatttccattcggttaattgtacctacgtttactgccatatttttgtatatggaattttctatctgcttagttgtcagatatgttgtccatctgtaaaaaggcaattttttctccactgatttaggtttttcttttatatatttatcaaagattttttcatctgatatgttttccgtgattgttgtaagattggtttcctttaaatatttctgtttcttttttccccatattctatagtctgttgtatatccccatgacgtagaaaaataatatgcatttattaattttcctttatacttcattaccgtgccttttgtttcatttgctgcttttatgctgttttctccgggaacgtttttgttgtacacctgataacttacgctatcgtctcccttggcattgtattttttatattttttgccctgacttttcataatatatgttctggcacaaactgcctgtgccttaagggcttcttttggcgattcttcccctatttcgctggaaattaccgctgcaacataatcttccatgccaacctgattaactaacacaagaccactgctttctttatatatgtagaaaatccccttataactttgcatattcttttcatctttcagtattgacatttcacctttaggctccacttttataacattgctttgtttaaaatatttactgcctgttccaatatcaatctgcttctttatgctctttttattcttaaaattctctccaaaatatatgtttaatactgatgccttggctacaaattttgaatagtgcattgtgatataattattatttagaataacaattctaactgtgttgtcttttttgctttcttcatttgttgtggtctctgcttctgtttttatttcagtaatattttcgctattgaccgcctgcagggactttcctcctgaatcatattcaggaatatactctacctgattaactttaaaaataaccgctgacaaaaacactgccacaaaaatacatactgctagttttaatttcatacttcccccattatttcttctgataagatttctcagaaaaaaaacgtagtataaaaaaatatactacgtttctcatctgttataatcgtttctcgcacattcaagtcatgcttcgcataaggtgctcgaaatcataatcaatcacttcgtgattggttataaaatatgtacctgaaatgccggcctgcgttttgagtcctagcaaacgccaggtgggcaaccgcatctaaagttctgccttccacctgataatgaggcttgacatccctttagagattaggaatccctttattcaaactgtaggttcaaaataggcaggattcacgaacatttcaggtcaaaataattaataaatattaattattttgataatgtaattatagtttatcattgcaatttttgcaatcacttttcgtttacattttatgattattttttctttatgatgttgtttttgtctttaaaaatatgtccttcaggaataactccacgaacacttgataatggataaacattacagtgtcttccgattactgttcccggatttaatactgaattacaaccaacttctacatagtctccaagcattgcaccgaactttttaagtcctgtttcaatctgctcatcgccgttctttactactactaatgttttgtctgattttacattagatgtaattgaacctgctcccatatgagaatgtgttccaagtatactgtcaccaacatagttgtaatgtggaacctgtactgtattaaataaaacaacgttctttaattctgtagaatttccaactacacagttcttcccaacaattgccttttctctaacgaaagctgatggtcttatttctgtgtcagcgtcaacaatcaaaggacccgttaagcttgctgttggagcaatcttaactgttttgtgaacccagatgttatcttcaatctgattaaattcattctttggaagtgttggtccaagtttcataataaagtctccaatatcagctaaaacttcccatgggtatgtttttccttcaaataattttgcagctattgtttcatttaaatcatataaatcctttattgtatacatttggttttctcctttattctactgttacggattttgcaaggtttctaggcttatctacgtttaatcccttaagtactgttgtgtagtatgcaattaactgtaaaggaattactgttaacataggcattaaaacatcttccattgcaggtacttcgatagcttcatcgattacgccctcactaaattctgttccttccttacatacggcaattgtaaatgctcctcttgacttaacttcaacaatgttgcttactgtcttttctaataattctgtttgagtagctacgccgattactggcattccatcttctactaatgatattgttccatgctttaattcacctgctgcatatgattctgaatgaatgtatgaaatctcttttaacttaagtgaaccttccatacttaatgcatagtctaaacctctaccaatgtataataagctctgtgctgtaattaacttacttgaaacatatttacatttcttttcacattccattgtcttttcaataatgtcagggatttcagcaagcttagctgttaatctcttacattcattttcatcaatgtgtccttttgcatatgccatttcaaatgcaagaaggtacattactgacatctgtactgaaaatgccttagttgaagcaaccgaaatttcaggacctgcatgtgtgtaaagaaccatatctgattctcttgcaatcgatgagcccttaacgttaacaactgataaaaccttggcacctttatcgtgtgcaagatgaagtgctgccttagtatctgctgtttcacctgactgtgaaactacaataactaaatcttcaggtgttataattggatctctgtatctaaattcagatgcaatatctactgttacttctgttcttgcaagcttttcgattacgtattttccaaccataccggcatgcattgctgtaccacaggctacaataaataactttctgtaattctttaaagcttctaatgttaaaccacattctgaaaggtctggcattccatttacaattcttggtgtgattgttgtctttactgcattaggctgttcatgaatctcttttaacataaaatgttcatatccgcctttttctgcagcatccatatcaaggttagaaacctgaacttctttcttgataggtaatttatgcatatcacagaactcaactctgtctgacttaattgttgcaatttcgttttcttctaaaagatagtaatttcttgtatatttcaaaattgcaggtacgtctgatgcaataaagttctcttcgtcaccggcaccgattataagtgggctatcttttcttactgcaaaaattctgtcaggaaaatctttaaatacaataccaagtgcatatgctcctcttacatctttaagagtcttgataattgcatctacaggatcaccttcgtaataataatctaataatttagctactgtttctgtatctgtttcactaataaatgtgtatcccttttcaataaggaaattcttaatatctttgtagttttcaataataccattgtgtacaattgatactctcttatttccatgaggatgtgagttaatatctgatggttcaccatgagttgcccatcttgtatgaccgataccacaatgtcccattggcttgtgttcagctactttctctcttaagttctttaactcgcctttagccttttctactgttatttctccattttcaaatacggcaatacctgctgagtcatatcctctatactctaacttagataatgaatctaataaaacgtctgtacagtctctttcacctacataacctactattccacacattacttattgttcctcctataaaattgcgacacataattataataattagtcatctgacctgcattatttaaattaataacgttattaaatctgcccctgataaaatcatccagctttttcatatattcctctgatgttatttttccttccgctacctgggtaagccccagttcccaactggctgtcaattcaggattaagcaatgatttaattgagccgtgaactactccaaaaatcatttctcccaactgagtcggagtaattacctgtgtcttcttatttaatgatatgtacttaatgttcaccagtttctttattatttctgctcttgttgcactggttccgattcccgagcctttaatctgtgctctcaaatcttcatcttcaataagctgacctgcattctccatggcaagaataatcgaacctgatgtgtaccttttaggtggtgttgtctcaccttcttttatactcatctcattaacggtaattttaccacctttgggcatattatacaacaatttaaaaaattcttcatctaattctgcctcttcgttgataatattttcattttcaagctcttctttagatttttcttcattagtttttttgtctgatttattgtctgtcttattgtcggtagctttctttttgctaggaactcctgctatttcaagataacctttttgagccaaaatcttaaagttagatgagaagtgttctgtagttgttgttccatcactaaatgttgccggcataactcctaccaaagtagcttttttgtatattgccggtggatagaatatgcttaagaaacgtctcactataagcatatacactttctgattaattggtttctgcttagccaaaccgtttaatccctgacctgtcggtattatggcataatgatctgttatctttttgtcatctacatatttagtctttgcaaggttcttgtaagactgttgctttaaaatattctgtgcaaaaacgctgcatggctgataatattgcaagcccgaaatattcttgcttatctcctttgcaactgccgttgaaagaactctggcatctgttcttgggtaagttacaagcttgctttcgtacaactgctgcactacatttaatgtttcatcaggactaatcttaaacatctttgaacagtcattttgaagttccgctaagttgtataacaacggtgcctgttttttttcatccttcatagtgatggacttaatagtcatttctaatggatatttttcaatattcatatcaccagtattttccgatttttttcctactgcactgtttgttacattattgtttgtatcgtctgatgcaatatttgtggaattgttgtttgttgctatttcgtcattgctattggctggtccattttcctctaaggctcttatcagtgcctgggctgttgttttttctttaaatccgttttctttatacaaaagtggagattcaaagaattttgatgttttctgtgatttccattctgtatctatttttcgtccgtgtatatcagtctttgccataactctatagaaaggtgttttttcgaaacctcttatttcacgctctctattgcataccattccaagaacgcaggtcattactctaccaacattaattgacttccactccccctttaaataattggttatggaatttccatattttaaggttaagagtcttgaaaaattaattcccatcaaataatcttcttttgctctaagatatgctgcgtcagaaagattgtcatattcctttaggtcttttgcctcttttattccacgaagaatttcttcctcagtctgggaatcaatccatactcgcttctcttttttgcctttaactcccgcttcctgggcaactaatctatatatgtattctccctctcgtcccgagtcggtacaaacatatattgtgtccacgtcatcacggttcaaaatctcttttactatattaaattgtttttttaccccgggaatcacctcatacttccattgtccctgaggtataaatggtaaatctctaagattccattttttgtatttttcatcataacattccggataactcattgttacaagatgaccaacacaccatgtaactatggcattttcactttccatgtatccgtctctcctagttgtctttagctttaatgccttggcaaactctgctgccacactaggtttttctgcaataaatactgctttcatacagctctcctatgttctatttgctgatttcgtttttatgtacatttggatttgttttttgtttaatttactatatacattttttattttgctttttctataagttttatttgctgatttcgtctaatgttttagtgtaggctggaagaaacatttcaataaatttctcaatttcttccatatgcatttcatccaaagccttctttattgtttcctcagcttttgcaaaatcagtgtttcctgtatttctttcttctatgcacttaatatatgcagacatcttatctgctgcctttacatatttccaattaatgtcatcattctcaattaatatgtcttcatatgcattctgcatttcttccggcaactctgaaatcaactggcaggccgccacattttcaaccttcttgtatgcatctcttatttcaggtgcataatacttaatcggtgttggcaaatcccctgttataatttctgttgtgtcatgcataattccaagcattgctatatgctcagcatccaactcttttccaaaataagtattacctataactgccaaagcatgagctataatagcaacttccaagctatgctccgcaatattttcagtttttgtatttcgcatcaatccccagcgattgatgtatttcattctggctaacataccaaagaaattattcattgtgtaactcctattcttctgtgtgatatctattatctatggattatctattatctatggattatctattatctgtgaattatctattatctgtgtgttttccatatatttcatatatagatttctgtaaatttttcaatctaataacttcaacaacgatgccttacattgtgtccgctaaaatttaatataacttttatattatagcaaacttttagtaataatgctaatatttgaacgtgataaatgtttgttattgagtttttattttgtaccaccacagccttacgccatggtggtacattctttaaaacaagttttttatcaacttccgatgctcaattatgactacttatacaactacttacgcaaccactcatacaattgctcatactgccactcatacaattactcatttctttaatcatcgggacaaatctacttattactttccctatcaaccatctcatacagtttcttcattgcatctttcagtccaccgatttcatctattatgccttccttaactgtctgcttgccaacgagaatactgcccacatcttttgtcagaatttcagtttcattcattaattctgaaaatctgttttcgcgaatgtgacagtgattgattacgaaatcatttattctttcctgtatttttttgaaatattcgtaggtctgcggcactcctataaacataccattcattcttaccggatgtattaccattgttcctgttggcacaataaatgaataatcagcagataccgctaacggcactcctattgaatgacttcctccaagtacaagtgaaactgttggtttgcttagacttgcaatcatttccgcaatggcaagtccacactccacatctccaccaactgtatttaatataatcagcaagccatctatatcctgatcgtcttcgatttttgcaagcattggcaagatgtgttcatatttggtagccttagtacctgatgccacattttcgtgcccctctatttctccgattatgcttaacaaaaatatattcttgtgattattattgtgatcaagttttacctgaccatattctttaatttcatccataaaaaaacctccatactactctctatgtagtatggaagctttttcaaaaaatattataagatattatttattatactcctctacgatttcatcataacttaactttccaccaaacaaatcaagtgcactgccaattgtgaaatccagattgccctgtgaaatttcagcaaacttttcaatctgttcttttgaacctattccgccggcatatgttatcggaatgtctgtaaacttagacaacatttcaaccagttcttcttccattccacctgatttgccttccacatcaacgccgtgtacaagaaattcatcacaatattcagacaacttctttaatgtttcaagatttacaacttcatctgtaaacttttgccatctgtctgtaactatgtaatattgtccatctttctttcgacaacttaaatccaaaacaatatgttcttttccaacagcttttacaaggcttttaagattgccgtaattaactcttccgtccttaaaaacaaaagatgttactattacgtgagtcgcaccagctcttatgtagtcgtctgcattaattgccgtaacgccaccgcctatctgcattccattaggatatgccttaattgcagccaatgcctgcttttttgattccttaaagaactcagaacctccggcatttaaaattataatatgaccgccttttatcccatcttttttgtagagattagcataataggctgcatctttttctgatacaaaattttcatctgcctgatttcctttatccttaaggcttccgcctactaactgttttacttttccattatgtatgtctatacacggtctgaatttcataatctatgctccttgattagtaacttataatttggattttcttatgataccgctcctcgcaagagtttataattaaattctttaattttatgcatttagtgcctgctctaaatctgcgattatatcttctgcatcttcaattcctacagaaaatctaattaaatcaggctgtacacctgcttcgattaactgctcgtctgtcatctgtctgtgagtatgacttgccggatgaagtacacatgaacgtgcatctgctacgtgtgtaacaattgccacgaatttaaggttatccataaacttaattgacgcttcacgtccacccttaattccaaatgttaatactccacaagttccattaggcatatatttctgtgccaaatcgtagtatttgtctccttcaagtcccggatagttaacccaagccaccttgtcattattcttgagccacttagctacctttaatgcattttcgcaatgtttaggcattctaaggtgtaatgtttcaagtcctacattaagcaggaatgagttcattggtgctggaattgagcctaaatctctcattacctgtgctgtagcttttgtaatatatcctgccttaccgaatttttctgcataaacaattccatgatatgaatcatccggttcagtcattccaggaaacttgtctgcgtgtgctttccagtcaaaattgccactgtctacaattgctccgcctactgccatagcatgaccatccatatattttgtagttgaatgtgtaacaatgtcaactccatattcaaaaggtctgcaattaataggtgttgggaaagtattgtcaacaataagtggcactccatgagcgtgggctgccttgctgaatttttcaaaatcaaatacaacaagagacggatttgaaattgattctccaaaaacacattttgtatttggtctgaactctttttccaaatcttccggtgaaatatcaggatcaacaaatgttacatctattcccatcttcttcattgttactccaaaaagattaaaggttcctccgtaaacatttgaagagcagataaaatgatctcccgcttcacaaatattaaatacagcgtaaaaattagctgcctgacctgaagatgtaagcatagctgcagcaccaccttcaagttcacaaatctttgatgccaccgcatcgttagttgggttctgtaatcttgtgtagaaatatccgctgtcttctaaatcgaatagtcttcccatctgttcagatgtgtcatacttaaaagttgtactctggtaaattggaagaactcttggctctcccttagttggcttccatccaccctgaacacatattgttcctttgttgttttccattttcttgctccttaaataaatatctttttttcttatataaatagaattgcaagagctaaattttcattaattcatgcttgcaatcctttaaccggaacatttattccggtttataatcttttaataaaatatgacttgtgatactgcatatggcaaatagaattgctataattacaactgatgttataaaaaatcttttgttcattataggcataacacaagtatctataaaaaaaagaacaaaaagcaccgtggctattttgttgcataattttccaatcttaatctttttgtcttctgtcataaagcgttctccatgtattgttatatatttaactataatcttcttatcactctggttaatgttataattatctaattattataacattagctaatctttatatcaatctcaaccacattggtaggaataagatgaggggcaatcgcactagcagttcatagtgcaaaacgatagccccttaacataacaaattttaaattgttttatttttctaaaaaatattatccttaattaaatccaaagaatttgtttacaaccttatatcctactacagaacactttctaccaaactttcccggaagattcattgttcttccaagaagtgaatttcttactattccatataattcaggatttgcttcttcaagctgtttccaaagcttttctttgtcctttaatctttcctcagagccttctctaattgaaagaattgaagatacacacatcatcatatcaaaataatgaatcattgcatcatttgcgttcttctggtcctttggactgctattgtagatttcaagcataagctttgtaactctgtactgctggtcaagtcttttaatcataactgattcatgaactgactggtcatctcttccgataaaatatttgtaaaggcaaacatctaagtaatagatattctttacatatggcaacggctggaatacataaatgttgtcaacatagaatgtatgctttggaagttccattccacattctctaagaatctttgttctgtaaataactgaatgcattagcaaatactgtgttcttccaaaatgaatatcttcccaaccaagcattttgcccggtgtcatggcacttctgtatctcataatcttcttgtgtcttgcaccctgcttgtcatacataaaattagacacaagcatatcaagacctgcatcttttgcaaccatttcttccaaaagatttaatactttttcaagtgcttttcttccaaggcagtcatcgctgtcaactaccttaaaatacaaacctgttgcattcttaattcctgtgtttacagcttctccatgtccaccgttttcctgatgaattactcttacaatgttaggaaacttttcttcatacttctttgcaatctgcaatgtgttatctgatgaaccgtcatctacaataataatttcaactctgtctccacctgttaatgcactacaaatacttttttccatgtaatcctgtgaattataacatggaattgtaatcgtcaataatttcattacctgtcctcctaatctgtaccgcccctcccctttgcgtgggcaattgtcgggaaatatgctttttaatttatttcctctggtactacttttttgttgattactctatataataaaaatgttaatatacctgttattattacaaaaactataagcacaattaagtcctgtactgagtaagtaatctgctgatcaaccatgctttctcctgaaattgttgcaaaaaaagttattaatactgcaacaaagttggctgttccgtgcaaaatcattggtgcaattatgctcttgtatctttcatatacataaacacatgccaagcctaacaaaaatgcatatggtgcctgtatccagtttccgtgatatacaccaaaaagcaatgatacgataattgctgacggaattactccggccattcttctaagtcttctataaataacacctctaaacattaattcttctacaataggcgcaccaacggccgttgccaatgcctgtattataaacggaccgcttgtaagtgcctctgatgtgcctacatatgaatcaatcataaatttcggcataaacatctgtagaatagaaacaaaataattggcacaaaacattgttgttgttccaaaaggaattataagtaaaaatttaaatgctgatgttcttttaaacttcttaaaaaatcctgtttctttatccaaatttatgtcatcttttaaccatttaattaataccggtgctgttataatctgtgatattaataactcaagtaaaatattttcctctgctattttcatgccaatctttgatgctgaaaaagtagcataatcatgtaacacaaaattagctgcaaatataattccaaatgttactatccctgatactactacttgaactatcatatacaaaaccattgggctaatcaatccccaaagtcttcctgctgttattttctgtctcattttttttcctcaattctgtgctttatacacttatacattatatctatatattgttatctttttgtgtctttgtataaaaataattatctatactcttctgtgcaatttaattacgttttaaaatttgtataattaaattctatcttaaaatttgtatgatttaattctatttaaaattctttataatttttattttaacaacatattgcatagttctgtgggagaataagctatggctttagctccatgagccagcatttctttcttgtcgccaaatccgtaatcaacgcctattgaatcaataccaacagtattagcgccatcaatgtcaaaacatgtatcacctatcataatgcactgcttcttagttatgctgtcaggcatctcatcaaacaatgcttcaagtacatcaactttgctctgtcttggtcctttaagctcagctcccataactttatcaaaatagctgtaaatctttaaatacttaagaacttcttcagccataggaagtggtttagaagttgccaatgcaatatacttaccattaccctttaacatctcaagcatttcttcagttcccggatatatttctgtttcatatattcctataggcttgtatctttctctataaaattcaacaccttccaacgcctgttctctcgtaaaatcataacttttcattaattcatcaaccaatggaggacctataaaatgctctaatttatctaaatcaggctcttcaattccaaactttgagagagcatattgaactgacttggtaattccttcttttgaattacttaatgttccatctaagtcaaaaataatcacattgtagttattcatatatttctcctgtgttttaaaacaatctttgtttaattattttaatgtaacttgtttttaacaagtttagtataaacttatctttttcttaattgatttttaatataacttatcttttttctaaaattactgtttacagcattatttgtagtataacatagtttgcccttgttttacagtaacttttgatttataatattttaagaatttattaaatttttgtgaggtacatataatgagtcaggcaaaagtagacaagcataaacaggaaaaatacaacagaaagaaaaatgttaagaagcgtaactttaaaaagattgcagcatacgttgttgcaacacttattgctataacatttattggttatatcggatattctgttgctattgacacaggactttatactcctgccacaacaacacagggaagcaccctttcaaaagaagctattgaaagtttaagacagcagttaattaaaaacggcgactcaaacgttcagggcaaaacaagtgatgcttcaactgaagctgctacaacagctacaagtgctgaaacaagcgcttctaaataagattattgaaaataaaaatccttacagtttcttttattgaagctgtagggattttttaatgtccccactacacaaaaaaaatcaaccctgcagccaattaattacaataatgtaatcaactacaggattgattcttatatttttctctattccactgttcttcttcccactacattctgtcaggtgcactaaatcctaacaagtctatgcactgttcaagtacattaattgtaagattgattaatgcaatgtatcctgccttcttagtctgatcttcttcagcaagtatctttgtttcgtgatagaatctgttaaatgcattagataaatcgtatacatatgaacaaatcttatgtggtgcaagttcttctgctgcattttcaattatttcattaaacttagctacttcaagcattaactgcatctgtgagccattgtctgtgttgattacaggaaggtttacatctgcgtttccgctttcagctttgtatttttcaagaattgatttaatacgtactattgtgtaaagaatatatgggcctgtatttccttcaaatgaagcaaatctgtcaatatcaaagatataatcctttgatgcctggtttgacaaatcgccatacttaagtgctgcaagtcctactatctgtgctgtattattagcttcttcctcacttactgtacgattttccataatcttatcgtatacagctttattaatctgtgcaataagactttcaagacgcattacaccgccatctcttgttttaaatggcttgccgtctttgccattcattgtaccgaaacctaaaaattccatcttagtattttcgtctacaatgttagctttcttagatacacggaatacctgtgtaaaatgtaattcctgacgcttgtcagctacataaatataatggttaggcttgtaatcctgttctctctggataattgttgcaagatctgatgttgcatataaagccgcgccatctgactttctaacgatacatggtggaagttcctttgtgtcatcttcctttgaaatgtcaacaactaaagctccctgactttcataagctaacttcttgtcaattaaatcctgaataagtcccggaatatatggctgagcatcactttcacccttccataaatcaaaatcaacatttaagtttccataattcttctttaaatcttcaacagaaactttcataatatgtttccaaatagctgtatatggagcatatccactctgaagctttaatgttgcctgatgtgctttctctttaaactcttcatcaactttagacttagcactggcacatggataaatctcttctaattcagaaattgtaaatggtgcctcttcagggtattctcctttgtatgattcatcaaaataaactaaatcaggtttacgacattcaagctctgtaataataagtcccatctgaagtccccagtctcccaaatgaacgtcagaaataactttattacccataaatctttcaatacgtttaacactttcaccaataactgctgaacgcaaatgtccaacatgtagaggcttagctacattagctccaccgtaatcaattacaatagtttcagatgccttgttttcgcatccatacttgtcagcttccttcatatcgttaagatatttagctacgaattcactatttaatttaatattaatgaatcccggcataactgcttcaactgattcaaacatttcattttcctgtaatgactcaacaacctgattggcaatcataataggtgccttgtggtaaagctttgcacctgccattgccccattacactgatactgacaaaggtcaggtctgttggatacaacaaccttgcctaattttttgtcatattcattcttttcaaaagctttttcaaactcttctgtaataagttctaataattttttcattataatgttactccgtttaatttaagtaattcacgggctgattcaacagaatcaacaccagttttattcttgataggtgcaaattctttctctcttacaacttcgtaagcaagacaattatccatcatatgtaccatatcaagtactaatgtttcaaacttgaatccgttttcagtttcaggttttactgcattaccattttcatcaatatgagcaatcttcttctttacaaggtgaactgaaagattatttttcatattcttttctaaatcttcaatgttgaataaataatttaagataacaccatacttgtatgcaagctctccgtctgccttagtctggtatctcatatcttcagttaattcataatattcaacaatagatggctttccatcttctaagcatagtacaccaaccttttcttcaggtgtagccttagaaacaacctttgctgctgaacggtatccgccatcaatcatggcacctacgaaacaaggatcagccattctctggcaaacattatcaactgcaaaaatattaatatattcaactcctgccttcttagctttttcacaaagacctgccttaacgaatgagataaaccatccaccattgccattaggtgaggttgaaattctatccttgtcttccaagaaaatcttgccatcaaaagatgctgcaggagccatttcctgtacaaagaaatcaacataattcttatcataaccaaaatagttcatttcttcaaagaacttaactgtgtcatcgttgttcttttcacttgtcataatataaagtggaacccacgcacctgtctgattaacaacatccattaaattcttaataagcatttcaaaaatatatacgtccctggtaagaccaatattgtacattcccttaggcttatctgagccaagtcttgtacccattccacctgctaaaagtaaagctgcaacttttccctctttaattgcttctgtacctatagctgtgtatttatctttgtttgcttcaatatcagcaatgcttactgcatcgtcaaggggtgtgataacacctctttcagtttcttttccgccatcttcaattaacttaagcaaatcaaaatcaatttcatctatctgctttaataaagactgtctctggttttcatcaagttcatcataatactttaataactgagactgattatacttttccaattttgcttttgtttcctgtaaattcattcattacctccattggcttcccattttttcatattttcatactataaagaataaattattttccaataatatgcaaggttttaatgctacaaagtatttcaatacagctctgatatcttaaatcaggattattttttgtacatttttttattatctttctaagtttatggcttgtcttaaaatagtctttaaaactgtaaagtgatttactgccttgcactgaattatatgtttttgcagtttttaaatagtacattgttgtacctattccatatatgtctgccctaatgtcagtattataaagccccttccctttgctatcgccaaactgctccggtgccgcaaagcccttacttcccaaggcaagcttatccacatcaatatctgttctgtatctttttgctatgccaaaatcaataagcttaattcttccatccttacataaaataatgttagccggctttaaatctctataaactattgccggcgacaaactatgaagataataaaagccactgcatacctgttccataacttttacaagcatttttgtagataatgttccatattcatccacatatttctttaaatcaatcccatctatatattccattaccagaaaaaatgcatcttcaatctttattaagtcaaaaatttttggaaggaccggatgagtgcagttctttaaaacttcaagttctctttccattccttccaataatctttttctgttggcaggatcagatgttatatacttcttaagagcataaattccaccattgtgaatatcccttgccttgtagacaatagcacttcctcctctgcctataagttcaagtatataatatcttcctccaacaatattatttataatatctgccataaacacaacctttccgatgtgtttctctccaaggctttttttattacaatgtcattatcccaccattgtgcaagcacaggtgaaataagaccttagtccactagtaatcttagatggttgcaatatcaactaatgttaagttttcttttgcattgctttctaagcttgtaagtaatgcatcaactgtgtctaagcttgtaaaacagttaacacctgtttcgattgatgttcttctgattaagaaaccgtcacggttcttatcacgtccctgtgttggtgtatcaataacaatatcaatcttatgttcaagaagtaagtccataactgttggtgcttcctgatgaatcttgttaaccttaattgcatctacaccattctgacgtaatacatctgctgtacttcttgtagcataaacttcatatccaagcttttcaaatctctgtgcaagtggaacaacttcctgcttatcagcatccttaacagaaataataatcttcttatgttttggaagaacaactcctgctccaaggaatgccttgtaaagtgcttcgttaaatgtctttgcaataccaagacattcacctgttgacttcatttcaggtcctaagcttgtttctgcgccacggattttttcaaatgagaatacaggcatcttaattgcaatgtaatctgcattaggctgtaatcccggtttgtaacccatttccttaattgtatgtccaataatacattttgtagcaagttttacaattggaatacctgtaaccttactaatgtatggaactgttcttgatgaacgtgggttgacttcgattacataaaccttaccgtcacaaacgataaactgaatgttaatcataccttttacgtgaagtgaacgtgcaagcttttctgtgtaatcttcaattgtatcaataatctcttttgaaagtgagtatgcaggataaactgaaatactgtcacctgaatgaactccggctctttcaatatgttccattacaccaggaataagaatgtctgtgccgtcgcaaattgcgtcaacttcaacttctgttccctgtaaatatttatctaccaaaattggatgatcctgagcaattctgttgatgatttccataaattcttctacttcttcatcacatgttgcaatctgcattccctgaccaccaagtacgtaagaaggtcttacaagaacaggatatcctaatctgttagcaacttccttagcttcttctgctgtaaatacagttccacctgtaggtcttggaatactacatttttcaaggatttcatcaaataattctctatcttctgcagcatctacgtcttctgcctttgttccaagaataggaacgcccatcttcataagtgcttcagtaagcttaatggctgtctgaccaccgaactgaacaactgcaccgtcaggtttttcaatgtttacaatattttcaacatcttccggtgttaatggttcaaaataaagcttgtcagcaatatcaaagtcagttgataccgtttcagggttattatttacaataattgtttcataaccttcttctttaaatgcccatgtacaatgtactgaacagaagtcaaattcaataccctgtccgattctgataggacctgaaccaagtacaagtaccttctttggcggattagtttctactgattcgttttcaccaccatatactgaataatagtaaggtgttgcagcttcaaattctgctgcacatgtatcaaccatcttgtaagaagctacaatgttattatcataacgcatctgcttaatttcgtcttctgacttgcctgttaatctgctaataactgtgtcagggaattcaattctcttagctgcctttaataattcaggtgttaaaggttcattcttaagtgaattttccatttcaacgataatagcaattttatcaataaaccacttatcaatctttgtgatttcatgaatttggtcatagcttacgcctcttctaagtgcctcagcaataacccagattcttctatcatctactacgtgaagctgatcttctaactgatcatctgtaagttctgtaaaatcataatccataaggcattcaacatgctgttccaaagaacggatagctttcattaaagcaccttcaaagttgttacagatactcattacttcacctgtagccttcatctgtgttgtcagctttctgctggctgtaataaatttgtcaaatggaagtcttggaatcttaactacacaatagtcaagtgttggttcaaaacttgcatatgttttcttagtaattgcattcttgatttcatcaagtgtataacctaacgcaatctttgctgcaacctttgcaatcggataacctgtagccttagaagccaaagctgatgaacggcttacacgagggttaacttcgattacacaatattcaaagctttcaggatgaagtgcgtactgaacattacatccacctgtaatgtttaattcattaataatatttaatgctgatgtacgaagcatctgatgttccttatcacctaaagtctgtgacggagcaactacaatactgtcacctgtatgaacaccaacaggatcaatattttccatgttacatactgttatgcagtttcctgcactatcacgcataacttcgtattctacttctttccatcctgcaatacatctctcaacaagaacctgacctacacggctaagtcttaatccgttttcaaggatttcaactaattcaacctggttgtgagcgataccaccaccgctaccacctaatgtgtaagccggacgaagaactaccgggtaaccgattttgttagtaaatgcaataccatcttcaacattttctactaccaaagatggagcacatggctcaccgattttttccatagtctctttaaattcaagacggtcttctgccttcttaattgtttctgatgttgtaccaataagacgacattcatgtttttcaaggaaatctgtttctgcgatttccattgcaaggttaagtcctgcctgtccaccaagtgtcggtaagatactgtcaggtttttccttttctataatcttttcaagtacaggtacagtaagtggttcaatatataccttatctgcaatatccttatctgtcataattgttgccgggttagagtttacaagtacaacttccaaaccttcttcttttaaagaacggcaggcctgtgttcctgcgtagtcaaactctgcagcctgtccaataacgattggacctgaacctattactaaaactttcttaattcttggatctctaggcattcttcttcacctccatcatttgaataaattcgtcaaacagtctgtccgaatcctgtggaccagggcatgcttccggatggaactgaactgtaaaaatactcttgtttttatatcttaaaccttctacggttttatcatttacatttatgaaagctacttctgcaacttcaggatttactgtctctccgtcaaccatatatccgtggttctgtgaagatatgtatacatgtcctgatgcaaggtctttaacagggtggttaccacctctatgaccatatttcatcttctttgtatctgctcctgtagcaagtgccataagctgatgtccaaggcagattgcaaaaattggaatatctgtattgtataattttctaatctgttcaatctgatattcacactcttttggatccccgggaccattagataacataattccgtcagggtttgacgcaataatttcttctgccggtgtgtcacatggataaatagtaacgtcacaacctctttcgttaagagattttccaatattgttctttgcaccaatatctaataaagctaccttaaatccatctccctttaattctttcttttcagtgcaactaactttcttaacaactcctgttactctgtattccttaatcttaggaagtatttcgtcaaggttgtaattctcgttagttgtaatcattccgttcattgttcctttttcacgaagaatctttgttaaagctcttgtgtcgattcccgcaataccaggaatatcatgttcttctaagaaattctgaatagtatcgtcacttctaaagttacttggcattctgctaagttcgttaacaatatatccgtccggccatggtctaagtgattccatgtcctcgaggcaaattccgtagttaccaatcaatgggtaagtcatacatactgcctgacctgcatatgaaggatcagttaatacttctaaataaccccacattgatgtattaaatacgatttcactaattatctctcttgttgatccaatagatgttcctttgaaaactgtaccgtcttctaagattagaaaagcgttcataaatgtgtcttcctttcttcatttcattaagtgagtcaaagtatctttcaatatttttgctcaaattgtaaagattataccaaaaaaagtgacgtaattcaacaaaatatctaaaacaatttagattttttttaatacttaaaaatataaagtaaattactatctgattttgaatttgatttaaaattcatgcatataaatctgttaacaattctacctactatgttataatattttttgtaattaatcaatttgaaacggagactttatgagaaaaaaagaattagcaaaaattattatagaaagattaaaagaagaataccctgacgcagactgcactttggactacaatgacgcttggaaattgttaataagcgtaagacttgctgctcagtgtactgacgcaagagtaaacgttgtagtacctcatttgtacgagaaatttccaacaattgatgctttggcaaacgctgatgttagcgaaattgaagaaattgtaagaccttgcggtcttggaagaagcaaggctagggatattagtctttgcatgagaatgcttagagatgaatttgacagcaaagttcctgacgactttaaccaattattaaaacttccgggagttggacgaaaaagtgccaaccttataatgggtgatgtttttggcaagcctgccattgtaactgacactcactgcataagacttgtaaaccgaatgggacttgtagacaacattaaggagcctaagaaagttgaaatggctctatggaaaattatccctcccgaggaaggcagtgacttctgccaccgacttgtatatcacggaagggaaatctgtactgcaagaacagcacctcattgcgaccgttgctgtttaaatgatgtgtgtaaaaagaatataaaataaaacattataaaaaggagcatatccactttgcatttttcaccttttctgagaaatatagcaaatgaatatgcttctttatttttatcctctggggattccttctgctattcttgttatgccaacgtaaatctgagatattttgtaccacgtactaaaatctaccacacctgtttgtggcaaatcaaaaatcttttggaatgccctcaccgaagcctgagtaccttcaccgaaaactccatctgctgaaactcttggaatggctgtgtaaactctggcaatggtatctagctgttcctgcatctgcataaccttctgaccacttgcacctatagtcaggtcgtagccgggccatgatgcaggaatgcctgaaatctgttcagcagtgttaatatacatatcatcgccataatagtttcgtatgatttctaacgttccaaagccctgctcacctaaattgcaggacccccactggctaagccaattaggacaggtaactctttttccatcgcaatactgagtaagaattggctgccttacatcaggtcttgaaagatattggtcgaaaatctcatcaacaacctcatcaatagactggaaaatatttcttccataaatccatttttgatcatatgccgttgaggatgtaatggtaaaatcgtagcctttgtttctataccactcagtgtaaaccctgtttaaggtaaatgacataattgcaagcacgtttgcctcaatagttgccctaggccatgttgcatatatttccgatgaagccacgtttttaatataatctttatatgttacataataatcccttgcattgcttgaaggcgtaccattgtgaaccacaacatattcaggtataacaactctgcttaaaacaatttctcccggttcatttacatctttaatttcgtcctcaggaatcttttccggatactcagcataaagggtatggggatcaatatctatattctccacctgttcaccttcacgctttctcatacgcacattttgaagtgatagtgaatcaggcaaaatctccacatttctaatattttccgtttcatagcccggtacctcaatttgaatattataattggcataaggcatattctcattattttcattaagactatattccaatggcggagtatttaaatctacaatctgagtctgcccagaaacatctgtttcaagcctttcaatggggctgttgggattaatggctgtttcaggctcactgatagttacccttgcatccctaatgggagcattgtcagaatccgttacattaacctgcaactcgcctctgtcctgctctcctacctgcatttttattaacataaaattaccatacaaacttaatctttataatatatgcagataacaaaattatattacaatgtcaaaaggccgtttttccacctgtgtttgcacaatggtggaaaaacgaccttgggacacgcccggatatgtattttaataattattttcttttatatgttctaaagaaatattcaatatcaaaataagtattttcgtcactttcatcagccaaaacccagtcaacctctttatccaaattaggtatgaaagtatctgctgaatatgcctgattaatatatgttacataagctgtattgcagtatggaagcatagctttgtaaatacttccaccaccaattacaaaaacgtcattttcgtcgtattttgaagcttccttcactgcttcttcaacgctgtgaacaacaactgctccgtcaacttcataatcttctttcttagtaataacaatattcactctgttctttaatggacgtcctcccggaaaactttccaaagtctttcttcccataataacaaccttgcctgttgttgtttctctaaaaaacttcatatcatcaggaatgcttacaagtaactcattgttataaccaatagcccaattttcatcaactgctacaattaaattcattatgttttctccttcataaattcactaacaagcatactatttatgctaaaactttgtgtgattatattgtcaaaatatcaagctcttgttaaacagctacaggaatatttttaatctgtggacctgtaacgtaatcttcaagtttcaaatcatctactgtaaaatcgtagaaattcttaatttccggattaatccaaagcttaggtgccggatgctgctctcttgtaatcaactcttcaattaaaggaacgtgcttgtcataaatatgtgcatcagcaataacgtgaataaattctcccacttccatatcattaacctgagcaaacatatgaattaacgctgcatactgacaaacattccagttgttagcagtcaaaacatcctgtgaacgctggtttaaaataccattaagcacaagattgcctgtttcttcattctttgtaacattaaaagtcatactatatgcacatggatataaattcatttcgtgcaaatcctcatgattataaatattagtcataattcttctgctatatggattgtgtttcaaatcatataaaacacggtcaacctgatccatatcaccttctttataatgatgcttaattcccaactgataaccgtaagcctttccaatagaacctgtttcgtcagcccatgcatcccaaatatggctgtttaaatcatgtacattattagacttcttctgccaaatccaaagaagttcatcaagacaattcttaaagcctgtctttctaagtgtaatagccggaaattccttctttaaatcatatctgttaactacaccaaacttcttaatagtgtatgcaaaagatccgtcgtcccacttaggtctaaccttttcgccttttgtatctgtaccattatccaaaatattcctacacatatcaacaaatattttatctgcgtaactcatatccactctccaatcaatttattactaaaaaataattgcagaacaacttgaaacattctgcaattacttttgtttgtcttttcaatattataacatataaataaaataaaaaacattgattaaaaatttttatttaaactttttactgacctttaactttgtctgtcaatttttttattgtaccttaacttcgcctgccagaacttttttgtaatcttccagatttttcctaagtaaagcaggtgtatcaagtttgtaaggacacttgctcttgcactgtccgcaattaatgcaatcctcaatcttcatcatttccttctgcatatcctctgttaaccatgcttttgaaggagccctacgaagcataagagacattcttgcacaattgttaatttgtattcctttaggacatggcatacaataaccgcatcctctgcagaaatccccgactaactcttttctctctttctcaatatattcacttattttatcattcaaaaccggctcttcatccataaacttaagccactcttccaactcactcatcttctgaatgccccaaattggaagaacattgtcgtattttgaaatgtaagccatagcagctttagaattgtgaataagacctcctgccaagcctttcatggctataaagccaacattcttttccttgcataaattaacaagctcaatctctctttcagagcaaagataactgaaaggaaactgcatagtctcataaagtcctgactgaacacactgaaaagctgtctcaatattgtgggcagtaattccaatatgcttaataatcccctgctccttagccttaagcatgcactcatacatacctgttccatcatccggcttgtagcactgtggcacacagtgaagctgataaatatcaagataatcagtctttaaattagtcagagatatatcaagttgtttccaaaactcatcaggagttttcgccattgtctttgaggcaataaaaatcttatctctcattccctcaaacgcctgtcccagcttctcctcgctgtcactgtaagctcttgcagtatcaaaaaaagtcattccacccttatatgctctctgcaaaatctttacagcttcatccattgtaactctctgaataggcaaagctccaaaagcgttctgtggagttttaatacctgtttttcctaaagtaatctccttcatatcaattctcctttgtgaatttctctgtgtccaatatttcatttaaaagagctgtgcatccctttaacacatcatcataagttgcatcaaaatttcccgtgtaccaaggatctgctatgtccctttcttctcctgcaaaatgtagtaacttgtaaacctttccgtcccggtcatttcctacaattcttcctatgtttctaatattagcactatccattccaataatatagtcaaattcgttataatcactcttctccatatgtcttgctctgtgattaccacatggaatgccttcactttttaatttatttcttgttcccggatgaactccgttgccaatctcttcataacttgtggctgccgaatcaatgtaaaaacggtcagcaatgccctggttgttaaccatgtcctgaaggacatactgggccatagttgatctacaaatattgccgtggcaaatgaatagtatttttatcattgttgcataacctcgcatttcttagtttttcttggtttttcgggctttgtaagcctttgtgaatttttcttttctggcataacctggtttattttctcataatatcgtccgcaaaaggtgtaaaataaggtgtatgtttttccattttacaccttgatattttcaattaaaaatcgtaattacacaacctgaatccgggcaacttcttccctggcatcctcaagatttacgtgcgtatatgtattcagcgttacgctgatgtctgagtggcccatcaaatattgcaatgcttttggattcattccggattttgccatatttgagcaataggtatgccgacatacatgaggggtgatgacaggcatctgtactttgtaagtattattatacttctgaatgatgtgttgaaaataatgctcccagtgcagggaataacagatactttcatttttatcaaagtataagaatccactttttccatctacca

SEQ ID NO: 12705 - DNA, 7317 bp, Unknown
  gut microbiota DNA sequence
gaacatataagtatgaaattaaaataagaaagacgaaatagttatgcctaaaataattcatagaacaacgttgataattgcaacattaacaatactaacagttgtattatataatgcgacttcaattgatataatcctaacttttgcaattacattagggacaacttcatatcattttattatgagattgcttgtaggtttgatttttaatcaggttatgaggaacagagcggattatacgaagagttggtatcaggtcagcaattttgaaaatagaatatataagaaattaaatgtgaagaaatggaagaacagaatgcctacatatgactcaagtttgtttgacactaaaattcatagtttgcatgaaattgtacaggctatgtgtcaggcagagttggtacatgaaatgattgtagtgctaagctttgtgccgattgtggcaggagtttggtttggtgaatatcctgttttcgttattacatcgattttggctgcaatgtttgatttgatatttgtaatgattcagagatataatagacaaagagttattaagttgatgaaatacaaagaaggaaaaagcaaaaaagatgtcagagaggatgacaaaggaagagtggtataatcaattatttctgggacttggaaggtcaaagtttcgtagcagttttcatttgaaacagaaggatattgattatataaatgaaaaaggtttggatactataagagaacatgccagagagtttattgcaaaaagagaagcaccggcggttattccaaatgacggaaaacagacaccaatgaaaggacatccggtttttgtggcacagcacgcaacggcaacatgttgcagggagtgcattagaaagtggcacaaaatacaacctggaagagagctaagccggatacaacaggaatatttggtggatgtgataatgacgtggattgagaaggaaataaccaactaggttatgccctaatgaatataagacaggatttaaagcagtagaaaagtctgataactataagaaatggagatgttatttatggaggtaaaagagtggtcatatgaagagtatccatcttttgatgagccaattgatggagtggaaagaatcccaactacaggagacgaaaagggggcatacattttttctaatgttgaatatgcacacgtagatggaataacattgcatttgcaaattattgttcccagaacaagaaatacaacagatagtgatgaaacatatccttgtatagtttatgttcagggttcagcatggttgaagcagaatattaattccaaacttggtgtgctttcaagattagctgaaaaaggttatgtaatagcagttgttgagtatcgtcattcaggcattgcaccttttccggcacaggcgatagacacaagaaatgccataagatttatgaaaattcatgccagtgaatacaaggcagatgcaaccaagatgtttgttgcaggggattcttcaggaggacattctgcatttttttcacagcttatcaaggaagattctaatgaaaacatttatcctgaagcagatgcaaatgttaagggaattatttcaatgtatggtgcattaagcataatgtttgaagacggaatgcctagtacattgaatcatcatcagcctgatagtccggaaggaatggaaatgggtggcgttgatttgcgtaataatcctgatttgtgtagaaaaatgtcagttgagtgtaatataaatgaggacacaccattgcctccaatacttatgttccatggaacaaaggatcgcacagtcaaccctaaaattagcgtcgttgtatacaagctattaaagaaatacaataaaaatgtgaagttatatatgcttgaaggtgcggaccacggcggaagtgagttttttacagaaagaattttggatattattgaggagtttatacagtcaaatatatctgattaaaaacttacaaattttgcaatgatgagtaaaataatcaggttgtaatcagacttttggtgttttggtgtactaatcaatatatttatagaatcagatggagacagattatggtaaagaaaatagtaaaaggaaaacagatttttgcgagaaaagcgcagcctgctacaaaagcggacaaacaggttgtaactgatttaatggatacattaagagaaaacagagaaatttgtgtaggcatggcggccaatatgattggagtaaataaatccattattgttgtggcagcaggaccgtttcagtttgcaatggttaatcctgtgattactaaaaaatcaggagagtacactacagaagagggctgtctttcattggatggagttcgcaattgcgtaagatacgaagaaatagaagtggattatttgaatgaaaattttgagccgaaaaacggcaagttcagtggttatacagcccagattatacaacatgaagtggaccactgtaatggagtggagatataaaatatgcaggatgtggaccggctccaatgatttcattgttatcagaaaaatatccaaaccgacattacacaggtcttgatttaacacttgtaatgatagaacaggcgaagaagaaaaatattctgaatgttgattttgtggtaggggattgtgaaaaaatcctttatgtatacaggtttgcaagccttgtatatcataaaggattttttagtaatgatatattgaaaaattatattttattaaatatatcattagattatcaaagtcttaaaaaataattgactttttaatttgcttttattataaagccttttattttactgttactttgcagacaaattttttcgtacctgaaattactgtaatcttagcctttccttttttcaaggctttgattctaccgtttctgtagactttgacaacttttttgtttgaggttacgtaagtgattctgtcacgactatttatcggtgttagagtaactttaaatttaaaagttttgccttttttcaaagtcagtttcttacggtttaacttaatctttttagtagtaattttgcgtgtccgtgcattctgagacgaagtcgttggagtttttgtagttgtcttagaagacgaaatttttgcaagtgttacagaatatacttttccacaagcactgcaagtcttggattttaatcctttttctgtggttgtaggttcttttacaactacatattctccgtaactatgtcctgttgcttttatgcttcttgtttttgtttttttacatacaatgcaggtaaaagttgttacgccgtttgctgtacatgtaggctcttttgttacttttccgtcatcccaagtatggttactggtttttttgatggtctgaccatatgaaattattttcttacaatcagtgcaatatgtatttcctgtataaccatcttcgccgcaggttgcgtcttttttcctgcggatttcagtatgctgatgtcctgttgctgcaatgctcgcagttttggttttggcacatatactacaagtaaatgttcgaacacctttcgctgtacaagtaggttctgttgtgacctttccttcatcccaagtatgagtagttaatttcgcaatggtcttaccggatgaaatttttgttccacaatcagtacaatatgtatcgccggtataaccggtttcgccacaggtagcagcctttttattacgaatttcggtatgaagatgttttgttgtttttgcaatgttttctgtttttgtcttactacaaatgctacaagtataggtctttacgcctgtctctgcacatgtaggttttttagtgattactcccttattccaactatgattttctgttttcgcaatagtattgcctgatgaaagtttagttccacagtcagtgcaatatttatcaccggtatatccttcctctttacaggaagcttccttttgatttcgaatttcagagtggaggtgctttgttgcatctatgccaattttttcaatttttgtattattacaaatagcgcaggtataagttctttcgccttccactatacaggttggaacttttgtaattactccaccatcccaatgattatcacagtcatgtacaattattgttgccgaagttgttgatggcaatccgtatagtgatgtggttaacgtggtggtaccttctttaagacctataatctttccatcactataggtggcaatagaagggtcattaatggaaacggttggagtatctaacaaggttccgattggtccaaattgatttataagagaaattataggtgtaatatttggagttactgtttctcctaatctaagaacatatgaatcttggtcaaaagatgtcttataatttgtaatccaacttttagttactgaaacagtaacagtttgttcactgtcatttgccggtgtttctgttgtattaatggaaggtctggaggcaaattcttcaacccagtagtcatagccgttgtaagtaacatgaccaactccaacgcaggtaaatttataacctaacatatttctacggtgcccctgaccggcataaggttcgttatcttcacgccatccgtcatttactgcttctgccttagaataaacattaggacttgctactgcaatattctcacctgtatccagtctggttatattttcttccgtataaatagtaaaaggattttgaccatttgggcgggtgtgttcgtaggatagtgcaatttctgctgcacgtttcattgcaagtcgctctaaatcatagtcatagacaagttcttttaaaccgggatatgcaacttgtttggtatcagttttatcccaagcccatgcgtcagtaggactggttctcagttcattaatcatatctaagattcttcgggcttctgtctggccatactttacagatatattgaccggaatgatttcttctgcatttacctttgtaggaattatcataagtaaactcataacaaaggaaaatagcagtaattttaaagatgtttttttcatatattcaccgttccttccataaataaaatattgttaagggaaaaagacttttccgatgtataaaattcataaattatcgagtaatttatatagttatattttattatatttttttgcgattgtatatgacatttttgtgttttgacaccctaatttttatatgaaaccggggggaccagttggcaaggcatttgaagtaggaaagaaaatctaataataaataatctaaaaaacttgcattatttaatgcaagttttttgctgttaatcagaaaaattctggtataattatggaagaaagtacgcaagataatacggaagatgatacgcaagaaagtacgcaagatagtacggaagttagtgcgtaagatggtatggaaagttaggagagaattttatggaaaaatatcaaccaccatttacaattacaaatgaaatatcagaatgaatattataatgcaatatcaaaatgccatgttaatggaaattcaacattttttattgagtttatgttaaaacagattgatagcgtgttagaagagatagcaacacaaataaatgaagacagtgaacaattgtctgattgtgttgaaaacttttggatgtaatggaatatgatgttgcgtatacaagtaatcaacttatggaaaagttagaattgaagtctagagaaggttttagaagaaactatttaaaatatgcacttgaattaaacttggttagtatgacaattccagacaaaccaaatagcaaaaatcaaagatatataaaaaaataaaacttaggagaggagccaacatatcaggtgattgacaacatagttagcgttggtttggaaaaaacacgcaatgttaagtaaggcagcaaaaacttttatgaaaataataaatgaaaatttatagaggatgataaaatgacaagaagtgaaaattttattttagattttacacatatttatattgatgaaaatatagagcagacggagaatattgttagaattgactgctcagatattttagaaaccgacttgtattgcaccaaagaaggggaggcggagattcagaaacgaatagagaattttagcataaacggcgttcattttattgattcaggtaattatcattacataacaaaaattatgacggacaaaataaataaaaagttttcgcttgttttgtatgaccatcacacagatatgcaaaagcctatggttgaaggaatgacaagttgtggtgattgggcggcacaggttattgagcaaaacgaaaatcttgaacaattgattcttgttggggcaagtgaggcggatatacagcagataaatgtgaaaaatcagagtaagcttataacattttcaacagaagaattacggaacaatagtggaagagaaaaacttgatttgattgaaactgatgtacctttttatatttccatagacaaagatattttggacaaacattatattgaaactaactggagtcaagggcatatgagccttggtatgcttgaacatctgttgaaattctttttgaaagataagaaaataataggcgttgacatatgtggcgaatgccagattggacttccttttcctgaatatatagaggcggaggagaaaaacgcggagactaatattgaattgtatgagtatattgggagatacatgggaaagtagtttaaataattatatatcataagtaatataaaaattatgcaggaaaaagttgaaaaattatatgaaggtgtggaaattgcaagaaagcataatgtggatatgtttttacagatgaaaaaataatgcctagattttctattttgaatccaagatatacaatgacacttccacattaccagatagtttcaggaatttatgatatctttaatcatatttgtgaacagtatttttcaggggaagatgataaaaaaggaacattcataatgacagatggctacaagaaacttgataaagaagaaatagagcagatatttagagaaagcttgaagaaataataacaacaaaatgaaaaaggactgccggaaaatgacacagttaatactgagagtaaatcatttccggcagtcctttttgcaatctgatgatttagtatattgaaagagtctcttcatttccgatataaagatgtagatgatatttccgaatttttttaagcaatatataattgctatttgagcaacgattacgtgtcagcaaagaaaaaaattatatgacacgtaactggaatcagcgttatagaaatcggaaaataaaataaaaaatagttgaaaaaatataaaaacataataaaaatattg

SEQ ID NO: 12706 - DNA, 838 bp, Unknown
  gut microbiota DNA sequence
ctgtatcaattttttcaatcgttccactccatgtttttgtatcatctactctggaacgaagaatcactgcttgaccttcggacagtttgtaaacatttgtctcattcacggtaccttttacacgataatcaccagttgtcaaaattgacataaacggctgtgtattgccgtactggtcagaatcgccattttcattgatggattttaccacaccgttgatcttgctggttacggtagactgtgacatggtatcttccattttctgaatctctaactttttactctgctgctcatattcagactgcttgatggatgtctgcaggctctggatctgtaccgtataattaaactgttcatccttagatgctgcatttttctctgcggtaagtgtcttgatctgattgttgtaatcggtgatctgatttccgatactttcaagttccagttttgcctgtgcaatctgcaggctcagatcatcagtcttgtactcaaataatggggttccttcctgcacttcatctccgactgctacaaaaatctgttttacggtctgatccgaactcagtgtgatattccaggtatcctgtgattccaccacacccatataccgattctggcttccggcgttgactgcacctgtcatggactgtaccgactccacataagctgcatctccaccactcttactgtttccaagccggtctttcaggaaaaaaccaacggctactgctgcgacagctgcaacgatgacaactgccaaaatgatttttttctttttgctcatatcgcgctcctcctatattcagtaaatccgtatcgtctcataattatcctttcc

SEQ ID NO: 12707 - DNA, 84850 bp, Unknown
  gut microbiota DNA sequence
agcttgttctttttcttgaggagtaaatctttcttttctagacataaaaaatacctccaaagtaacagaattttatatttaatctgtctactttagaggtatcatatcaatttgctaaagtgcttttcattttattcctcagttgatcctttaagtaaattaggattgacatttttaaatttttcttttgagcatagtcattttataccatactggtccatcagcttatttctgtactccacattatcataagacttcattaattcgtctattcgattctcttcaagtaattgtcttcccagcattgccatactttcctctcctcgtttttctccctgctcatttcctattctcatcgcttcattatacactgtatctatatagctacacatattattcacctccgtttctatattttcactcatcggtatttcatattcttcttccagtattttctttttctcttccggtgtcatctttgatcttaagagtacgtccaataatcttattattttattatcgtaattggcatactccggtccgcctaagcatattgatatgacatttattaaatcgtatttctctttatctctatcaacgcttgataccttatcgttcttctgcaatgatacaacactaatgctgttcttatgtttatcaggcggatctgtacatacccatatggagtaggctttctttaatttttcataatgtgaacctgcaaattctgtattatactgtgatgataaaattctggcacaattgtatacacctcttgtcacatagtcgtatcccggataatagtcgttttgaatctccaaatcacagtaaatgtgactgttttctttaggattcggtcttatgacattaaagtaaatatcaaatgtcgttcttccttcagaattaatctgaatttctgtgtttaagcctttaattgccggcataacttcattaggatttacagtttctgacattgtccttacatcaccttctataaggcatcctctaacatattgtacggagcaatctttgtactcatctattacacttatgataatccatgccaatatatacttatcgcataaaagtcttttcgccgcttcatcataccacgctttaatataggctgtttctatattagcggataaatatgtttctttcattttcctcctcttatgtttctcccccttagtcaatagctgacttttttacatatgttgaaaatgaactttcttaaaattttcccctctaatatcgcatattctgattgcatgttttttgaagccagtatatgtgatatttatcacttattgtttaagcttagcttgattttactctatcttttctcgtttggcaatctcatttttacactctttcttctaccttaaaaacatattttccttttccttttacatccacaatcacattattcattttcataacattcagtatttttgatgcctgtgtttttccgcaaccagtaatttccataacttcctgccttccaaacacttgattatcatctaactcgtcaaaaatatttattatatgagcatgcataacatttgaaatcttggcacctagtaatattgtttcaagatccacttttttcaattctttagttcgctttttcatttttcaaatttgttctattgtcatactgtcctcctgcaaaacctgcttgcattatgcttgcctatcattcccatttatttctacaaatttattatttaaaatattcccccgtttatacaatcccatctatacatacgttctactatcatttcatttcacagtcaatatggttttgtcattatttgtgtgttctaattttttgctttctgcattttttcatgtacagtctaatgttattctttccgtggaatattctgaggaacatcagagaaatatctaagggacattctaggggacattccaagggacttcataattcaagttaggcattaccactgtaaattaatatctggtagatataaacaaaggtcttttatagtctttatattttatgaaatactaagatagacggctcttaactttcatcaaaaagattatctaaaaaaaaatcccagactcaattatcttctgataaaagaatccggggtttttaatgttatatagtattttatgtattaatgtttttaatagaaatcagagaagttatatccatctttatcattgccaaaatattcatccattaaattattattatcaaaaccacttgttgtaatgatatcattattattcatttctactaattccatttctgggcttttatattcttttctcatagtaaacctccctaattattattctgattttcttttgcaaactcatcaatcaagtcatgcaatccttcgtcaatatttggatatccttttttctgtattattgatgcaattccctgtattgattttgatgctgttcctgtatatccttcgcctgcaccatcttcagaataaactgtagtagcatccgcattttcatatggaatatttgcgtacgctctagcattaaagaatctagtatagttagctggtacaatattaattaatgatgcacagtatgtatcgtttgtttccttgtaccatcctgtattaactacgtcagcgcagaaattctttcctaaatcatccttctttgccaaatctaatgtagcaccctttaaaacatcatttacagtaattaatgttcctgcgttttcgcaaattacatttttaactttctgttcattagctctgcttgctgttgtagctgaaacttctgttttaaatctaattccacctggtttttcctgttcagcatctattctaatagctgctgcatttgcaagttttaatgatacatcactaattgctgtgaggtagatatcatcattaactgttatttcgctatttggtgcatatacttttccatcactataataaccgtatttcgcatctcccaattcatatgttgctccatctgctacagttgtttcagttgtaccattaagtacaactttgtgttctgctgtggcttcaccatatactgtaaattctgcaatttctgcccatgcatgattgtcatctgtatcagcattagctttatgatgaggaattcctgtcaacttaactctgatatatctatagtttttatttttaaatttgtcagaaatttttcctgtagcttcttttgtcatctgactgcctgaccacaataagtctgccttgtcccattgttcgtcactccagttttcagcggcttctcctccgcctctcacttcatatttatgaggtaaaccataaagcggattattgtttgcatcagcatcatctcttttttcgttaacagcatattcaaatgctatttcgaaactatcaattgactttaatcctcccaaatctaccttccaccaagaaccaagtttttcagtgtttccatctgctacccaaagtgaacttttgtttccatcattggcattagttgcaggcctattctcgcttgaaccttttgcagtttttcctaatgataagttgcttaactgatttccatatatacagatttcagctacagccggccaagccttttcaatcggctctgtaaattttaatcttatatatttgtatgttccctcttcaatatttgtgaactgttcaccatttgagcctgcattaacttcattagtactttgatcccaaatagtagtatattctgttccatctactgaaccttctactttatacttccatgctgaactttttgcatctcctgcgaaaaagattcctaatgcatttacttttgtcattttctttaattctacaacataattggctgttgttccttcacttgttacgtctccataactagcttctttgtcattccagccatttgcaatccatgatgtattcacatctccgtcaattacattacttcctacatttcccggattatatatactaactgaagattctgtaccttttgctatctggtctgatgtaagcgctgtagctctttcaccatatgctgcaaattctgtcattgccggccatggcttcatgtcagtcttagctccaacaatagttactttaacatacttataaatcttatttttataatcttttcctacaatgttttcaaaatgcttatccgtaactgtattttctgtctgatctactaccaaatcccaattgctattatctatagatgcttcaattttgtactgccatgctgtattcttctgagtagtttcatctttaaaccaaacgttaaagtctgatacattataataatctgctaatgtaaattctgcccaaacagaataattatgttttcccgaacctggaaatcctgcttggcttccattccatccatttgtatcccaaactgttgtaatgtcgccatctatcagtgaacgtgctgagccgtgctgctgtgatactacgaccccgtcttccctaagtatatttgttctacttgtcgtcactgtatctgccttaaccgttgccattggtgccggcactgttatgcttcctacaaccattgctgctgcaagcaccattgttaataatttcttatttttcataaaaaatactccttcctttgtttataattgttaattaatacaagtatacttgactagtttttatcatttaatagaatatttttacaaaactttagaaataatttacttttttctattattttagtataacttttcttttttttactcaaatatgttatactctatttataaataggaagagacagagacagtttctgtcattctgcggattttgagaggattatactaatgcttaaaaattttttacataagagaagaagtattactgcgcaaacatctatattaattacacttaccattgccgtggctttggttattagcgcgttgcttttttactataaaactgataaggagttgaccactcattatagagagcagatgtttcaggaaagtaatactacaatgaatgttttatctgacaatatcgacactatcgattctatatatagacttttggtttcaagcgataatatttatagttttatggcttcttcatctagaacgccttctgattatattgctgccgaaaaacagatgacttctcttcttattctcaataatctttgggaaaagagttatttggagtctgtttacgtttatactaattataataagcgattttatgtgtccaaaaacgataatatgataaaaagagaagaaaatgcagctgtttacagaaatttaacggaaccttcacctacgcttactttacacgctttagacggttctgatgatctttactttgttcgtacaatttataatttaagcagtggcgatgttttaggaactatgatcgttacacttaatcaaaaaagttgggttaatatgcttacacagaatatctcaaaaggctggcacattcttatgtataacaacagttttgaaactatttctgactataattatgatgttacctctaaggatagaattgaagcattaaagaaatctctggattactacaatgacaaagctctgcatcacgtaaaatttgaatctaaagattatctgaccttgtctaataatcttaaaaaaatagatatatctgctactattatggctcctcagaatcagattaagagacaggttaataatgttttaaattcttatattatagttatgtttattattattttcatagtactcttaatatctttcgccataagccgatatattacaaaacctgttggaactatgatacataatattaataagatttctcatggcaattattctgaaaaggtttcaggtcttgaagaatatgaggagttttatgctcttcaggttgccattaatgatatgcttgaccagattcacgcctaccacgacaacgtgttagaacagaacatttctcttaaaacagctgagattaaagctttacagtcacagcttaatccacactttatttttaatgttttgaacactttggcctggaaagcagaaatgtctgacaacagtgaactttcccagatggctattgctatcggtgagattttcaaagctacaactgcttacagaaattcacagtatatttcaattgctgaagagcttaaatttgttaagttttatatttatttacaacagatgcgtttcgaggacaagattagtgtaacttttgatattgataaggatttggacgatattaatattccttgtttttgtgttcaaacacttgtagaaaatgcttatgttcacggcttggaacctaaggataccaatggacatctgactattagcattaagaaagataacgaaaataaatttttattaataaatattattgacgacggagttggattcgaaaagattccaaagtttgatattaacgttgcttccaaaggaacaacttccgaggctgtaggttcacgtcctcacattgggcttaaaaaccttaacagacgacttttccttatgtatggagaagatgctgtattgcacatagaaagcattcctgaagttcgcacagctatatcttttaaaataccattataaattctttttgcaaatttaagaatttgaccaaagagttacttaagaaaggatgtttttttatgatttttaatttattaattgttgatgatgaagctcctatcagaaagggcttatctgaatatattaaatgggaagattatgattgtaaggttgttgccactgccaacaacggtgaggatgcaatcacaaaaataaacgaaaatgacattaacattgttttgactgatgttaaaatgccacttttagacggaattggtcttgcaaaatacattcacgagaatcgtcctgatattgccgtaattattttatcgggatattctgaatttgagtatgcacgttctgcaatacaatatcatgtttcacagtatttgttaaaaccggcatctaaagatcaggttattgctgctgttaaagaagtttgcgaaaaaattgtaacatctaagtctaatacccgaattaaagaaagtgagcttgcttttcttaaagatcagttattccaacaattaactgattccaatgttatagatgaagaaaagcaaaaaaagattgactcttttaatttggattttagtcatttttatgtagctgcttttcagttgcctaaagatttcaatgaatttagcaaacttaaagacattattaaagaccagcagattgaaagccattgttttagatataacaacatggttcttactgcatatttttgcgatcaaaattcctacataggacctattgttgaggattgcaaggagatagaatacttatttcaggaacagtacggaaaacagcttgatatcggcataagtgcccatcactctactgcaaagcatttttcaaaggctgcttcagaagccatcactgctttgtcacttaatttctattcagcatcacatataattgctttttcaagagattatattgctaatagaaatatttttcctgtggatatttccgtgcgtcttcacgaatacgaaacggctattcttcaattgaactttaaagctgcaaaagacgttatttctactcttttcagtaatttacaaagtaattttactgatgaggcttctgttaagaatatttgtactcagatttatttgatttcttatagactggttatgagtacttataacctgccaatggatgagaaatatgtgaaaatgttaactgaaagttctgatattttccaactaaaatccatagtttctgatatgattaatgatttgcagatacagttaacacaatcagttaagaaatatagctcttttattgaagagtctttgaattatataaaagaacatttagaggatgatttgtctctggaacaaattgcccaacatattcatattaatgaatcctactttagtagaacttttaagaaggaatgtggtaattctgtcattagctatattaataatcttagaattaacaaagctaaagaacttcttgccacttctaatttaaaaacttttgagatttctgaagctgttggaattcacgaccctgcttatttttccgtattatttaagaaaaatacaggcatgagtcctaaagcatacagagatcagtttgtaaatgtttagcttatatttaaattacagaatggagtttgcttatgagtaatattatggaagataaaaaaagctcaataagtaatattattgatgccttaactaaaattgaaaataatcatttaaattcaaacagaaataatgccatctattctatgcttaaagagattggattatacaccaaagccttatatgtcagcatctatgaacttgttgactctagtgcttttgagcttacacatcaatggagattatttaataatactgaaagtcctaatcacgacttaattcttccaactgatggagttccatgcatatttaatattctgtatcagggagaatccattattttagatgatatagaatctattaaggattctatgcctacagaatacaattttttttggaaataataacattactgctgttattgtatttccaattattttcagaaaaagattaatgggatttgtaagaatagataatcctaacattaaagattgtggtgatttcattgctattatccctgttatcggtcaccatatgggaagcattcgtgaaaacaataaaaaggacactcttattcaacagcataagctttccatgactgctaatcaaactgaatttgaaaaagacagacagtttcttgaggttttatatcgtgactatacatctatatattatgttgatttttctaaaaatattgcggagcctcttaaaatagatcgtatagcaaatgcagccaaatttatagatagtccctctaaacatattacacttaactataatgacactataaaacaatatagcgaaacttatataaccaaagagcattctaagcgtttttgcgacttgctaaatgctgattatttaagacaggaactttgctacaaagaacgtttttcttttagatacagaagccttcctaatattcttggacagcaatatttcgaggcgcagattgttcgtatttccgaaactgattttgacaatcgtattcttatcggctttatacacattgacgatattgttgcaagcgaacaaaaaagtcaacacgaacttgaaacagctctagccgaaacaaaacttagtaacgaaatcgtatctgcccttggcaaaatttattatgctatttttagaattgatcttgtcaatgatttctatgaggaaatttccagtgaaagtgaaattcatcaccttacaggaaaaatagggcgtgcctcaaccgaaatgattgaattgtgtgatacatttgttgcacctgaatatcatgataaggttcttgaattctttgatttaagcactttggctgatcgtttacatgatgaggaaactcttgcaactgaatatcttgcaaaagatggtaactggcacacagcacgttttattgtaaaaaaacgtgataacaatggaaatgttacccatattctttatgctacaagacttataagcgatgctaaacgacgtgaaaaaaattggatttccattgctgaggaagctaacaaggctaatctggccaaaacagaatttatttctcagattgcccacgacatccttacaccaatgaacgctattcttggttttgaaacgttagctgaacaacatataaatgaacctaaaactgtagaatataatctgaaaaaaataaaatcttcaggtgattttcttatggagttggttaacgaagtgctggatattacacagattgaaaacggacagttacgcattaattcccaacctgttaatattcctaagcttttggatgattttccaccaatgcttaaacaattacagggtgacaaaaaacttaacattatatgcaatcagcatgacctttaccagaaaaccttgttggttgacccacttagactaaaacagatttatacaaatattttatccaatgccataaaatatacacctgatggtggttctgttacctttgaaatttatgaagaattatttttgaataataagtatataaatcttatagctgttataagcgacacaggaattggtatgtctcaggaatatattaaccatatgtattctaagttttcccgtgccactgactctagaattaacaaagttggtggttatggccttgggctttcgattgttaaagagcttgtggacttaatgaacggacgaattaatgttacaagtaaagaaggtcatggaaccacttttaaaataataattcctcttgaatgttgtgcagaaaactataaagctctacaagatatttcagatacttccgctcataatacttgtaaaggtatgcaccttcttgttgctgaagacaatactcttaattatgaagttatttctgaacttcttgctatgtatggcattacctgcgaccatgccgaagatggatctgtttgcgtagaaatgtttagagaatcaagtattcatacttatgatgccattcttatggatatgcagatgcctgttatggacggacttcaggctacaagtgccattagaaatcttaacaaaccgggagctcacagcattccaattattgccatgactgctaatgccttcaaagacgatattcaacgttgtcttgatgccggcatgaatatgcatatgtccaaacctgttaatatggaaaagcttttaaaagcacttgccaagtttaagggggaagtaattgtagattgttaattggcaatagttagatgtacttaaaactcttattttaggatttgttttttgcaattacatatgtttaattgcgatgcaattgtttatatgatagtattaaactgacaaaattagaaaggatttatgttatgaaaaaatttctgtgtttaatactctcttttttattaattataacttctgtgacagtttcacctgcaaaggttaaagctacgtcagagaattacacagacgattatgtctttggagaaaaagattttttcagtgcaagtgatacagctaatgataaggatatgacttttactgctactgaagacggcttgtattctgtaagaataaagactatagaaggttttaataatctgagtattgccaaagatcctgacggcaatgagattgaaccttacgcaagagactatcgtattggagacagaacccgaatagattattatcagcttaaaaagggacaggttttcacgattaagtttatgcttcatgctaattcaagcgccttgattattgccgatattgttagggaaataagcaaagatgatgagtttaactttaccggcgaatatgatgtttcttattattataatccatcaaaagattatcactactataagttaggctgccttatggatactgatgacaatggcaataatgtacttaatgccagagtcagatattttcagaatgaaaacaatgataaactggattatttaaatgttcctgatgtttatatgaacaatgttctttcatcaatgcgccctaatagtagtactctttgtattattaatttttattcccatggcacaagctattcttcaaaggatgcttcaactgcccaatccaaaattaagtttattagaatggaaaattctagtggtattgatataaatcagcctgatgagccatttaatcttattgaaaatcagaacggagagatggttactaatgagtttggtcactcttattttaagtatgcctattcttatttgagttttataaaatcttatactattcattactctaataaagatatggaatttcctgccaactcccatcctactactgagaagaatccttacagtccttataccggttattatttgacccctgtagactctcaggatacaaatcactgggccgttggaagtgacaatactttccttattcgggcaggttattatgaagaaaaaattcctgtaactattaaaacttatgatcagcttgaccgttttatgttttttggagatacaacccttaagcttaagcctaatgcgcctttaagacgttctttaagttttactccacctgaggacggaccatatactttgtttgtaactgtggatagccactctgattcctgtaatgatactatagcttttaatactactgatcattcccttaaccgtgactttcctgatcaaacaacaaaacttgccaatggcaagactttgtatgagtatagaaatctggctcttgaaaagggtacaaaatatacttttgactgttatttaattcatagtgacagtgaagcatctgatgaaactgttaatatgacttttaattttaagaaccctgccattattagttcttttagtttgaaccaaacaggacttgatcctgtgcttgtggatgggattgacaatatttcaggttcttataaatattcactaccggattatgttaacagcgttgatataacctacaccgatggaactgttgttaaatatacatacgatgaggcttccggttcatatacaacagatgcccctgccaaatatacagtatatcctcttacaatcgagaatccgaacgactggtcatcaggttataattctgtatattttaatattgatggcaaaagcaaatctctaacattcactgtttatgacaatgagcgttttgaatataatcttaacacaattgggttaaacgaaacaaatacagttcgtttttatagagatgatgctaaaagctactataaattttatagatttacacctgaaacaagtggcacttataatttaaaaatgagcgcaacaccacacgataataagtgccgaatttcaacatattataatgtttatcataatggcgaattggtttcaacaaactacaatacagaaaatatttccccatgtatttttaaagctggcgaggagtatattatcaaattctttggcattcacaagaattgtgataaaacagataattcaaaccttaacactctggaaccacaaattacgataattaaggtgtcagatgatgttgaaacaagtaaggtgacaacggttcctgcaacaacaattcctgtaactactactacgatagctactactgctgaaatttccacaaccggaaatggagaaacaagtagtgaagtagttacaactcctgtgaagactactgacaatatagaaactactggcgaaactgctactcctgtagttactacgactaacggagattctattaacgtaggaactactagtaacaatacaactaatggggttgtgccaaaacctagtactacaagtacaagcttaaaagcttcaagttcaaagaagcctgctactacaaaagttaagaaagtcaaggctacgaagaaatctcttaccattaaatggagcaaagtaaaaggtgcaagtggctatgaaattcaggttgccacagacaagaaatttaaaaagaacaagaaatcaattcttgttaagaagcagaaaactacttctgctaaaataaagaaattgaaatctaaaaagaaatactatgtacgtgtccgcacttataaagtagttggcagaaaaaaagtatattctagctggataaacggaaaagctacaaagacaaaataaagatttgtagtggaagtgatagattgatgattgatttgtaatgttatgacaagaccgtatgtgaaatcaaattcacatacggccttttttgttttaatcccaattttcatgtatttttttcttttcttattcactttataagataatattatcacattttatgttttatcttgtttttctatttatatatttggccttgtattttgagtatacaattgtctggtctttgtacaggctgtagtatcctgacagggcatagctgattgatattgctatcaggtaatatgagaccccggcaaagccaaacaactcgaatgagataagcattgatgttattgggcagttagttacaccacagaacaatgccaccattcccgctgccgctgcaaccaccggtggaaatcccagcaattgtcccataacacatccgaaggttgctcccacgcagaatgcaggaacgatttcgccccctctaaaacctgctcgcattgtaattgccgtcaaaattattttccaaacaaaatcaaggggtcttgcccttcctgtttcaatggctttggctattagctgattgcctgcgcccatataatcatctgtctgtaaaataaaggtaattcccataacaataagtgccgcaacaaccactcttacgtaaggatttttcaaatatttagtatacaaagttgaagctaactttagtgctatgcaaaaaagtatacttacagcaccacaacctgctgcaataactgccatttttgctccggttacagcggttagttccggtataactgttacatgaaaaacttcaggatggatgcctattcctgccgcaaatttggctgcaataattgacgcaataacgcaaggcaaaagcgccgcataatacataactccaacgcttacaacttccatggcaaaaactgccgccgccataggagttccgaaaaccgcagcaaacgccgcactcataccacacataaccataacgtggtggtcgaactcatccaaatgaaaaattctcccaagctgattgccaatgcttccgccaaactgaattgccgcaccttcacgtcctgcggaaccacctgtcagatgagtaagcactgttgacacaaaaataagtggtgccgattttaaaggcacatcatccttagatctaatggttgaaagaacctgattggttcctccatcatttttgtccaatctttggtacataaaaacaataatcaaacctgccactggaagtaacaaaaacatccacttattgtctgctctaaacgccgttacccacctgatacatatggcaaaaacactactggcgccgccaacaaccacacctgttaaaattgcaagagccatccacttaaaaaagtttgtcaaatctcttttaatcctacccaaataatatttatttttaatctcattatgtccgttttttatgatatcactcatactgattctacttttcttccaccggatagaaactgcatccgcactttccatgttccttagtataataaagggctttgtctgcatcagtgaactggctctttcctggattttttctgtcagtaaatgccacgcctacgctaagagataccgctggaactccctcttcttcaattgataattttctgttaatttcggtgattttttcaatgcttgtcagaccaacatattctctaactctctctatacttttcccctgtcattgcctcatagcttgttctcaccgcatgttctgatatatcgcaattcaatatataaacaggcactttttttatcaaaatatctagtaattccaatgtttttcctgcctgggctgagctgtcgccgaaatgaatctgccctagaagatatggtattgcttctttggaatcaagctttctaattccgcattccgtgccacgctctattatgcaaattccaccaagcggtgcattcttattattctgccagccctctttgccagcccacggagttccatatattcttacgcaatcgtcaactattctaataaaaggtttgtccccatttataatagaaacaccctgacctaaatacttcctccataacctgatgtgggtagtttttccggtaccacttggtgcagtaaacatataggctttgtccttccactgtataaccgctccatgcattaggaaaccgtctttctcaggcaaaacttccgcaactttccttaaaagtgccaatgtttccaaatattcaggggcaaatccactctgtccttcatcttccaacattgttccctgttctcttattatgtcatcctctgatataataatttcatagaccgaatcattatcagaaagcttcaaatcttcttttccagctacacaattatcgaaacacttcttattatctgaattttcttcaatatccaaataatccccacaatgcttcttcaatgattcctcataaattccatttacctgaaatccgattccggcaagttttattttgaatgccataatcttttcacctttccagccttcatttttattttcttaaaagcacaaattaaaggatgaagaaaaacccaagccctgctgtaaagcttgtatcccactccctccatatttacttcatttccatcacgataaaagccaactaaaactccaataatctgattttcagttatgccatattccttattaatgcaattatctccgcaaataatatatcccctatcatcttttccaataattctatgaagcacataatcgtctccacgtctgtataaaggcacatcatatttcttcaatggtgctgtaggtggcttaactattatggtatcccttctgtttcttagcattggatacatgctgacaccagaagttgtactaacatacactcccttctcatttaatgcatcctcaatatgtaacacttcacccataacacactctctattctacaataattcctgcatttttcatcttatctaccattgcctgaatgtcttctcttgctttatcaggttcaacttcataagtttcaaccatcttctctaccatctggtcaacatccaatccagattcaattccttgccatatctccttacctgttgcattaaggttaatcattccgtgaaatgtcttgcttgcctcacctactgcaataacaactgcctgacctccaacatctcttaaaacaaaaccatttttaatcttcattaatctattcctccgatatctttcgcttatataagtgtaccatattaccgcaatatttgcattgcgaaattccactccgacaattttttagaaaatttgttctataataattttgtatttttttaatgtatttaaaaaagcgtcccccaaattcatcgcatttttgcacgcttgttaaggaacactttttattctttattttgtttgatttaaacccagcccaaaagtcttaattaagccttattctgtgcatcaacaagatttgaactgtgatacatttctctaagcttaggtttttcgatttttccagtggcatttcttggaactttagtaaagataatctttttaggtctcttgtatcttggaagttccttgcagaaatcattgatttcctgttcagtacattctgtgtcaggattcaattcaataatagcagctgcaatttcgcccaatctttcatctgcaagaccaataactgcaacatccttaatcttagggaatttgcttaagaagttttcaatctgtacaggataaagattttcgccaccactaataattacatctttctttctatcaacaaggtaaataaaaccgtcttcatccatttcagccatgtcccctgtgtaaagccagccatccttgattgtttcagctgtagccttttcatcattgtagtaacaagtcatgacgcctggtcccttaacaataagttccccaacactaccctgctctacaggatttccctcaggatcaacaatctttgcttcccagccgtaacccggaataccaattgctcctactttgttaatattttcgacgcctaaatgaacgcaacctggtccgatagattcgctaagaccatagttagtatcatattggtgatgtgggaagtattccttccatctcttaataaggctctgtggtacaggctgtgcaccaatgtgcataagtctccactgatctaacttgtaatcttcaagtttaacctctcctctgtctaatgcaagcaaaatatcctgtgcccaaggaacaagaagccaaacaattgtacagccttcatttgatactgtttcaagaattgttttaggtgtaaccccctttaataatactgcttttccaccagtcaaaaggctgccaaaccaatgcatcttggcacctgtatgataaagcggtggaatgcacaaaaatacatcatccttagtctgtccatgatgattctgttcaacttttgccgcatgcataagactttcgtgattatgtaaaatagcctttgggaaacctgttgttcctgaagaaaaataaattgccgcatcatctgaatccttaattccgatttcaggtgaaagtgaagaacagttagatgcaagcttatcataatcttctgcaaaagtaggacaatcaccacctacgtagaacaaaattcttttttcatcaatttcatcaacaatttcttcgattcggccaacaaactcaggtccaaaaataagcacatctgtctctgaaagttcaaggcaatatttaatttcctgagcatcaaatctaaagttcataggaactgccaaagctcctgttttaagaattccaaaataaataggaagccattctaagcagttcatcaaaagaattgcaactttatctccttttctaatgcctctgctaataaggagattagcaactctgttagctttctcgttaaatacgtgccatgtaatatcacgtctgtaatgatggcgggcatcaggctggattaattcataatctcgccatgttacccttcttttttcctgaatatcaggatttatttctaccaaagctatatcctttggaaattctctggcgtttctctctaataattctgtaattggcatttctctttccttcttttttatcttattttaatttattatccaaagaaattaaacaaatcattggcattcttcccaaagatcttgtctttttcttcctgtgtcaaatctgtattgttaaaatcattaacagctttggtctggtcataccacggagaatcagttccaaacaaaatcctgtccgctccatgttttctaaccattctcacaaactgttcattttcaagcttacccggaaaaataggattaagaacaaccgccgtgtccaaataaaatggcagtcctaaaagcttctcttccacttcatcccacattttccatccacccatatgagcaagaatcagcttctccggctgaatatgtttccaaagattaagaattctttcaggtgtgcagtgaaccgtttccggaagtcccacatcttccccagcgtgaacaattatccccaaatctttctcggctgcataatccattaacctgatatatttttcatcgtcaaaaaatgtattttgatagtcaggatgaatctttatggctttcaaatccattgcaactatttcatctataatctgcttataattctcacaatccggatgaatagccccaaaattaaataatcttgtttcttctcttttctcgttaaattccacagataatctgttaattttctccggttgcctaatattagttgccacagggcaaacaacagacaaatctatatctgcttttttagtactgtcctctaaacctttaactgttggtattcttgcacattttacatgaataccctgacctcttacaatatcttcttccatacttgctatagtcttgtaagctatggcatcaggaaatgtatgtgtgtgaatatctataatcataacattctcctatatgaatcttattctttattactttttcactttaaagtcataaactattataaataactattaccttaaagtcaaccaaacctttttattactaaattggaatctacacctgatgaacatcacattctcacgaaatgcttatggatataggaattttgataattttagaaacagaataatgttatcttgtgatactatttaaaaatcgtgtgtgattacaaatcacacacgatatatataagggattacccccatgcttgacaaaaagccttatttttttactaacatatataccaaaatcaggctgtttgcatatatagtccacgcaaacagcctttgaattgtttaattattatgaattttaactttaatttctgttaatgtcaaatacttcccatgctccggcaacagtttcacttgtagcaaaaagtttaccaccgtcgtttaagtttgcctgaacatattttccatttgccaatgagtaaagtgcatactctccatctgaaatcttttcaataatgaatttctcccatgtacctacactttcacttcttggcaataactgattgttttcatcaattacagcacatacatattttccatttgcaattgatttcaatgaaactgttccatcattgttatttacaatctggaatgtttcccatgcacctccacatgatgaacggtttgccactattgtttcacttccaccattttctgcacaaactacctgtccgtttgctatggatgtaatatatgcatttgaattattaaaatctgtcttttctactttttcaattacgatcgctgaagttttatcattaaaatctccaaggcctgatgcatctgtgaataatgtttttttacttcctgcaaatctttcatcgttatacaatgtaactttgtagccatctgctaccttaactgaagaaatctgatcatttttaattcccttagaaatcattgtgccataatcatatcttccttcacttaatgctacagaccaaccactgtaatttgaattttcataaaatgttgcttttgcagaagatatctcatctcccaacttttcaatattaaatgcttcccaagctcctgctatggaatcacttcctgctattaatttgcctccattatccaagtcggcctttacatattttccgttttctgcactcttaagaccgtattctgtatcgcttattttgtagatttggaatttctcccatgttcctacgctttcgcttcttggaacaagttgattttcttcatctaatactgcacatacatatttgttatttgcatctgcttttaaacttactgttccgtcatcattatttatcagataaaatgtttcccatgaaccgccgtaactgtctctgtttgctactattggatcacttccaccattttctgctacaacatatttttcatttgcaacagatttgatactgtattttccatttgataatttaacagtattatatgtaacacttgatgaaccatcccacttttcaattttatcatttgttgttgtattaccgactttttcaatgttaaaagcttcccaggctccagctattgaatcacttccaactattaatttgcctccgttatccaagtcagcttttacatattttccgttttctgcacttctaatgccgtattcactgtcatttattttgtaaatcttaaatttttcccatgtactaatgctgtcacttctaggtgtcagctgattttcttcgtctaatactgcacatatgtatttattatttgcatctgcttttatacttactgttccatcatcattattaacaatatagaatgtctcccatgaaccgctatagttgtctctgtttgctactatcggatcacttccaccattttctgctgcaacatatttttcatttacaacagatttgatgctgtattttccatttggcaatttgactgtgttatatgatgttgtagttgatgtctgattgttaatcttttcaattttaattgatgaagttttgtcattcatttcatctccaacatatgacgcatcactggtaaattcttttgattttcctttaaatccttcgtcatcatatattgtaactttgtatccgtcacttactctaagtgatgaaatctgatcattaacaattccttttgctaaaatatctttgtagtcatatgaaccttcttccaatgaaactgcccatccaccataatttgaatgttcatataatgttgccacacctgatgtgctgttgttatcactatcatctgttgtgcttccacctgtagatgttactgttcccgaaagatatggctttaccaaattgtaaatcttgtcatttttccatccgtttgctgtacctacagctgaccatttatttttaattgtgtcagctgagtcgttataaatatcaactttttcagggttgtgattataaataccccatgagctgtttcctgtaactttgtatgaccatgttgtccaatgccatccctgaccgttaaaagttgacattgctgccttccaaccttcttcctgttcgaagcatgtaaactcacctacaaatgttggcactccataattgtgatttgcaatgtctgatactttacctgaaaagtatgacttctgtgcatcactgctattttgtgcattccatggatagtaatggtattcatacgctacatttttccagccatactgtgaaggtcttggcaaattgtctgcatcccaacatgattccattataataatatgattgctatcctttgaacggattgtattgtaaatttcattataaaaatcccaatgtaaactatatgttgcagctgccttaattcccggttcatttaagatatcgtaagctgcaactgccggattgcctttgaaatgttctgcaatctttttccataaatttaaagttttatctttattgctctgattgtaatatagctgttttccatcattaatctctcctgaatggtccataccattttgagaaccaaatgctccgtgcatgtctaaaattacatacatacctctctggctacagttttgtacaaaccaatctaatctgtcaaaagcattagatttaaggtttccattgtcatcacaaagattcatatatgtaaatggtaatcttataacactcattcccatttctgcacaattatcaaaatcctgtgttgtccaataattattttcatatgttgaaaccaactcatctctctttgatgctccaaatctatttgccaatgtggtcatcattgttttctggtcagatgcattggttggattcatccagtcttcctgaacaagccatccacctgcatttgtacctcttagataaacaatatctcctgttcctttttgttttcttatctgtgttccgttaaccttcaaaaaatcattgcttccaagagcctctctggcactaacctgagtaatgcctgtaatttttcctgaaatagccacactaaatgtcattgcaaataccaataacatactgaccagttttttaatttttttcataaacgcctccttattaatactataaaaaaaatttccatctattatattatcaatataataccacataatgttaacggtatcaattctccaaattttagaaaaatcgttttatttttttctaaaaaaaaataaaacgatttttatgataatggtatgttgtttatacattttctaaaaaatgtataaataaaaaatatccctatacctgacaaagaacattataaacttgggttacccacatgcttgacaaagagccgtaaaaaatcccgaaaagcttcagaactattaacattctttccactttccgggatttttattatcctatattttaattttattatcttatgctaattcataacccttttcaaaggctgccacgttaatatcaatagtctttggtggaactgttttcttgattacttcaatccactgttcctttgggaaatccatattctttgcagcaattccaagaataataacgttaaatactcttgaattgcccatctttatggcttcatccattgcatcaactgatacaacacggtatttctttgaaagtttttcaataattccgtcaggatattttgccacacctgtaactacaggcattgggtcgattctctggtcatttacaataattactccatctttcttaagaaaatgagcatatcttaacgcttctaatctttcaaaagcgataagtacatctgcctgaccttcttctactataggttctgctactttttcgccataacgtacataagtaacaacgctaccgccacgctgtgccattccatgaacttctgagagcttaacatcatatccggcttcaactgtaattccacctaaaatacggcttgtaagaagtgttccctgtccaccgacacctactatcataatattctttgtttctgccatgactattctcccttcttctttaattctattgcatcgaaatgacaattctgcatacaaagtccacaaccattacataatgtctggtcaattgaaatagttccatcttcattctttgtaattgcaggacatcctgaagcaagacaaagtccgcattttttacatttttcaggaattgcaacgcatttaccctttgggacatatgacttaagcaatgcacaaggagactgagctataataactgatacttcatctcttgctacttcttctttaataacattttctaacttctttgtatcaaaagcatcaacaatctgtacattcttaacacctaaagctctacataaatcatcaagaagaactatattggctttttcacctgacaatgtttttcctgttgcaggatgatcctgatgtcctgtcatacctgttgttgaattatcaagaataataactgttcctgtagccttgttataaaccatgttcataagtgaattaacacctgtgtgaaggaatgttgaatcacctataacagctacccaattcttaatgtaatcttttcctttagccttttccataccgtgaagtgtagaaatacttgaacccatacaaactgtcgtatctacaacacctagtggattaactgcaccaagtgtataacatccaatgtcacctgctgcatgaatttttaacttcttaagtacagaatatgtagctctgtgaggacatcctggacaaagaataggtggtcttgcaggagcctgtaaaggctgttcaatttcaaccttttcacctaaaactacctgtttaagcatattagcactatattcgccctgtacagtaaagatgttctttccatcgcattcaatacccatagctctaacctgttcttcaattacaggttcaagctcttcaactataataagtctgtctacctttgaagcaaattcctttataagtccctttgccaaaggatgaaccaaaccaagttttaaaactgatgcattaggaagtgcttccttaacatactgataaggtataccacttgtaataacaccaatctttgtatcattatattcaactttattaatatcaaggtcacatgcatcttctgccatctgtttaagacgctgttcaacaataacatgacgtttaattgcatttcccggcatcataacgttttttgcaatatttctttcatatggcttgtcatctacctcaactctatcttcaagattaacaatcccctgtgaatgtgcaagacgtgtagttgttctaagaataaccggtgtatcatatttttcagataattcataagccctctttgtaaaatatcttgcttcttcactatcagaaggttcaactaccggaaccattgcagctcttgcaatcattctggtatcctgttcattctgtgaactgtaaattccagggtcatctgcaacaaccaaaaccataccaccgtttacaccaatgtatcctgctgtaaaaagtggatcagatgctacgttaagacctaccattttcatcattgtcatagaacgaacacctgccatggatgcaccaatggcaacttctgtggcaaccttttcattaggtgcccattcagcataaatttctttatattttactacgttttcacttacttcagtacttggagtaccagggtatgctgatgtaacctttactcccgcttcataagctcctcttgcaatggcttcattaccaagcataatcttcttattactcaaaacttcttcctgcctctcttatatatttcacagtaaaaaacagtagtatcaccattatatttaactttttgtgatacgggcaatgtttaatttactgaattaaagtcctaaaattaattatagtttattgaagctttttagtcaacaaaagagagccaccatacaatactaattgtacgatgactctcaacgttttttctaaaaatacatataaaaaagtgctagtaaaaattatttcttaattttgcccttgaatcctgccttctttaagttcttctttaatttcttaaattctttagcgctcatcttcttgttaaccttaactgtaatcttctttgagttaacgttcttaaatgcacccttctttactgtaaagctctttgttcctttaacaataattgtctttaatttcttagtacctgtaaaaccttttttgtttactttcttaattgttgctggaattacaatctttttagcctttttagccttcttagcaaatgctttagccttgattactgttactgtataagttacacccttaactgttaccttactaggtactgtagctgtactcttcttagctacaacagcaccaacttcagctgttccgttagcctttgtatcaactgtatttccgtttgatacagcaacattcttagcgttaactggtactaatgatgatgttgggctcttaactgctgcgcttacacctgttacagatcctactgctactgctgctgctaatgctaaaacagcaacgttcttcattaattttttcattaataagttcctcctattatttttttgagttttaattatttctgcttatccccacaagtattaaaaataaaaatgtcctcatagcaaacttataacttataaaactcactatgccgtttattttactacttttaggaataaatttaaatactttttttgttatattttgcttttttgactatatttgacaaaatatgtcaatgataattatatactattacttgccattgtagtatttcttcttatttttcttgccttttgcgtctgttgcgcggtttagaaccacacctaatatcttacattctgatctttcaagctgcttaattgaacttttcacttcagattttgatatttctccacttctaattacaagaattgctccatcacacatactaccaatcttttcagcatctgatacaagaccaagaggtggtgcatcaacaaatacatatcggtaatcttccgcaagttgattgagcatattgccaaacttgtcactttcaagcaacattgatggattaattatattttccacgtttggtataatatctccattttcaagtggtgtattatacacaacattttcaagtggaaattcttctgccaaataatgtgcaagccctttcatttctgagccatcttctttttctatgccatatttgtttactatgacagagtttctcatatctccatctacaaataccgatttgattccggcacttgccatctgtctccacatctgtaaagtaacaaaactctttccttcattaggcattgtacttacaaccatgatttttttaatttcatttccaaggaaactaacatttatacgaagtcggtttatagattcctcaacagcataaggaagttctttggttaaatccattttaattttattcatttctatttctcctcaagcttatttttttggtgtgtaatatttctttcccttataataattgtatttagaatatgctccgtatttaacgtttccatcaggaataactgttaaaggaataatgcctaaatacttttcaacatcttcttctgtcttaattgtatcatcagtgataaataagaatgtgaagatagctaataccacaaccattcctccaaatgcacccatcattacatttttcttcagactaggtgaacttttacctttaggagttatagctctttcagcaatattaggtgacgatgttcccattaatttaggaatttcagtaactgccttttcagctaaagcatttgctattgtttttgcttcctccggctttatgcttgttgctgaaatttttaggatacgtgtatcttcaactgttgaaatgtcaatcattccgttaagttgctcatatgtatatcctaaatcgttttcctcatttatggcctcaatgataggtctaacatgcaacaactctgcataatcttctgataatgatgtacctatacttaaatcagcaagatcgaccactgagttttttgatgctgaaaccatataaactttcgctgttgcagtatatttaggtgtaatgccaactttagtccatacacctgcaattattgctccaatcaaaaaacctgcaataataaataaaatcttcttgcgataatagttaaacaaatccaaaaggttgatttctacttcatcttctttttcgttaatttttatcttttctacctgttgtttcatctttcaattcctttactctttgttcttctgttccactatgccaaacagttctgacattgtgctaaccattgctttcttgttaacataaaattccatatgatccatttcatctccaagagcctgaccaatcttagactttcctgccaattcaaaaatccccttgtctgttccactagcaaaaatattactaatattagaaatctttcctatagcaatatctgttgtggaaacatcctgcaaactttcaaaaacttcattggcataatttggattagccttaaccttctcctgaagttttttaaaaaaccctgtcatgtactgttgttgtcttttcattcgtgatgtattctcttcatccccaactccataacggtcatgaacgtatgcataagcctgctcatcatcaaggtttattgtagctcccttcttcatttttggatatttctttgagaaatcatcctccaatgttacggtaactccatctaccatgctgttaagtttaggtatttcactcatgttaagttcataataaccatcaatctgaatacctcctaacaatttctttacagatttaactgtattttcgcagctttgctctctgttgcctccataccaatgagctgtacacaactgaatattagctgttgcctcaccctcaccattatgatcaatcaatgcaacctctgtcatggtgtctctgttaaactgaagaaaactatatgtattctctgtcttgtctacaattacaagcataaggaaatcagccatacttccctggtaatctgctccgttcttgttatttcccgtagcatctgttcctattaacagataattctcaaaatcatggtaatattcgtatttatttccattaagtttaatctttcctcttggaacctgaatcttccaatcatttattgaactctcatcagatacattagccttctctgtcttattatcaacatactgtaatccatagcctaaaactgctataaacagtataaaagctactacttccacggcaatttttatgtatttttttcttttcttcttcactttacttatcccctaatcattatttttcaagtatctccacggacactttttctatttcatctacagcattctgtccgattttctctctgataaaggaataacccatatcaaggttaggctttcttctatcagtattatggcagtcacttccaagtacaaccggtctgttttcttcaaccagcttctttataagttttcttttctttctaccatcaaaaaattctgcattaacctgaaatataaccggcaaatcaagaacttctttccaaatcttctttcttttctggtaagcataaaatctttctatatgtgcgagcataactgaaacattctgtttctccattagctcttcaacatcccgtaaaacctcttcatcccactgtctaaagggtaattccaccataataaccctggttccctctatacataatttttcaatctctctagctctcccgattcctctgaaatagcatacttcagctcccaatcttatgtcagggcagtcagaattatccatacaccgtttcaatgtgtcataggctttcttcctcttttcgagaaaatgatccactgaaacatcttgagcataaaaatgtggcgtagccaacatcgtactaactccttgattttttgctgtatgaagcatctctaacgattcctctacgcaatcgcttccatcatctattccgggcaatacatgtgaatgaaaatcaatcattctgcctccttttatatcaaaaaccaagtaatccatacactttcgtaaaatcaacaccccaagtactgaccatacttttatctatgatataaaaaaaaaggataactgtcaatcttatagccccttttgttcgtttttttattccatttttttccttaaaaaacggcactctgacaggttatgtcattggtgttactgacagttttgttataaaaaacgtatttattaattttcgcaaaaaagctgtcggattgctccaacagctttttataatattttttcatactattctgttactgacagttttatgcctaatcttccaacgattctttcaccggcacttctaccattgcctcgtagcactggaacatattgtcaatttcttctttactttgtttctttgtaatcaaacttattacaggaactataataagtccgcctaccattgcaactacacctgaattaattgatgatttgaatatgtagccaaaaacggttccccagcctgtaacatctattccgcaaagtgaaacaataagctgcaacacggcaactgcacatccccagacaaagcagacaaccgtagccgcctttgttacgcctttccagtataatccatacaagaatggtgcaaggaatgcccctgccaaagctccccatgaaacacccatcatctgagctataaatgtaacttcaggatgagaatccttaaatattgcaataactgctgaaacaactataaagaatactataaaaattctcataataacaacctgtttcatttcattcattttcttttttgagaccggcacaattacgtctaatgtaaaagttgagcttgatgtaagtaccaatgatgaaagtgttgacattgatgctgacaaaaccaaaacaataacaattgcaataattattgccggtaaagtagacaacattgttggaataattgtgtcaaacaatggcttgcctgttgcttcattaatggcaattttatcactgtataatctgccaaatccaccaaggaagtagcatccaccggctacgattattgcaaaaactgttgaaataacagttcctttatgaatgtctttttcactcttaattgcgtaaaattttccaaccatctgtggaagtccccatgttccaagagatgttaaaattactacaaataataatgccaatggatcaggaccaagaaatgaagtaaacgctccaccggcccagccttcacttggtactgctgacaatttctgagtggctttaagcaaaccaccattatccattaaaactgcaccaataactgcgcaaattccgaaaagcattataattccctgaataaagtcgtttattgcagtagccatataaccaccgaaaattacgtaaaatcctgtcaaaatcgccattactaaaataacaacccaatatgggatatcaaaaacaagtccaaataaacttgaaagtccgttatataatgatgctgtgtatggtatcaaaaatataaatacaataactgatgcagcaacctttaatggtactgaattaaatctttttccaaaaaaatccggcatggtcttagcatcaagatactgcgtcataattcttgttcttcttccaagaacgttccatgcaagcaatgaaccaataaatgcattaccaagtcctgcccatgttgatgccaacccaaaattccatccaaactgtcctgcgtatcctacaaagataactgctgaaaagtaagatgttccaaaggcaaaagctgtaagccacggacctgctgaacgtccacccaaaacaaatccactaacattggttgcgtgctttcttgaataaaaacctactccaatcattaccacaaaaaaggcaaccaacataattccgcaaagtatttctgtcataatctcctccttattaaccttgcatctgtgtattttatctccactgttcaaccttatctcttctttaagacttaatgcaaaattaatttttattattcgttgctttaaaccgttacgctttaaagcattaaagcaattatataaaataaaaaagagcctgtcaataactcttttctatttttacaaaccttatttactatagtttattctaattctgtgaatcttatttgctatagtttattctaattctgtaaatcttatttgctataatctgcttcaattccatgaatcatgtcaactcttgcctgatgtcttccaccttcaaactctgctccaaaaaattcatcaagaatcatttttgcaagttctactccaacaactcttgcaccaaaagcaataatattagcattgttatgctgctttgtaagttttgccgaataaggttcgctgcaaactgctgcaattacacctggaaccttatttgctgcaacagaaatgccgattccggttccacacataagtacaccgtaatctacatcttttcttacaactgcttcaccaacttcacgacccttgtttggataatcgcacttaataatttctccgttttcatcatagcctgtgccataatcaacacattcgtagcccttttctgtcatatattcaataagttcattctttaagtcaattgctgcatggtcgcatccaaatccaatcttcattataaatccctctcatttcttaaaactatttactatatattccgtcatctatctgacttttactatttactgtacattccgtcatctatctgacttttaccatttgctgtacattccgtcatctatttgacttttacattctactcaatatgtataagactgtcaaatgtacaagggatttggctatttctcatttcattgtggcattttgttcgtctatatacagtatgctgtgtggtctgttttatgatttgatggaatgtaccccaaaaatcgaaattttttaattttttgtggtacgttttcaagttatgtaaactaatcatgtcacatattcttgttttaatcatatatttgttgcatattgtttgacatttttatagttatgtcaaccaatatatcacttaaactgctttcaattcattttgtgtaccccaaaaattatacattaacttctctctcctatacgaaaaaagctatgacgcttttgcatcatagcttcccactttaatatgtaatgccggcgaccggaatcgaaccggtactgtgttgccacaacaggattttaagtcctgcgcgtctgccagttccgccacgccggcatgttaataataatgggcagagaaggattcgaaccttcgaaggcagtgccagcagatttacagtctgtcccctttggccactcgggaatctgcccattgctttaacaatatatacttataccatataaatgcttaaagtgcaaacgtttttgtgatttttataagattttttgcaatattttttattttcatctacttatttagataacaaatttttattttttagaaaattaacacctattacagctacgtaatataattgtggtattatttagttagttcgcattaaaatattttaaacctacttatgatatattactgagctattagcttttacggttactgttacaacatcgttttcctgaaccacttttactctgccacagttatagaactctcttgatgtttcaattaatcgttcaaagctttcaccatcttccacacctaatgtccaagttggaattaaaactgttttgtctgtatctgatgtattaattgccacaaaagctgcattgtccatatcaaaacgtccatagcacagcaaatctctctgctcaactaatggcttgtaagaacctgttttaaaaactttgtgctgtctgtgaattgcaattgtctcacggtaaaattccaaaatttcaaagttttcgtatccccaaggataagttcgtctattgtccgggtccgtccaaccgcaaacacctgcctcgtcaccataataaagcgtaggtgctcccggcaatgtcatctgcattacaacaccttgcttaaaaatagcttcatcaatatcctgacttgctgccgctgttcctgctgtccccacacgaccaaccatacggttagttcttgtaagaaatcttgaatggtcgtgatttgacaactcattcattgccaccaacaatgactgattctgcattcttgacatctgatactgcattgtaagcttaaaagttcccgcatcgccacgcattcccggattagaattgtcggaatgcttatcaacacctgtcaaaaaccatgttaccggatccataaagccatcatagttcataatagtatcccactggtcgccctgaagccatgaattagcatctccataatgctctgccaaaataatagcttccggattggcttccttaactgccttacgaaatttcttccaaaactcatggttaaactcctgactgtgacctaaatctgccgccacatcaagtctccaaccatctacattgtaaggtggactaacccacttcttaccaacttcaataatataatcgcaaagctctttactaccttcataatttagttttggcaaagtatcaaagccccaccagccttcaaaagagttattgtcaggccatctgtcttcaagaaacttaaaatataaattgtacggactatcctttgaaatataagcaccggatttataatttttattctttgtataaaacttctctttgtccatccacttattaaaagagccacaatgattaaaaacaccatcaataattattttaattccatgggcgtgagccttttcaaccaattcaacaaacaacttattacttgcttcaagatttgcaaggtcagttgttctaaccttatagcgctgagcgtgctcattattattgtcaccgtcctctaataacttaccgttatcattaacaatctttccaaaatgaggatcaatataatcataatcctgtgtatcatatttatggttagatggagaaacaaaaatagggttaaaataaataacttcaacacctaatttttcaagatattcaagcttatcaataaccccctgcaaatctccgccataaaactgtcttgttccatcaacagcaggaggctccatccaattctcaacctttgaaactccacgaccaatataggcatattcattagtcattacatcattagacttatcgccattattaaatctgtccaccataatttgatacattacagcgcccttagcccaatcaggtgttttaaatcccggtgtaaactcaaactcccattcttcagaaaaatgttcacttgcaccgaaaacattatagtataaccggtattgaccaaccgttctgaaatggtactttatcattttagttccaagagccagattaattgcataataatcgaatctgccctttgtatccacgtgtgacattttcatctcataaccatctattgccataaaagcctgatttactgcccctattgtagttctgagaataaatgtatatgtatccgacttttcattatatttgcaaaactgacttgagccatcgtgaaaaagtgcttccttttgctgtttcatttttataatcccttcttctaaaatttccggttttcatacaacagatttcccattgtacaaaatagttgcaacaaaataataataaagttctgttgcaactatttaacattaaaattttatactgtttcctcgtttgttaaagagtcggcctgattattatcagcgtcaaatagactttcaaattcttcacggccaatcttttctttttccattaacaatgctgcacttgcatgcaactgttccatatggtcttcaataatcttcttagcctttttataacatgtatcaacaatctccctaacttcctcatcaatagctgaagcagtattctctccgtatccctttgaatgagctaaatctcttccaataaatacatcgtctgactcatcatcataattaataagaccaagtttctctgaaaatccgtatttagtaaccattgcctttgctgtagctgtagcctgcttaatatcctgtgacgcacctgttgtaatgtcgtcaagaataagttcttcggctatacgtccaccaaggtcaaccataatctcctgtaacattttgccttttgtaaggaacatttcatccttaccaggcaaaggcatagtataacctgctgcacctgctcctgttggaataactgaaacagtgtgaaccggtccaacatcaggaagaacatggaataaaatcgcatgacctgattcgtgatatgctgtaatacgcttttctttttccgaaataattctgctcttcttctctttaccgatgccaaccttaatcattgcctgattaatttcggcctgtgtaagaaaatgctttcctgcttttgctgcaagaatagaagcctcattaagtaagttttcaaggtctgcacctgtgaaacctgacgtaattcttgcaatctgttcaagatcaacatcatcaccgataggcttattcttagcatgcacttcaagaatctcttttctgcccttaacatcaggtcttccaacaagaacctttctatcaaaacgtcccggtcttaaaatagccggatccaaaatatctacacggttagttgctgccataacgataatcccctcgttaacaccaaaaccatccatttctacaagcatctggttaagagtctgctcacgttcatcgtgaccacctcccatacctgttcctcttcgtcttgcaactgcatcaatttcgtcaatgaaaataatacatggtgcgttcttctttgcttccgcaaaaaggtctctaactcttgatgcacctacaccaacaaacatttcaacgaaatctgaacctgaaatagtaaaaaacggaactcctgcttcgcctgctgtagccttggcaagaagagttttacctgttcccggagggccctctaaaagtattccctttgggattcttgccccaagcataatatacttattaggattttttaagaaatcaacaatttcctcaagttcttctttttcttccttaagacctgcaaccttgctaaagtccatattcttaacttctacaaccattttggctctgctttttccaaaattagccatcttggaatttccgcctgccgcattggcattcatcatcataataacaactactataaccacacccataagaagcataggcaaaatatttgtaaggaaaacactgtctctgcttacatctgcaatgcttggctgtatattctgattagtcttgtcattaatatctttaatatcactaattacctgattaacatctgtaatgtatacatacttagttgagccatcctgaagttttacagtaacctttcctgtaggcacttccttattctggctaatattaagctgtgtaacttttccattctgcaaatcgtttaacaaatcattatatttatagttatttgatttaagtcctgaacctgcataataaagcataactataataataattgccatccctataaaataaattcttgtaaaattacttcttttattgttcaattcattcctcctatctggaatttttcaagtctgtgtaacttatctttaatgttcaattgtatccgatcctatttttaaaccgataattttattaagttttactgctcaataactccaatatatggtaaatctctgtagctctggtcgtaatccaaaccatagcccactacgaatttgtcttcaatttcaaaacctacatagtcaactgtaacatcgtcaacctctcttctgtccggcttgtcaagaagtgttgtaatcttaaggcttgccggttttctttctttaagcattggaataagacggcttaaagtatttcctgagtcaataatatcctcaacaacaataacatcaagtccttcaatgtcatcatccaaatctttcttaatctttattgttcctgaactaactgttccgcttccatagcttgaaacactcataaaatcaagtgttacaggaatagtaattctctttgccaattcacatgtataaaaaacactgcctttaagaatacaaatcaaacgtacttcttttcctgcataatccttactaatctgttctgcaatttcacatactcttttattaatttcttcttcgctaatcataacattaatctttgtattcataataaactccttatcatatgttattttaggtttttaattcctaatcttcttcaatataatctgctcttaaaatattctttgtagtttcagtaaccttgtaataagcacttattctgtatccgattacccaaaccacatgacttccatcagccagcaaaagaatctcatccctttgtgcctttggaattttctcattaataaaataatccttcagcttctttctacctccgttttcatcaactgttataaaatcacctggtctgcgagttctaacagtcaattctcttattttatcataatcaaaccatttcgtatacaataattcctgaatattttcagaagaaaaactattattttcaatggttattgttacattttcagtattatgaatcttaccattctttaccaaacactgttccattgttttttcctgattcgattcatcacttttcttttttattgatattccgtgataaagtcttgttgccacaagattgtatggcaaatcaactgttttggacacattcatatctttcaaccccacaaccaaaagcacgtgtttccttgtaatatcctttagctttcctgctccattctcaatcatctttcttacaacctgattcaaaactgccgggtgaaggttaaatgccttctcatccaaaacttcatccttaacatatctgttatattcctcagctgcctgcctatttaaataatcccaaatttcatttaaattttctgcagcgtttacaatattatactcagcttttttatttatattattttttatataaggcaaaagctccaaacgtatcttattacggctgtattctgtttctttgttggttgcatcactgcaatatgaaatatttttagatttcaaataatgctcaatctcctgtcttgtacaacacaaaagaggacgcacaatcatatctcttctaaccgggattcccgtaagtccctttatgcctgttcccctaaaaagattaaacagcacggtttcgctgttatcatttaagttgtgggcaacggcaattttgatattgttgtaactgttttttctttcttttgagtcatttttcttaatgccatgttcttttgctgagttttcctgattctcttttaagcttagtttccggctttcatctggttttttagtctgattcttagcttgttttttttctttaatttttacttctatggctcgttcaaaaaaagccttatatctcgcctgacgacctgcctcttcctccgtcatacctgtctgcttaaccataagtggaacatctgcatcaatctgcttaaaatccacatttagctttctacacacatcttttacgtaatcagcatcgttctgagcctgttttcctctaatgtgatgattaatatgcaccacataaagagtcagattcatttcactgctaatgtcttttagaagataaagcatacaaatggaatcagcgcctccggaaacccccagtatgacgctgtctccatattgtaatattttatttttatttataaaattcaataccttatttttcatatttttgttacacctttaacgaccatacgtgttttttgttattttatcatatttgtactaattttcccatatcccggtgcacaaaactgtcatatcatcttttggaattccttttgacatttgcaaagctctgttcataatctccagtgccatttcccttggactggcagttttaatatccataattatccttcccattgcctcctctctgtcggtacactcaagggaatctactattccatcggaaatcattataataaaatccccggcataaagttttttcgtaatggtttccatatcaacctgttcaaaaattcccattggcagggatgttgacttaatgcattccacccagccacctctttttatatatgtgcatgcagctcccattttcaggaactggcacgtgccggaatatctgtcaaataatgccatatcgactgccgccggttcctgccactgatttcccgtaagcaaaactgagttaattagctttaatgctgtctgctccgtaaaaccactttccaaaagttgctccagcaaatcaattacaacttcgctgtagccctccgcccttgggcctgagcccattccatcgcatatgctcataaaagttgcaccgctgtccagctccatatacgtataattgtcacctgacatttcctgattctgcttcaccttctttacacttccacttgccgtagagaaattaacttgttccaaaaaaagatattcattaaaataattcattagctgactattttcctttacggaaaatctcattggctgacctattacattagaaattattttgcacattgcatctgttgtaacttttgcccttttcttttttcttgccacaatgtgaatttccaattttcccttactgttctccgaaatagaaactcttcttgcaataattttttcgtcccttaacctccttttcaaataattttccataccaaatagatttcttttttcctgtgaaacaggcttggtatagtattcaataatgtctgccatttcattaagttgaattgccattgcctcccttgtttccagcattttattgtaccaaaggtagttaagcttcgccctttccaaatattgaatctgcccatttgcacagcccttgcacatattttcattgatatcaaattccaccgctgcatccataagtccctggtcgtcctcctcaatgcctgacatattttggatttttattgccaaatccttaaaagctttagatgtttgcatcattttttcattccttataatttgctgatgcctaagtcttgaatagtaattttttctgccctgtatgtgccacataaagtttttgattagtactgaaaaaattactgtggtagaccatgttagcagaacaatgggaatcagggcatacagctcttcttttatcattccattcataaaccagtccatggcttccattattcctcctattagtgttgttataaaggctaccgtaaacggattgtatttttcgctaactcttttatattgcacaagaaaaagtcctgtggcaccaagcatccagccgtattttactgcacacaataccccctcgttttgtaaaatcacataaatcattaccggccatcctaacaccgcaagcccttttacgttacacattgcgccataccaactttggactaacggatagtatccaagcattggaatcatacagactccaactgcaatcattagtagcactatcggttttgctactttttgtttcataatccctccttgcaaaaatttagtttcccgactagtataaacaccctttcctgatttttttgtcaaaacaatgtatgaaaaaccttagaaatttcgacaaaaaagcacctatactatttctagtatggtgccattaattttagaggaatttaacttttaagtttaatctcttgttctgttttaatttttttcttctaacattttttaattttcagattagattttcgaatttaatttttaatttgaattggattttttagtcttccggcttaaagattacttcgtcaggatataacaatcctagctttcttgccatttcttccaaatattcgtctgtatgtacgtactgttccttatccttaaggttctcagatatttgcaattcctgctgatactgttgtgcaagcttactttcctgctctttaagcttctttaagctactatttttttgtaccatctgtattcccataacaatacaaaaggcaaaaacaacaaaagatattccaactatcattcgtctgtttcttattcttcgctgacgaatctcatttaaccttcctgccgctcttttgttttcttccattacttcaccctatttctatctatttttttgcttaaactttcaatctttatcctgttttcttctgacttttgctctttttatatgttgattctttctgacgtttatccgtctttttattttttgtatttttatttgtatgactgttttttcttcttttatgttttgtcagaatactcttactttttatagtaatcactttttttagttttttcaacggttttaacaatgtcttcataatttttgtcaaaatcactgcacatttttcaacaactctctttcccacaagccactcaaacaatgccattgttccaagaacggctatcactccataatatcttggtcttccgtagttgtacttaaaaaacatttgaaatataaaaagtgccgccactgtccaaaagataacatcttctacaataaccctaattatggaggctctaaaaactctcctaaatattcttatggcatcatagcaaaccataagaacaagtccgccatatgcacacattgcaagaacaagaagttcctcatttattgcaggactcattaactaaacatcctcttcaaaaccgacttgcctttttcaccatagttctttatctgagaataaataacgctatccacactaccatcaatatcagcctctcctttttcgatgctaagtctggtaattttcaagtccgctcctttaataaccaacattcccatagatgattccagcactatctgtgtggtatcaaattcaacaacgtcctctattcctgttaagtttgttctctttctgttgtccaaaaccagcttatgtggtttagttatttgattttgctttgaacctaaattctgttttgagcctaaactttgttccatataatcctaccttatccttttataggacagtatattcttaaagttgcagaattatgtaaaaatattctatatcagcttaaatctttgtacatttctgtggcattttctttcttaactgtttcattaaggtttagaacctgaaccttaactgttctctgaccaaactgaatctgtataatgtcgttaacttttacatcataagatgcctttacaaccctgtcgtttacaagaaccctgcctgcatcacatgcttcgttagcgacagttcttctttttataattcttgaaacctttaaaaatttgtcaattctcattttttcctccattactttgtgtgctttgttttgttatacacgacgaagctccgcttcccgtataacacttcgaatccgctccgcttcttctcagtgattatacggttggttactactacttttgttttgttatacacgacgaagcttcgcttcacgtataacacttcgaatccgctccgcttcttctcagtgattatacggtcggttactactacttttgttttgttatacacgacgaagcttcgcttcacgtataacacttcgaatccgcttcgcttcttctcagtgattatacggtcgccaaatatacgcatacagctttttttatgcaagcataaaaagctgtatgcgtatatttggctcgtcgtgtataacaaaaaggaccgttactttgtaacagtccttatatcttctaatgaacttttatttattaattaagtgcattctttaaagctgcaccagctttgaacttaggtacgttagctgctgcgatagtgattttttcctttgttgcaggattgattccctgacgttcaggtctctttgaaacttcgaatgttccgaatcctactaactgaatcttttcacctttcttcatttcttctactactacatctgtaaaagccttaacagcctttgcagcatctgtctttgaaagtccagcttcttcagcaatagctgcgataaattctgtcttgttcattttaattcctccttgaaaatatatccgatactgatttcgtatcatactatacagtttataccccatttaataggctttgtcaagataattactccatttaaagagctttctgcagggaattttttggttaaaaagtatcttttttcaactttttagatttttctttgagctattttcacaaatttattgcctgctactatgattccatctgtcttcctaggaaagctgcggctactcctgccagtttttgttctgttacgcttaccttattatttttatctttagccaaaacaataacgcttccaataacatcaccttcacatatgattggataaataatctgaccacattgttcaggctcttctccctttattatctcaaaaagtttctgttgttcatctccgtttttcacatctctgttcgacattaactcttctaactgggaacttacagccattcctattttgtctttttttactccccctgcaacagcaataatctgatctctgtcacttatgagaactctctgtcctgaaacctgtgccataacatctgcatattgttttgcaaacatttcaatctctccaataggtgaatatttcttaagtataatttccccatcgtgattagtaaaaatctccattggatctccttctcggattcttaaagttcttctaatctctttaggtacaaccacgcgacctaagtcatctattctgcgcacaatacctgttgccttcatactaatttcctccattgcaaattttagctttggagttagtatgtggaaatttaaagaaaatattcttgtcactaaatctccactgcaactttgctgcctttaaccttgtttttggaaacgattatttttctatcgattcttgtttttaattcttgaacatgagagataattcctactaatctgtctccttctgttaaagtattaagggcttcgattgcactgtttagtgaatcttcatctaatgttccaaagccttcatcaacaaaaagtgtgtctatttttattccacctgctgcgtaatgaatttcatcggataatcctaatgctaaagacaatgacgctttaaaagattcaccacctgataatgttctaacatcacgttctgtaccattatagtgatctataacattaagttctaaacctgtcttacttctttgatcatcagattcggtgcttctttttagttcatactggccgttagtcattttcataaatcttaaattagctctgttaattattctttcaaaataactaatctgaacataagtttctaatgctattttgctctttccgtttatattaccattggctgtttgagctagggcattaacccacttatatttttcttccgtagtaactaatttattcaagttcgccttaatattttcaagtgctcctgtgttaatttctattcttatggatacatcatttctctgattgtttacagctttcttttcttcctgcaacttgttgctttcagaaataagctgttccaaatcatagttttttgaatcctttaactgctcttcaatagtctttattgttgcattagcatcatcaatagacttcttacatttatcataactattcaaagcttgtgtagctttattctctaattcagataagttaatctttaactgatttaaattgctttccgcatcttttctactttgaaattcaagtttctccctaaactgttccaataatattgcattttcgcgatttttaattttcaaattagaaatatcactatttaaaatatcttttttattattgttgttgtttatttgttcttctgtttccggaatctgcttttcaatctgttccttaacccgaacattatttttagcaatttcataatatctattgtttttagaaatagcctcctctactttaaccaatttttcatctgaccaggcttttatatctgaaacagtattaattgctctttcttctaaaacttctttaaatatctcttttagatttctgaaattctctactatactctcgtataatgtatcaacaatacccttctgcattcctgctttgttactgtcattcgttgcaatagctttaagttcattaaccttattctttgcatcttcaaccatcttttctgttatctgcttatccattagcttaaacggattagggtgaacagttgagccacaaactatacacggttctccatctctaaggttacctgcaaggattcctgcctgctgatttaagaatgtcttctctatagctgcacattcattgctcttagtttcccaactatcattggcttttatggctctctgttgaagtagctctagctcatgattctttccttcataatcattacactgatttataatgtttgataagttcttttttacattatcataacctgtttttgcattttcgatttttaccaatacggcatctgcatcttttaacttctgaagattctctttgttaatagccaacaccttatttaaattctcaatatctttacataaagactcaaattcactttctttagtcttaattaacttaatttcattgacatactctttttcagtgtcaaaaagcttgtcatactttggcataagctgttcctgttctttaattttgtactctaattccttacgaacaggctcttcttctttgcataattctactctcttctccagtacttccaagttagacttattcgactcaataaattgttccgcgttcaacttctgtttctttgcagaattgtccctattaacctcaactaactttttatcaacatctgaaagagctttttcggtttttattatcctttcgttaataacttttaacaaatcctgatcattgttaataagttcctcgatgaaatcaattgtattctcaataccattctctgtcttgttattctttatagcttcaagctgttgccttgctacaaaactatcgccacatctaatcccatctatgtactgacttatactcttattctgatcatctaccaatcttctaagtctttttgcctcatctcccagcttaagctgaagtttctcatatggatatgtattaaaaattttgctaaaaatctttcttctctcatcagtatctgccaataacaacttaagaaaatcattctgtgctatcatggctatctgagtaaactgttcataatctaatcctattaactcattaatggcaacagtaacattactacttccggtaacaggagtatctttgtctggataaattaacgtagcattagcactctgagttgtggttccctctccatgaatcttaggtcgctcgtattcaggattacgctcaataacatactttttgttcctatactcaaattccatctttacaaaagttggaacatcaggctttgcatacttgcttctaagcatagacgaagacctggtctttccactggactttccatataaaacatatgtaattgcgtcaaaaatagtagtctttcctgctccggtatctcccgtaatcaaataaagacctttatttcctaatttttcaaaatctatagtttcgcattctgcataaggtccgaatgccgatattattaacttaattggtctcattatgcatcctcccatatcttctcaataaggtccattgccaacttctcctgttccggtgacatgtcctgattgtttctgattacataaaactccttaaacaactctagcggtgattttaactcaatattctctatctctgttacagcattattagttctggttcttgtattatcataatcaagtcgcataatattaggataaatagttctaagcttgcctattgcctccgggacatcttcttcatcagttaatgttatatgataataatcctgagtattcatatccttatagaaatctcttgccgaaatctggtcgtaagttcccttaatctccttcatatctctaataggtttaaaaggaatcttagttatttcaatgttgcccttctccttaagatcaaaaataagtgctgatttcttatgattaacctcagaaaaagaatacttaagaggggttcctgcatatcgtacagtttccctgccaatcgtctgtggaccgtgcaaatgtcctaatccaacataatcaaagttctcaaaataatccgctgacacctgatcaacgcctcctattgacacttcttctgactcacaaatacttccacctttaacaaactgatgggccaaaagaacattcctctcatccttattaattgaaatactattaataacaatctccatagccctatcatagcttgaaacatcctcttcctggaaaaaagggcgtactacggccggcttaataaaaggaagcatataaatattaattggtccacatttatcctccaaagtaaccttttcaacattaccattaaaaggatgactcatatacactccactggtactcataatctcagcaccaaagcctattctctcaggactgtcatggtttccgctaattgccacaactttaacattcatctctgcaagcctgctaataaactgatctaacagtaacaccgcttccgctgacggaactgccttatcataaatatctcctgctataagaacacattgaacttcctgttctttaacaatatcaagtatctgattcaatatatacctttgatcttcaatcatagaaaactcattaactctctttcctatatgaaggtctgctaaatgtaaaaatctcaaaacttaatccctccctttcatttattcgaacatttgtttgtataaatattagcatatcacttttcacaaagcaagtataattttcaaaaaatcctgtaaaacatccataacttattttttgttttttattgcactattttctttttttaattagtaatttatgtctaaaatacttatttaatttagttatggaaaataatacataacctattaaaatttcagattatttttattataatataaattactaaatatcataaataatcaaatgcaaattcaatagaaaggacggcaaaagccttataaaaatatgaatattagattttttaacggaacaattttaacacttgaaaatggaactgaactttcaagtggtgaggtttgggtttttgatcatttaatcggatacgttggaaagcctcaagacaataatattaaatgggacagggaaattaaccttaacggtaatctaattatgcccggttttaaagatgcccacacacattcagcaatgacttttttacgttcttttgctgatgatctgccacttgacagatggcttaacgagaaggtttttccaatggaagccaagctaaatgacgatcttatatatgctttttcaaaaatcgccataatggaataccttacttcaggaatcacctcaaactttgatatgtacattagccctaatccggttattcaggcatctattgattgtggatttagaactgtaatgacaggtgggctaaataattttacccagactattgaagaaattgatgaatgctacaagaaatacaatggttacaatccacttataagctacgaacttggctttcacgctgaatacacgtgctcccgggaacttttagaaggtatggcaagcattgccaagaaacatcaggcacctgttttttgtcataattcagaaacaaaaaaagaagtcaaagaatgtttggaccgttatggaacaactccgacagtttttcttgacagacttggaatgtttaactacggtggtggtggctatcactgcgtccatatgactaaggatgatatttctgtttttgaaaaacacggtttatccgttgtaactaatcccggctctaatgccaagttagcaagcggcgtggctcctatttcaaaatttatgaaaaaaggaattaacattgcaattggcaccgacggacctgccagcaataattgccttgatatgtttagggaaatgttccttacaacttcccttgccaagcttaaagaaaaagacgcatcagcagttgatgccaatgaagtgcttaaaatggctacacttggcggtgccagagctatgggacttagaaattgtgacactttatcccgtggaaaacttgccgatttaatagtcattgacttaaaccagcctaatatgcagccaattaacaatattacaaaaaaccttgtttacagcggttcaaagcaaaacgttgttctcacaatggttaatggaaatattctatacgaaaaaggtgaatttaatataggtgaagaacctgagaaaatatatgaaactgcaaataaaatgttagcgaaaataaaataaaaattactatattttgattttaatacataaaaaagatgctgtgcaaactacacaacatcttttttattttaaaatttggatatcaaaatacccaacttttgattaattatctccttaaaactttgcaccaagtgttgctgccataactgccttaattgtgtgcattctgttttctgcttcatcgaaaactactgaattctttgattcaaatacttcatctgtaacttccatttctgtaagtccaaacttctcgtgaatctgttttccaatcttagtattaaggtcatggaatgcaggaagacaatgcataaatacaacattttctgctgaattcttaattaaatccattgttactctatatggaagaaggtcattaatacgctcttcccaaacttcatcaggttcgcccattgaaacccaaacatcagtgtaaatagcatttgcattctttgttgcaaccataggatcttcttcgaattcgatttttgcccctgtttccttagctacttctctacattcttcaataagtttctcgtcaggccaatacttctttggtgcgcaagctacgaaatgcatacccatctttgcacaaccaaccataagtgaatttcccatattgtaacgggcatcgcccatatatacaaacttaagtcccttaagacgtccgaacttctctcttaaagttaagaaatctgcaagaatctgtgttggatgaaattcatttgtaagtccattccaaacaggaactcctgcgtattctgccaactgttctacaatagtctgttcaaatcccctatattcaataccgtcaaacatacggcccaaaactcttgctgtgtcaggaatactttccttctttccaatctgtgaacctgttggatccaaataagtaactcccattccaagatcgtgagctgctacttcaaaagaacatcttgtacgagtacttgtcttttcaaaaataatagcaatattctttcctttaagaacatctacaagttctcctgctttcttctttgccttaagattggccgccaaatcaataagggcactaatctcttccggtgtaaaatccaataatttcaaaaatgattttccttcaaaattcataactgtacctaccttcttattcgtcctttttatttttaagcatttcaatgtactcttttatattaatactctttccggatttattcaactttggaagagaattaagtgaatgcttgttgtaaatatttatcttagcaatgtaagaatccatcttggcttccaattcagctctctggatagcccatttctctttcattgcagaattctgatttttattctttgaagctgcaccggcagtaagcttatccttagctgcattaccggcactggaaatcatatcttttgtggcacttccggcatttgtgataatttcttttgttgcatttccggcatttgaaattatgtccctagttgcatttcctgcacctgcaagtttttctttagccggctcaactgcctctgcaaatttttcacttgccggttcaactgcttctgcaaatttttcttttgcagcttcgctggcattggcccacttttctctgctttcttcagttctctcgtcaagcttttcaagactttcctcagctctgtctgccatattaattgcagaatttccaacaacatccttaatctgatttccaagattattaaggtcctcagccaccttgtcaagctgtcccaaactcttacggataccaataagattcttaagagtaacaaccatatctattgcaaaaatagtaacaagaatacttattataataattcctgcaatctttggaagccttctaaccaaagcaaaaatcggtggatgaacaagcttcatcactgccacaacaccaagtccccacataatactgaatcttaagcaaacatagccgccaatattaaacttgttctttgtgtaatcccaccatctcatatggaaaattttgtccaaaacccagccgccaaaaagttcaacagctgtacaaataataaacccaccaatgaaaagcaaaataaaattgtccctgtatggagtaagcgctgcaagaactcccaacattccacatccataaataggacaaaccggcccattcaagaatcctctgttctcaactcttcttgctgtaatggcaacgaacgccacctcaacgcaccagcccaggaagctataaataaaaaataaaagtgctacataataaaaatcaaaactcataacaaccctcacatttaatttgtctgttagcaaagtattatagcataaaaacaaaaatgtgtcacttaagtagaagggttgatggcaaaactcaacataacttatcgtaatttttgcaagcgtaccacaaaaaacgaattttcccaaattttgtggtacgttttcaagttatgtaaactaatcacatcacatattcttgcttcattattcaattcatcacatattgacttttattttaattattatgtaaaccactatgttacttatacttgcttaatggcaataaacgtaccacaaaaattcactatttttaaaaatttggggtacgctatccgataataatattgttttcttgttttatgtaaaccagtttgcccattattgtcaaacttcactcccgcaataatttctcaagtctattctcactacatttttgcttatcggattgctacgtgcttcgcactcccgcaatccttcccaagcattcgcatatcgtgaagctttcgcttcactttatgctcattcttggggcgtgtcctaagtccagtcatccacctttgtgcaagcacaggtggatgactggacttgtacactgtaagcaaaaaaaaaagagaagccaccactttatgttttctctcataaagtgatggcttccaatatacagttttaagatagacgtactatttataacaaatttcttcattaccaatacgtagcaatcaatttcattttaatctagaataagattccaccatactgtgcaattactgttgcaaaaacaagtgaaacaattgtcattaacttaataagaatgttaattgatggtcctgatgtatccttgaatggatcacctactgtatcaccaactacggctgccttgtgtgcttcgcttcctttacctccagcaaaaccaccttcgataaacttcttagcattatcccaagcaccaccggcatttgccataaatactgccatcataacaccacttacaagtgaacctgcaagcataccacctaaagcttctgctccaagtaaaaatccaataacaagtggcacaagaactgccatgataccaggaacaatcatttcatgtaatgctgcttgtgttgaaatacctacacatgatgtatagtcaggcttttctgttcccttaagtatacctggtttttctttgaactggcgacgaacttcttcaatcatcttgtttgcagccttaccaactgaagacattgtcaaagctgagaacataaatggaagcataccaccaatgaaaagaccaactacaacgcttgcatctaaaatattgataccgttctttgtgattcctgctgtttccgcaaaagaaacaaaaagtgataaagctgtaagagctgctgaaccaatagcaaatcccttaccaatagctgctgtagtatttcctactgcatctaatttgtctgtaatatctctaacactttcgtcaagttctgacatttcagcaataccgccggcattatcagcgattgggccgtaagcatcaactgctactgtcatacctgttgttgaaagcataccaactgctgcaagagcaataccatacattccgcagaagtggaatgcaactaagattccgattgcaataacaacaatagggatacatgttgatttcataccaactgaaagaccactaataatgttagttgctgaacctgtctgtgagctttcagcgatttcctgaacgctcttatatttttctgatgtatacatttctgtaactttaccaataatagtaccaactacaagacctgcaataattgcgataaatgcattaaagttaccaaagaatgtattacttaaaatagctgaagcaataataactaatgctgttgctgtatattcacctgcattaagtgctttctgtggatcagaaccgtcttttcctctaacaaagaaagtagcgataactgatgcaataataccaacacctgcaattacaagtgggaataaagctgccataaaatgagatgcactaccaatatttgttgctacaagaccaagtgtaatagctgaaactaaagctccaacataactttcaaataagtcagcacccatgcctgcaacatcacctacattgtcacctacattatctgcgataacagcaggatttcttggatcatcttcaggaatacctgcttctactttacctacaaggtcagctccaacgtctgctgccttagtatagataccacctccaactcttgcaaaaagagcgattgatgaagcaccaaggctaaatcctgtaagaatacttactgcgtctgttgtaacttcgcctgtggcattaagaataatgaagataacacttattccaataataccaagacctacaacgctaagacccataacagcaccgcctgaaaaagcgattgataaagctttgttcattccgctttctttagctgcattagctgtacgaacgttagcctttgtagctactgtcataccaaaataacctgccaaagttgagaataatgctccaactaagaagcaaactgctgtaagccagctaattccaaatcctaaaactacaaataatactgctacaaaaataaccaaaactttatattctgcaaataagaaagctctggcaccttcagcgatagctgaagcgatttctttcattctgtcatttccggcttcgctcttgttaatagtcattgccttataaaaagcaaaaatcaatgctataacacctgcaaccggagctaaataaataaaactgttcatatttattcattccctttctttctcgattctcaattgttgattattatcaaacttgagtacttccaaacaattaagatagtatcaatacttgaatacattctaaacaaccaaatcttttcatttaattgaattccccttaagcgttcaaattattttatagcaaatgctttcaatattaatcatcttcttaattgttaaataaataacaagcagttacgtattcaataccttaccacgtttgagaaaacttttcaacaaattttatttctattcccacaacattttttcactcaatatagtgaaatgttcaaaaacatgcgataaataaaggttgtgtagatcatttaccaggattgtacccggtagacaatcacacattcttgcttctatatacttataattgcttcgtaatggcacactaaaaaggagctgttgttctaacgattgctaaaatcattagcacacagctccttttttacaacttctattataaaaacaaattaatttataaaaatatactaaattctattcttcttctgtagaaagtggaattcctctatgttctacagatgttgagaatactatctgtgtcttcgtacttccgaatgtctgaagctctccaatgaagtgatcaagctcctcagtgctcttaaacattacctcaacaagcattgcatagtctcctgtaacacagttacattcaataacattgttacaactcttaatataaggatagaaatccttcttctgtcccggattaacctcaaggtttataaatgccttaatatgataacccaattctgccgggttaacctttgcagtataacctgtaataattcctgcctgttctaatctttcaattctggcagataccgccggtgatgataaaaagacctggctcgcaatagttttaaggggaatacgagcgttctcatgaagcaacttaataatctgttcatctatatggtctaattcatgtctcataagtagtactcctttcaatataatatttttcagcatattttaattttataaagttttcaccttataaatataaagatattatagcacagagttaaaaaaatttacaataataaattatttatacattatttctgttttttccaacaaaaaaacatcttcaaacccacaacgtcagttcaaagatgctttaattcaaagatattttcattccaaaatattgtaattcaaaaaatattacaattcaaaaaaatttaacctctttaggattttcctaagctaattccttctcactcatttcaagtgcggacgcaataactgcatccatatcataatacttatattcaccaagtcggccaccaaaaataatattatcttccttctgtgctaactctttatactgctcatacagagcgccattcttttcgtcgttcacaggatagtaaggttcatctcccggcttccattcagcactgtactctcttgaaataacagtcttaggcaagtcattaccttcttcatcctttccgaactcgaaccacttatgttcaataatacgagtccaaggtgtttcagaatcagtataattaactgctgcatttccctgaaaattaggaatatcaaggatttcattttcaaatcttactgaacgatactctaaagttccaagcttgtagtcaaaatatgcatcaatagcccctgtgtaaactaccttggaagccattgcatcatattcactcttgttatcaaaataatcaactccaagttttacatcaatgccctcaagcatattttcaaccatcttggtatatccacctacaggaatcccctgataaagtgcattaaaataattattatcaaaagtaagtcgaaccggcaatctcttaataatgaaagaaggaagtttatcgcaagatcttccccactgcttcattgtgtaacccttaatcaacttttcataaatatcggttcctaccaaagaaatagcctgttcttccaaattcttaggttcagtaattccagcctgtttcttctgctcctcaatctttgcctgcgcttcacttggtgtaacaactccccacatcttgttgaaagtatacatattaaaaggcaagctaaaaagttcccctttataatttgctaccggtgaattagtaaatctgttaaattcagcaaaccgattaacaaaattccaaactttcttattattagtatggaaaatatgtgccccatacttatgtacattaatgccttcaatcttctccgtgaaaacatttcctgcaatattaggtcttttatcaataaccaaaacagactttccctgagccttggcctgattggcaaaaactgctccatacaaacctgctccaactactaaataatcgtacatactactattttgcaatatccataatgccactcccaataatacctatgaatactgcctgctcctttccctgcctagccccaaatgaatcgcatcgtaagccagtccttttcatatttactgtagtttactatataattcatttgaaatagtgtcaagcctactttctcaatacagccttaagttctgccatggctctcttccaacctgtgaaaggaagcttaataattctaaataaatatccaaaaggaacaagaaccttacacctacatatcaatgggtgatactttttaaaacttttatagtctgggaaaactcgtctaaaaacatatttaaacttagatttttttacatcatcgacatctccaagcttatttgctaccaaattatcaaaatttccatatgtgcctgctcccataatgtaatcaagcatattcttttcatctgttggaagaccttcataccaatccgctttagcatcagattcattaacactaaatacatcaaaacatagctttctaaactgcttttcaaaatctgctatatttaattttcccaattctttttcaacataagaaaaatctaactctttattctttctcaaatacaaatacacatcaagaattgttctaagtcccattccgccacttgcataatgcttatatgtatgtaccataaaataaatataaaaatcttcctctttgaatacatattccaggctattctcagacttctttgttaacttatcaaatacattgtcaaaataattattccaactttcgtaatcatctttgtcaaaaagagctctgtgcatttcaaaattatatgccggtttctttaaatactcatcatgattgctggttccatatcctttaatactgtaccctctaccaaccatgaagtcataaatgtccttcatatattttctgtcaaccaaaatatcattatctgacatctctcttaaggcaggatttggatagtattccctaataatcaaacctttcagtaacaaataccaaatattcttttcttcaaagaatgcaataatctcctcgcgctcaacatccatcaaaacattcttgtaaacagcctgattcttttccatctgccatctttgatatattggactcctcttgtcaacatccgttctatccaaaacttctgccataagcgcagttaaattatgtttcttgcaaatctgatatgctcccgccaaattagaacaaaatgcctggtccatttcctctccattaacataacttctaatagcatttataacatttatatactcttccaatagcattttcttctcctaataaaatattttttcaagcatacattcttcctaaatatctattccgccaatgctttctgctcactcatcaccttgtcataataagccttatatctatagatagttctttcgctcaattttttttcttttgcaatttcagcaattgacattcccgattcatataaaacaacaaaatcattataaatagattgccacttatcgttatgtttctgacgtccgcttacttttctgtttctgtaatattccaattcttcattcagcttctggttctccgcctctaattccttaattctttccaacgccatttctaatgtttcaatctttctcatagtaatttttcctttatccttaatactatgattttattatttatcatccttcctgtcaatatgattctgtcatttaggttattttattcaacaaattctcctaagaattttcaatcaaaaaaactacagcccacgtttccgcaagctgtagcctttttagttagatattattttattgtttataattttctattcagcttccggttcaagtaaggccttctcgtaagcttcaagaactatcttctggatattgttgcgggtacctgagttgattggatgagcaatgtctctgtattcaccatctgctgcttttctgctaggcattgcaatgaataatcccttatctccttcaactactttaatgtcatgtactacaaattcatcatcaatagtaattgacacaactgctttcatctttccttcttttgtcatttttctaactcttacatctgtaatattcataattatgtccttcctcaatttcctgctttgaggtacaggtgtacctgtaatacacctgcgcttcctttctattatatttgcctaagtatttttatgtacaacccttagattacttctacaaactatatctgaagtttctctcattaataatctgtacttcgctatcttcgcttcctaatttctcgttaggattaatagtgctgtggctttcaactatacaattctctattactgtgttgtctccaatataaacatcattaagaataattgagttcttgattacacaattgtttccaatgtatgcctgatggaataccacggatccgtccacttcaccgttaatgatacaaccacttgaaattaagctgtttcttacttttgaaccaggattatattttgccggtggcaaatcagccacttttgaatatacgtccggatactgtttaaagaagaaatcccttacatccggtttaagaaaatccatattacaactataatagttgtctatgttagaaatattctgccaataagaatcaagattataagcatatattctctttgtatctttgtttctgataattatgtcgtttacaaaatcataattatcttctgccatacactgctcaattaactggataagtaatcttcttctgattacataaattcctgttgaaatctttgagcttgttgtttcgcccggcttctcttcaaaatcaacgattctgccgttagaatctgttgttacaacaccgtatgctaaagccttctctgttgaaccgatatccttgcagacaattgtaatgtctgcgcctgtttcaacatgtctttctaatactttgttgtaatcaagcttgtatactgcatctgctgatgcaataattgcatatggttcatggctcttctttaaaaatgccatattctgtgcaatggcatctgcagttcccctataccagaatccattgtctgatgtgatagatggtgtaaatacaaacaatcctccctgttttctaccaaaatcccaccatttagatgaacttaaatgttcatttaatgaccacgcattgtactgtgttaaaactgctaccttctgaatatgtgaattagacatattacttaatgaaaaatctatagctctatagcttcctgctataggcattgctccaattgctctcttctttgagagttcgcgcatcttactgttatttccacctgctaaaattattcctattgctctcattaaatctcacctgccttaataatatagccacctgatgggagctttccgtccggataatctgtaatttccgtctttcctgatattgctacattctttccaatctttacaccatccggtatacttgaaccttctccaataacagcaagttcacaattataaatcttctgacttaacaagctgtctgcatattctccaatgccgatttcgcagtcctgtccaacttcaacattctctgcaataatggcattgtaaaccttagttccttttctaattctggtgccatgcataataatggaatcgtgaacctccgctccttcttctatcactacatccgcacttattaccgagttataaacaccgccgtatatatcacagccctcgcctacaatactcttctccacctctgcactgtctgacagatactgtggtggtaaagcatcattcttagtataaatcttccaaaattcttcatataaattaaattcaggcacaatatcaattaattccatattggcttcccaatatgactttaatgttcctacatctttccaatatcctgtatattcatatgcaaaaattctttttccttctctgtgaacatatggaataatatgcataccaaagtcacaattaggctggtctttaagattaatcaatgcttctctaagaaccggccagctaaatatgtagatacccattgatgcaagattactctttggatgttccggcttctcctggaactctgtaatcttgtgatcctcatctgtaactactacaccaaatctgcttgcctcctcaattggaacaggcattgctgcaattgtaacatctgccttattagccttatgataatcaagcataacctcgtagtccatcttataaatatggtcacctgataaaataagtatataatcaggattatatgaatccatatagtctaagttctggaaaatggcattggctgtacctgtataccattcagtgttcttacttttttcgtatggcggaagaaccgtaacgcctccaatattacgatctaagtcccatggaataccaattccaatatgggagttaagtctaagtggctgatactgtgttaaaacacctactgtatcaatgcctgagttaatgcagttactaagtggaaaatcaataatcttatactttcctccaaatgcaactgcaggttttgcaacttttgctgttaaaacaccgagacggcttccctgtcctcctgctaacagcattgcaatcatttcttttttaatcatgtccctcacctcgctgcgaataattgatgagttaattatagcactaaccccctttcaataaaagagtttcaatgaattttattgtgtattttttctctaaatttcttgttttttctacatgtgttatgcaaaattaccaatttctttattactttttcgtgttttttattatttgcttaatttttttaaaaagagtttttattttcctgtttttttttcttttttcagtctttaaaaataaatcatttaagagtatacttaattaataagtagaaaggcgttttcgtcttttaatttttttcttaagaaaggatgaaataaacaactatgtacgaactagattttaatactccggcaaagatccattttacaggaattggcggaattagtatgagcggacttgcagagattatgctttctaaaggcttcactgttacaggctctgattcaagagaatctgaaataactaaacaccttgaatctcttggagcaactatttactatggccagaaggcttctaatgtggctgccgatacagaagttttgatatatactgctgcagttaaggctgacaaccctgaacttgtagctgctacagagatgaatattcctcttttgacaagagctgagtttttaggtcagattatgaagaattaccatactgccatcggtgtttcaggaactcatggcaagactacaacaacttcaatgctttcacagattatgcttgaagcaaataccgaccctactattttagttggtggaattatgccggcaattaacggcaacacacgtattggtcattcagacaatatgattactgaagcttgtgaatatactaacagcttcttatcttttgcacctactattggaattattcttaatgtggctgcagaccaccttgattttttcaaggaccttgatgacattagacatagttttagaagatatgcagaacttattcctgaagacggtgcacttgttattaatagcgatattgataaccttgactattttactgaagggcttaagtgcaacattattactgtaggttctgatcctgaaaagagtatgtatagcgccgctaacattacttatgatgagtttgcaagaggttcttatgaccttgttgtaaacggcgaaactaagactcatatcgttttgaaggttacaggggaacacaatatttacaattcacttgcatctattgctgctgctcattttatgggtattgacgataacagcattattgctggtttacagcagtacggtggaactgacagacgtttccagtacaaaggcaaattaggtgatattactgttattgatgactacgctcatcaccctgatgaaattagagcaacaattaaaacggctaaacattatccacacaagaagatgtgggttgttttccagccacatacatatacaagaactaaggctttattgccagagttctgcaaagctttatcagaagcagacgctgttgttcttgcagatatttacgcagcaagagagaaagacactctcggaatcagctcaaaagatgttatgaaaggtatcaaaaaacttggtactgaagcatattatttcccatcttttagcgaaatcgaaaattttttattagaaaattgttcaacaggtgatttgttgataacaatgggtgccggagatgtagtaaaaatcggggaacatttgctaggtaattaacttattaacatgtccacaaaatttcgttgataactctcaatgattttttgtggattttttgtttacataactttgttattttgcaacctgccaattctcttattttataagggtttcactaattttcgactttttatgccgactttttattcacattatcaacattattaacattgcccgcaacccctttaaaaatgggcatttcacccaatttgtgatgttgattttttaattctttatgctatacttcttcttgcaccacttctctgggagtcttcaagtctcacagaagttttcggggatttgtgtgcatttttgtgagataataattttacgaaaaggattatgagacaaaatgtgtaaattggttttagatagagggagcgttgcagaatttacttctgtatcaaatatttttatggatgaatatatgcctagggccaacggagagtttattaagatttatcttcatttgttgcgccttgttaacagcaataacgacattgctgatgagcttacaactgaaagaatcgcggacaagtttaatatgttagagtctgacgttattcgtgctcttaactattgggctgaacagaatctcattactttgtcttataacagccagaatgagatttcaggcattactttagagtctatccttcgcaaccgttatattgtaaagggtattacaagcactgaaactaaccttttggcatcagcttccggtcagagtgagtctattcctgttccggaaagcacaggacatattattcctgccaagcgcaaatatacaccaagagagattcttgattttgcagataatgatacttttaatgacattcagcttttggcacagacttatcttggaagaccacttagctctaatgacattaacagtattttgtatatgattgacggactttgttttgatgcagattttattgaatatattatggatgcctgcatcaaggacggttttaactctttatcttctatcgagaagagagccgttgaatacgcaaaaaaagatataaattcaatagaagaagctaaggctgacaaaaagttcagggaaggcatttctaaaagcatttataagattttcggacaggctcctaccgttcctgtaagaaaagagattgcttacattgcaaaatggactgatacatacggttttaccgacgaaattattattgaagcatgcaaccgcactatggctcacatgcacagcggaaatcttttcaactatactgatggtattcttacaaggtggtatactaacaatgttaaggatatgagcgatattgaaaagttagacaaacttcattctgaggaaatgtcaaaaactttccagaagaatattccttttgcaaacgctaagttttctaagactcctaaggctgcacctaagaagcagacttttgaccagcgtacatatgactataaggatcttgaaagaaagcttattgccaacagagacagcaagcttaagtctaacaagtaatagacattgtatattattgcagaaatatttattaggggtttttattaatccggacgtttaattacaaaaaaggattgtttacctttgaaatataaggtatctttatagtaagattgttgaaagcaattcctataattaaattttgggttttgaacactctaattattgtagatatttattttaaaaatttttaaggatttaatatggctttaaccagagatcaatttgacgttattgcaaacagttacaatgaccgtcaattaaataataaaattaaattaaacagacgtattgaagaagtctacgaaaaaattcctcttattaaggatttagacgggcagattggtgttcttgcaggacgtgcccttagactttctctttcaggcaattcttctgctaaggacacacttcgtgaggacattgcccttataagtgaacaaaagaaagcagctcttttagccggaggttattccgccgattatctggatgagatttttacatgccctaaatgtaaagatacagggtttattgacggaaaaccttgtgaatgccttaaggcagaggttgtcagactgctttattcccgttctgagcttaaggagattcttgaacgcgagaactttgatacttttgaatatgatttgtattctgatgactacattgatcccgatacagggatttccgcagcagaaaatattgacgctgttgtggaccattgtcattattttataaataactttgacaaaacctttgataatctgttattctatggcagggcaggtacagggaaaacttttctcattaactgcattgcaaaggaattaatcgaaaaatcctactctgttatttatctttcagcagtacaacttttcgatttattggcagattattcctttaaacgtagcaacaccactatttaccgtcagattagttttgacgagttgcttcgttgtgatttacttattattgatgatttgggcacggagatgtctaactcctttactgaatcatccctatttgattgtcttaatgagagacttatacatcagaaatctactattatttctactaatttttctttacaggaattacagcagaaatatgaagagcgtattttttcccgtacagcgggtaattacactcctttaaagatttttggtgatgatataagaataaaaaagaaatttactatttaacacacggaggaaattttgaaatgtctatcaaaaaatatgttgaatctattcctgtaggaccacttgcaattgttgcattatcaggaagtaagcagttaggcgaagcagttgacgcttatattgctgattggagaagccagagaattgaagctaaagaatcacctattactttcaagggttatactaaagattcttaccttcttgatgtaaaaacaccaagatttggtacaggtgaagctaaatgtactttaggcgaatctgttcgtggtacagacctttacattatcgatgatgttactaactacagcattgaatatactgtttgcggttgcaagaatcatatgtctcctgatgatcactttgctgacattaagagagttatcgctgctgctgcaggtaaagccagaaaaattacagttattatgcctttcctttatgaaggaagacagcacagacgtacatccagagaatctatggactgtgcagtaatgcttcaggaattagtaaacatgggcgtagacaatattcttacttttgacgctcacgatcctcgtgtaaacaatgctattcctattagtggttttgaatcaattatgccaacataccagtttataaaaaatcttcttagaaatgttgatgacattaagcttgatgctgatcatcttatggttatcagccctgacgaaggtgctatgggtagagttgtctactacgctaacgttcttggaattaatgtaggtatgttctacaaacgtcgtgattttactactatcgtagacggacgtaatcctattgtggctcatgaataccttggtgattcagttgaaggtaaggacgttcttattattgatgatatgatttcttcaggtgatagcatgcttgatgttgctaagcagcttaagaagagaaaagctaacagagtatttgttgcttctacatttggtctctttactaacggtcttgaaagatttgatgaagcttacgaacagggacttatctacagaatcatgacaactaactcaatttaccagtctccagagcttcttcagagagaatggtacatcaatgtagacattacaaagttcactgcaacattcattgacagactaaatcatgacgcttctataagcgatttattaaatcctatagaaaaaattaataaaaaggttgcagaatacaacaaaaggtaatataatgtgacatagagggcttcgacttatccccccatttttttgtagaagccccatataccaaaggtgctcgctaggtttcctagcgagcattttttttgtggcgaatttctacttattagtggaatttggaatcacgcatagtttgtattggcaagaattttttctgcaatttctagatttttgaatttattttggcgatgtaccccgatattttaaatattgattatttcttctatgttatgtaaacctactattgtattcataagcttctctgggaacttgcaacagacctgacacttttttccttccaccactacaaaaacccccgtaggaattggctcctgccaattccctacgggggtgaatcaatctatttttctatattaagctttactccacgccaaactgcaacaatttccttgcgtctgtccagcgctgttcatctgtgctgtcatttaagactacgcttatgcattccgtgtcgccattctttgccactgacacaaggcacttgcctgcaaggcctgtacttcctgttttcatgccgacacagtactggtagtagaactgtcctgacttgtccagtagggcatttgttgatacccaagtcttgtttaatgtgccggacttttcagactgtgttccgcaaatcttacgaattgtttcgttattgtatgcttcaattgcaatcttagacaagtcgctagctgatgtgtactggtctgccgcatcatagccatccggtgacataaaatgtgtattttcaagttccatgtcacggacattcttattcatctcataaacaaaacgctcaacacactgtgctgctgtaaaagtttttccttcgttagcaatattgtctttaagaattgcttcgcctgctgcttttgccaaaacataggctgcgtcatttcctgatgaaataagcaaaccttcaagcaactcctgaactgttacaacctgtccctgactaaaacctgccttacttgaatctgctgcaatcatattaatttcactgccgattgttactatatcagtagttttcatattctgcaaaacagtcaaagctgtcataagcttagttgtgcttgccggatacatcttggcatcgctatttttttcataataaatctcttttgaattaacattcacaagaatagctgccttggcacttatagccttgtcaaaaccgctctttcctgctgattccgtgtattcgattggatgaagtccataatcagtccacggatttttttcgctaatctcatagttatcgtggataaaatctttaacaataacttcactctggcttgtctttaaatcgcctaccggcttcgcctttcctattacaaatgcataatcaattgctccaatcataagaagcactgcaataactgcgcttaatatgcatcttcctgtctttctcatttaacatcctccaatgtaaatatcgcttccttgaaattaatgttattccattgtgattctgccgtaacattatttccctttttccattttatatacatttccttcgtggaacttccatctttttccatctttttctcagttttatcagcaatttctgccttttcaaaaaccttaatcaaacggccttcactaatatttattttctttgcaagcttaacattggtgttcttaaaatactctaaagcctttgttttaacagataacttttctttctttgtaagcttaatatcatattgtgatgaaatttcattaagccattccctcttgcaaatatcgtcaagcacaaggcttttgacaccctgctcccaagtcacattgccatccatttttgagtcccagtctatttccttgccctttgtaagataataagtttcataagtcgcctgggctgtatacgcataataccttacctcgtcaagcataacctgactaccgcctgcagtaatagtaagagtagtatctgccccgtcagaaccggttgagcttttcgaagctgttccctttaaaactgttgaactctcggaacctgtttcacttgtagccaccgtggtttcctccactgcttttccctgaccacaacctacaagtcccatcgcaactgtaagtcctaccaaaatacatattaacttttttctcaaagacaatcacctcccctgacttgccactatatacaatctattcccattaccttatcttttcaactattttagtcacagcatatgtgactgactctacagttgtatattttcacaatatatttcaactgctttagtcgtagctcacataccttattctattcttcatccttcaatgtagacagtgattctaccagttttcttgcattttctattactgtgcctgtgcccggttttggctcaaaaataaaatacggctcgtctttaggcataaacttaagtctgcctttgtactcgcggacaagaattggtattctttccacatccacctcagcgtctttccacattgtaagcttgattctgtttttattacctgaaatttcagtaacatatgcctgatgtgctgcatttttaagcaaaacaatctggagaaggttttcaacctgattcggtatgtcaccgaaacggtcaagaagttcatcctgcatatcctcgtattcttccattgtctctattcctgcaattcgcttgtaaatgtccattttaagagcttcatttttaatatatgaaggtggaacaaaagcatccactgtcaggtctacctttgtttcaaaatcatccattggcttgttgccctttaaagtattaatggcatcgttaagcattttgcaataaaggtcgtaaccaacatcctccatgtgaccgctttgtgcagccccaagaagatttccggtaccacggatttcaaggtctcgcattgcaatttttacaccactgccaagttccgtaaaatcccttattgccccaagtcgcttttccgcaacttccgtaagcatcttgtttctgctatacatcaaaaaagcatacgatgtacggtttgaacggcctacacggccacgaagctgataaagctgggacaagcccattttttctgcatcgtgtattataatggtgttggcatttggtatgtcaagacctgtttctattattgtagttgttacaagaacatcaatgtccccgttaacaaaatcatacattatttcttcaagctgtcgctcactcatctgtccgtgtgcaaaggcaacactggcatcaggcacaagtgcctgaacttttcctgccatttcagctatgtcctgaaccctgttgtacacgtaataaacctgaccgcctcttgcaagctccctgtttatggcatcccttgcaatttcctcattgtattccataacaaaagtctgtattggcatacgttcctgaggcggttcttccattacgcacatatctcttattccaataaggctcatatgaagagttcttggaatcggagttgctgtaagagtcattacgtcaacattatttttcaattctttaatctgttccttatgttttacgccaaatctctgctcttcatcaataatcaaaagtcccaaatccttaaatttaacatcttttgaaagcatacgatgagttccaataacaacgtcaacataacctttattcaaatcttttattgttttatcaatatttgattttgttctaaatcttgaaagcatttccactctgacagggaaatccttaaatctctgcttaaaagttttgtagtgttgctgggccaaaaccgttgttggaacaagataagccacctgcttgtcatcctgcactgccttaaaagccgcacgaattgccacttctgtcttgccaaaacctacgtctccgcaaatcagtctgtccataattttcgtgctttccatatctttttttacttcagatatggcattaagctgatcatctgtctcctcaaatggaaacatttcctcgaattccttctgccattccgtgtcaggagaaaactgatatccgttgctgttctcccttattgcataaagctgaacaagctccttcgcaatatccgcaacagccttcttaaccctggtctttgtttttttccattcctggccacctaatgtgttaagtttaggcggtttcgccgtgctgtcagcatatttttgaatcatatcaagctgggttgctaacacataaaggttgctgcccttggcatattcaatcttaatgtaatcctttacaatatggtctacttctattttttctattccacgataaacaccaagtccgtggttttcgtggacaacataatcaccaatgttaaggtcggtaaaacttgaaatattagtacctgaatagccatgctttctacgttttcttttctttttttcgccaaaaatatccgtgtctgaaatagccacaaacttaatcatagggtacataaagccactgcgaagctgaccttttataatcataacttcaccaggcataacctgacgttccccgtcttcttcgaaaaatgcgctaatctcaaactctctaagatcctccgccaaacgctggcctcttgtttttgaaccggttacaagaagaaccgcatatttttgctctttatatttttttaaatcctgaacaagaatctcaaacttgccattgtatggacttacgtttcttgatcccacttccacaaaatcatccacgctaaatccctgaatcttctgggcaattgctgtaaataggactttttcgccactatcaatcttggcaattatctgatttttgtcccaaattacatctgtctgccccggaagcacgtagcctttctgaaggcggttagccatactatctccaaactccgcatctaccacgttaagttgctccgttaccctctttggctcatcaataaaaaatattggattttcaaaatagtcaagcagacttaccaaattatcataaaaatagtttacataactatctactgctacctgacttgggttaatatccatatttgtaagaaactcttcaactgtaactctaagtctgttagcctcttccgtcttaaaatcttttctgaatttttcaacattttggtctaaatcctgtcgaatcttcgccattcccgcctgaatttctttcttagtcagtgaatattcgctggcaggataaatttttaccgattcaaggttctcaattgagcgctggctttccacctcaaaactctttattatgtcaacctcatcgtcccaaaaatcaattcgataaggcacctcatctgtcagcgtgtaaatatcaacaatacttcctcgcaccgcaaactgtcccggtccatcaatctgaacaaccggctcgtatcccatctgcacaagcttgctctttaaggcatccatctgaattatgctgccttcttctatttcaagataattatttttgattttttcaattggcattatcttgtccataaaggcatccggcgtcaaaattaccgtaaatggcttatcttcaactattttttgaataaattcaagtcgttgttgcaatataagatttccgtgtacatccgcactaaagaaaataaaatcctttgcaggatacattacaacatcgtccgaaaagccctttaaatcctgatacaactgacttgcttttgttgcactaaaagtaacaatgactttctgcttgtagccattgctcaatccattaataaaatgagcaagctgggattccccacaccctgtaacctgacaggatttgtgttcagacaagcagaccttaacctgctcaaactcatttaattgtaatagtggataatcaaaacttttcatttactactcccggacttcactattttgatagattctagttgaatttattcattgctatatttatatcttctaattaaatttgttcattgctgtgtttatatcttccaaaatcataacttcaactgctgaggctgcatcttttataccctgctcagccaaaactctttcgcccttgctaaacttgccaagcacatgatttacaagatttccttcatttgcacctactcccacgcgcaccctcttaaacttctgagttcccgcgtgattaataatactcttcaaaccattatgaccgcctgcgctgccctgggctctaattctaattcttcccgtagccaaattaatatcgtcagaaataacaataatgtcattctccggatcaagcttatagaaatccataactgctctcactgactcaccgctaagattcatataagtctgtggcttcaccaaaatcactttctcgccaccaatatttccaataccgcataaagccttgtgtctcttagtcttcacctcaacacccatctgacttgccaactcatctataacatcaaaaccaatattgtgtcttgttttatcatattccttatcaggattccctaatccaaaaactgcatacataatcgtacctgccttctataatttacaaaatagtcttactcttaatgatactatttttaggagtttatttcaactaactaaggggattatgtttgtatttaatccttttaaaaaaaattacccctccgaaagctgacactttccgagggattcttctttttttaatatttacttttcatctcttgtaacaacacttattccaataccaattgcattaggtccaacgtgacatcctatactaaatgacaatgaatcataatatatatcgtggatttcgttttcaaatgtatcttttaccatcttgtaccactggtctgcgtcttcctgtttctggaatgttcctgctgctccaagtcttaactgttttctatctacatcagcaaatcttgtattaaggtcttcttcaatagcttctaacatcttaagttcagctttcttcattcctctaactttagtgaatgcatcaagcttttcaccctgaattgtaagtacaggcttaatgttaagaactgctcctatggctgctcctgctgctgtaacacgtcctccttttttaaggtattctaaagtatcaacagcaatgtaaatacttgaattgtaagcattttcttcaagtctcttttttatttcttctgctgtcattccctgattagccatccattttgcttcaagaactgactctctcattgttactgagattctgtggtcatcaacaacctgaacctttccgtcatattcttctgaaagctgaattgccgcgtgacatgaagcacttaatgcgcttgacattggaatgtaaacaacctgttcatagccttccttcaaaatgccatcccacatatccattacatccccgggtgatggctgtgatgttgtaacattctttcctgaagtcattgcgccataatattcttcctgtgtaatgttctttccttcgtaaaaaacatctccctctatgataaccggcattggaagagaatatattccaattttctttccttcttccggtgtaattccactattactatcagtcattactgctgttttcatattagtctaccctttctctaataattcatatttaatgttttctcgttatttcttctatatgattgtatctaaaacagcccaaatcaacaggcatatttttcccaatattaacttttacagtataacatctgattgctaattaatcaataacagtaagcatttagggaattcttgtttaaacacttggttttttatttctttcatatttttataaaaacgattcatttttctaaaaatagttttatgctaatacttttccttcagggaatattgttctaaatacttttcttactaatggtcctgcaataattaactggaatggtaatgccattacaaaattctttggtatgttagttaaccagatgaataatacgttgctgaaatcacccattctaatacttgcttcaactgcaccataaagtgacattataattaccattggaacaaccattgaacatgaaactgaaattacttttctaagtgtactgctatccggcttaactaaatatttaaaggcaaatcccttagccaatcctgaaactacaaaccaatccatacatgctgcaaatacataggcaattggaaatcctaaccatgcatccttaataacctgcgcgttaaatgttcctgtgtgtaatgttacgttgtaaatgctcatccataaaaccatagtgaagcacataattactgtgtaaataaaactttctctcttattctgtggcataataaatcctccttttattcttgtgttctttttcaacagtgaaatccatctgcattgctattctcgatgagttcagtgtggaagacttttattcaaacataagaagttctccgtttagctcatttcacataataaaaagtagagatgtaatagttgttaaactcgttaccatctctactttcgtatctgactttcactgcgttcttttaattttccttaggtattctacagtaaaattttatttttcgtaagtacttttttaaatttcggcactttaaacaataatatgtataaagctacgttaaggcacacactattgcataaaaagcctcacgaaataatgctgatattatcttacatttccgcctttcatggctgcctttctctgatacattttcttgtcagcattttcaagaagaatttttaagtttaattctgattttctctcagattttcaattaatttaaacacttccgggtgcttttcttttaaatgctcatcaagaacatgtcttctttccttaaatctttctgccatttcaggatgttcatccctgattcttctatgtatttcttctctatgcttttcgaaacgttcagcaatagttttttcatcttttcctgaaatattaacaatctcttttagatgttcttcaagatgctctaaccactcgtcctcgtcaaaagcatccatatgtgaccagcttccgtggaaaagtttctccatatctcctgttttctttaactgctgaatctgcagaacaatctgcttttcaatttgctcttcactttcagctccgtatgcccaaacgaactcctgaaccttgttatctactctttttcttgaagcacttctttcttcattttctacgccaccctctaaaggataaggtcttccaatgcccatatccttcaaagcaatgtgaatagttcttctaactcttccttcttcaatcatataccctagccccagtgttcgaagttgctcattaatctttgcaatatgttcagtaatataaaatctaatgcctttgtcttcaagtgacttgtacaacattgccagcctatctgctgcagttatatcaatacttccaacgccgcctgcatcaagaattacagctttggtatccggttttatgctgtcttcaatatcgcgttgcaacacctgaatattaccaaaaaataaattactgctaaatctataaattataactccttcaatggcatgtatttggcttccctcgtttaaatccctaaaatgtctatgccccggctgtattccaagaaaacatcttgaaggttttgacgttcttataatcatttctgtaaaagaaagaataataccaattaaaacaccatttattgttccaagtaaaagtacaccgagaaaagctcccataaaaattagaaattcagttctgcttaccttccacaaccttgccgccaagtcaaactccgttgcacccataagtgctgaaataactattgccgtcaaaataggaataggaagatatccgataaatcctgttccgcaaagaagtaacactatcatagaaaatcctgccacaatgcctgtaagctgagtttttgcctgatattgttcacccattgccgtacgggaaactgaaccgttaatagggcaacatcctgtaaaagcagccataaaattacctagggaaaatgcaaaaatctcctgattatcatttattctgtaattatttttttgagcaaaactattctctgccaacaaagtttcagccataattactactgccaccgacaaactgatggtaatagtctgctgaattggaatagccgggaaatcaggaatactccactttggaagtcccggctctactgcatttaaagtcttaattccccaatctcttattggaagacttattgtgaaaatcgtacccacaaacattaaaactactgccattggaaatttaggcattatcttcttcgaggcaaaaagtattaccagcgctatcactcccataattactgatggcatatttatattaagcgcagtcttatagatatgttcggctaattcgaaaaactctcctgtccccgatgtgcctcccataacctttggaatctgcattaatatgattgttgtacaaatacctgttataaaaccacccattaccggtgctgaaatgtaattaaccagctttccggctttcataaaataaaaagccaacaaccataaggcaacaaaaaacgtcataacaggaactgctgccatagccttgtctgaaccagcctctatgttaagtgtcaaaagcgctgaacctacaagagctgcaggagccgcgtccacaccaaatataaactgaggcgatgtagaaaaaagtccaaaaacaagaattggaaataccgaaccatacaatccgtaaactgcaggcagaccggctatctgtgcatatcccatagagataggaatagacaccgccataataataattcctgcaataatgtcctttataaaattgtctttgttataatttcttaatgtttgcaataattttatattcattttaaagtccttctattccgtttttccctattataactctatttttcttttttgttcacaaacattcttgttattaaagccactatcggggaaagtactcctgctatcggccacacaacccatgaaatatcccactttcctgttggaaatgaccatcctaaatagattgccacaaagattaaccagtacactagcataacggctccaacaacaggagcttctttctttttcttaacagtgtagtcgccttcctgcaataatacgtcaaaacttgaattaatgatgcctactctcacaaaaagattaactgccactgccacaatcagaagcaaaattgaaactgatatcaccacaatatcatctttttcgttaattcctgcgcaaagcattaatggcacacagcttaaaatacatagaactactccaattcctactgatattgtaaacttccccgagaaatcattcttcttttctctgacaatgccatcaacaccatattccgtttctatttcttctttgcctagaaattcatatttagaggattcccttccgcttaaaataaatagaaatactgctacagccaccattacaagaagtattgccacgcctattccgctggcaaaatcctctgtaattccaattcttctgctttcacttaaacctataagggcaatcaatggtgctgcagatgccacacataaagatactccaaatgctatgataggtgacgttttagtcttaattcgtaaaaattcatctgcctcttccatagtaacctttcgaagcttcttagaactttccgtacttttaaaaccatcaacgttttccgcttcttcaatttcatcttttaataagtaatcagttgtaacaccaaaaattcttgccaattccaaaattctgtttaaatcaggcactgactggccactttcccattttgaaaccgactgtcttgaaactgacaatttctcagccaactcttcctggttccaaccgttcttttttctttcttctgatattttttctgctaaaatcatattctactttcctttctgttcgaacatcctgattttaccataaatagccggttactggctataaagtcgccttggaaatttgtcaactgatggttgcaactgtgcaaagaagccctttatatgggctttttgctataaatcattctctgtttttaaagcattcctttaatatcttatataaacggcaccatatatacaggtatataattaataccattttcccatttataatctttggtatggacaacatatctgtctctaattcgactactgaacttatcgcaaaatacatctaacgatttgtgtcctctgtaattgcctgactttacctcaattgggcatattttatcacttacagaaattagaaaatctatctcatgcaaatgattagaagtttcactattcattgtgtaataaaacagattatctcctttagccaccaacatctgtgcgacaacattttcgtaaatgtatcccaaattagtttccagtttatcaaagagcaatttgttatatattacattttcagtatactttttatctttaaacgcaagtgttataaacaacccgatgtctgatgtgaacaacttatatcttccaatatctttctccaatgccattccaacatccgaattgttcgcatgataagcaatattcactgtaaacgagcttaacatatcaggtattaattctcgaacctgctctgctctcatcccttctcttgcactggacaaaacatatctggatgcattactgctgagatttgcaggaattgcatcatatatgtcgccagccaatcccgttccatctatttttttaaaatcttcttcatataaatcaataatctctcttttaatctcatcaactacctgcagattattatgttcaatatacgtttccacagcctgaggcattcctccaacaagcatatatagcctgaacatacgcataagatttcggtgcagtgcatttcctgctgactttttattttccaacaacatcttaattgtatctgtagtcacttcatcatctattgcccacaaaaattcttcaaaatccataggatacattgatattttgtgttcctcacttggaattaatatatctttcgtattcttttttattgacaaaagtgagcctgtttcaatatatttatatctcccgtctgccaccagatacttaattgcctgtcttgctttcggaagcaattgaacttcatcaaatatgattactgactctttctcatataatctaactcctgttagctgctgtaattgtagaaagaaaaaatctaagttatacgtatcatcaaacaattctattatttctttactcgtatgtgcaaaatcaattaaaatgtatgacttaaattctttttttgcaaactcctctgcaatagtagactttccaactcgtctggctcctttaatcaatagggcatatttgtcactacgcttttctttccattccagtatttcattatatatctttcttctaaaaactgattttggcatattttttcacctctctagcatcagtataacgcaaatccctattcatgtaaacgtaaattctacgcaaatccccactcgtttgtttctaattcctacgcaaatccctgttcgttttcatctgatttctacgcaaatccccgtttattactttttgggagcaattatattgataaataggtttctttttagtctaaacatttccattaactttattatcaatggcgcgcactaataattcatgtctttttcgtgtatctgcattcttaccacaatacgctctttcaatatattcttttttgactttccactttacatagattattattttatacagaaaaaatattcaaaagaggtacatatatgcagaatgacaaaaatttcttaggcacggctcctattggaaagcttcttctaaagctgtctattccaacggtaatcgcccagcttattaatatgctttataatgttgtagacagaatttatatcggacatattccgggggaaggcagtcttgctcttaccggagtcggcgtgtgcatgccgattattatgattgttactgcttttgcagcacttatcagttccggtggtgcgccaagagcttctatttgtatgggaaaacaagataataaatccgcagaacaaatattgggaaactgcttttctttacagattgttgtttctattgttcttacggtggttttgctgatttggaataaagatttgttaatggcttttggtgccagtaaaaatacacttggatacgcaacggactatatgcgtatttacgctttaggtacattgttcgttcagttaactctgggcatgaatgcttttattactgctcagggatttacaacaacttcaatggtttccgttcttatcggtgccatttgtaatattactttagaccctgtattcatttttgtttttaatatgggcgtaaaaggtgcagcccttgcaactgtgctgtcacaggcaatttcaaccatatgggtagttgtttttcttagtggcaaaaaaacacagcttcatctgcgaaaaaaatatatgggcttgaaacctaaagtttttcttccatgtgttgcactgggacttgcgacttttattatgcaggcaagcgaaagcgttgtaaccgtctgctttaactcatctctccttcattacggtggagatattgccgttggtgccatgactattttaaccagcgttatgcagtttgccatgttgccacttcagggaatcgcccaaggctcacagcctattgccagctataattacggtgcaaaaaatgcagacagggtaaagaaaactttccgtctgcttgtaattacatgcttaacatattccacattgctttgggctgcagtacaaattattccaaaagtattcgtaagtatttttacttccgacgcaaaactggttgcctttactgcaccaatgttaaaaatatatttgggtggtttattccttttcggaattcaaattgcctgtcagataacatttacgtcccttggcaaagcagtcaactctattattgttgctgttgtgcgtaagttcgtactgttgcttccgcttatttatattatgcctcacgttgtatctaatccaactattggcgtatacatggcagagcctattgcagatattattgctgtgctgtttacatctgttttgtttacattccagtttaaaaaagcacttgcacaaattaggaattctaataaaatgtaacgaagaatgtgatattcttattaaatttacaaaccgaaataatctttattagatgcccttgcgaacaacgaattatgaataattgtcatataatgattttggatatctctaattagcttctttgcgacatgaataatagctactcggtaaggataagaggctatttagttctacatcaaagatagaattatttacaccaacagtatttgctgctaactcctttaacttcaggaattgctgaggcaaaaaattgcctctggacaatgagcgaagtttttcataagaagctgaattcatgcgagccatcttttcagcagaaccatagttttcaagcagatacaaagcagtttttgaaaatcgctcattaaataatggcttgagctcgataacttaaataccgtaaatgaactaatacgatacggaataataagtgaagacaacaccaataaatttatatcactccatcagatgattatggaggtttcactagttgagaatatgccttctgtatcattatgcaaaaagctacttaatcatctacattttatttgccttgcaagaggtcttgatgtgacaagacctgtcattataactaatgcacttacaagtataaataaccacattattatagaacacaataactattatctttcttttcttcaggatatgttcccttactttgaaaagtacggattaattaacgtattgcccgacataataagcagaattgaattattgatgaatgaaaaagaatccactataaacgaactagacaaagcactgttgttggattacaaagtatggcttttactttcaaaaaaagaatatgacaatgctataaagaaatacaacaaagtaattagacttgtagaaaactatcataatttaaacgaaatatcagctcgctctgccaatcttctttcaaacatatacaataatcttgattacacaaccggaatgttttatcaaggtattattttccttaataaaaaagactataagaatgccgcttctgcattataatagcgagcattcaggtaataaagtcctgttaattcatcataaattccacctgtataacaaatttcattatagaaatcactatctgtttcaattgatgtttcgccatagtctgtataactgtaactctgactgcattcaccttttccatttgttatggctgttgtagagccctgaacatcctttgaatagaaatactcactctggctgccaccataatatctaatgcctgcaaatgtattgttctcatttcctatgatgttctggcttgtctttttaccattatcatccgttgtgtataatagtacacttccttcataataataacatgttgtggttgtgatggactttccatctgccgttgttgtttccgtctttctgattctctgtccctgaccgttataatcaccttcaatatttttattagcgtgttcaaatcctgatttcttgtatcaattattttctgttcactttcaataagaaaaaagcctttacttccatggctaataataagtctctatttttcaataactattgcaaaattatatcctgtttaagaaaatattttaattttaaagataaaaaattcttcatcctgcaatgctttatattctatattgtaattattcagaatattacttacgatatataaacctaatccattactattttccttatttaaatcaaatttaacatcaaatattttatccatattcgaaattttattgttaccgtatgaattctctatatataaccaatcattaactatcccaatattaattaccccatttacatcagtatattttaccgcattactaatcaaattagatagaacaatctttaaagctgtttttcctatataaatattctcatctaatatataattattgac

SEQ ID NO: 12708 - DNA, 1384 bp, Unknown
  gut microbiota DNA sequence
gtagtggtaggtttctctttcccacttttcgaaaaccggaataaggtaaaaatcgctaaagcacaggctcttaacattgacttgcaaaaggataatgctaccctgcaagtagagtccgaattggcacagctttaccgggaagcgaaaacactgcacgcttcgatggaagaatacagcaagactttccagtcgcaacaagatctgtcactgctgaaacaagctttgacaggtggacaaattagtatgattgaatatttcgttgaagtttctgtcatctatcaaagccatcaaaattatctgcaactggaaaatcagtaccagaaagcaatggcacggatttacaagagtaagctgtaaatagtacataaaatcctttagacatggattacgccgaacatattaatttctattttaagtgatgtaagtatgtttatataataatttcaggcacggattacacggatttcacggattacgctgttactttatgacaatcatatttctaaaagccgtgaaatccgtgtaacccgtgcctgaatatatctcccctctccctctcattttcttcaagttccaactaaatatttcaaaataatatgttacatttgcaacgaacataaaatacagattatgagacctaaacaattctatctattcatgttatgttgcatccttacactattcagtggatgtaaagaggatgaagaaaatccacttcgtttttacaacagtgaatatgaagtgcccatgggtggcagacgttaccttggactggaaagcggaaatggtgattactcacttgaagttaaagacacacgcatcgcaagcgcaggaaccgaaaccggctggaccggagtacctgccggacgtatgatttatgttaccggtattctcaccgggcaaacttatctgacagtaacggacaacgccacacaagaaacctgcaccctgccaatcaaggttgtcgacaattacgaggatataaagttgctccgcagctacttgtctaacttacccaacggagacgcaaatcttctgcccggcatttccgacatttttctaattaacaatcacgcacgggatgcttattttttcaaacagggagaacaaacagctttttcatccggactaaccttaataactcgaggaagttacaaactggaaaaagaagaaggaaataatgagaaagctatactgactctcaccttttcggaagatgtggcaacacctatttccaatcataaattcatcttgtggggaaacgcatacgtatttcaccgcttggataaaagcttgaatctgaattggaatactccacccatcggagaaacgcggacatcacctgcaccacctccttcctacacgctggaagaaatcgctggag

SEQ ID NO: 12709 - DNA, 705 bp, Unknown
  gut microbiota DNA sequence
agtgacgaagatgaagaatatccgtaatttttgcattatagcacatatagaccacgggaaatcgaccttggccgaccgtttgttggagtttacaaaaaccatccaggtaaccgaagggcagatgcttgacgatatggacctggaaaaggagagaggtattacgatcaagagccatgccatccagatggagtacgagtatgggggagagaagtatgtactgaatctgattgacactccgggacacgtggacttttcatacgaggtatcccgttccatagccgcctgtgaaggggcgctgctcattgtggacgcttcgcagggagtgcaggcgcagactatctcgaatctgtacatggcgttggagcatgacctggaaatcattcccgtgctgaacaaatgtgatatggcgagtgccatgcccgatgaggtggaagatgaaatcatcgacctgctgggctgcaaacatgaggatattatccgtgcctccggcaagaccggaatgggtgtggaggagatattgaaggcggtggtggaacgtatcccgcacccgacgggagacgaagaggcgccgctacaggctttgattttcgactcggtattcaattctttccgtggaatcatcgcgtattttaaaatagagaacggtgtgatccgcaaaggggacaaggtaaaattcttcaataccggcaaggagtatgatgcaga

SEQ ID NO: 12710 - DNA, 193 bp, Unknown
  gut microbiota DNA sequence
gaaggaaagaggagttatctccccggatgaaggatttcagtgtgtggttttgagtgtatgatcaaaaagaataacagtttcagcgaaggctgaaggaataatcctcgatagctcaatggtagagcactcggctgttaaccgaggggttgtaggttcgagccctactcggggagcttttttgcattaaaaaaca

SEQ ID NO: 12711 - DNA, 220 bp, Unknown
  gut microbiota DNA sequence
caaccttgttggtttcatcctcctgatgtcattgcaatcatgaataatcacaataagtggacctgcggggactcgaacccgggaccgaccggttatgagccggttgctctaaccaactgagctacaggtcctcacatgaaagccgatgaacggactcgaaccgttaacctgctgattacaaatcagctgctctgccaattgagccacatcggcgtatgaa

SEQ ID NO: 12712 - DNA, 326 bp, Unknown
  gut microbiota DNA sequence
gactcgaaccgttaacctgctgattacaaatcagctgctctgccaattgagccacatcggcgtatgaatttttcctattgcgtgccgctcgaaaatttcattttctcgctcgcaagatgactccaaggggatttgaacccctgttaccgccgtgaaagggcggtgtcttaaccgcttgaccatggagccttgtttcttatttctgtccttgttcgttttttccctgttttttctttcctcttccccgtctttcgcacttgttttttaatgcaaaaaagctccccgagtagggctcgaacctacaacccctcggttaacagccgagt

SEQ ID NO: 12713 - DNA, 18049 bp, Unknown
  gut microbiota DNA sequence
gggggcatatcatagattcgggtggttttcttatttttctcaaattactgtaataaataattgttttcagtttattctacatagtctgcacttcctaattgtgaatctgaactcttattgtttgtcttcttttctcttttccagtgttatagtcaatattccacctgctgtaataaagaaaactatcatccacaatgttatgttactgttctcacctgtttttggagtattatcattcacagatgttgttatgtattgtgtttcagtttctgttggattaaccattgttatcgtttcttctgtagttgcttctgttcttgaagttgtcgatacctgttctactgtagttgcttctgttcttgaagttgtcggtacctgttctactgtagttgtttcctgattagttgtaacctgttctgttgtggtcgtttcagggatagttgttgtagtttcaggagttggctttaactgaagggccttaattgcatcttcaatagcttttgccattgcgtcaactgctgactgttcagtatagtctttatcgcgaacaactgcatctatagctaatgttaccgcttcaaaatctatataatcatctttatttaaaacattcgccttggcaatagcttcatctactttagaataatctgcctgaaacagatatttttgattatatgttgaatatataaggctataatgaacattgtcccaaacctgtccaatgatatacataactcctaactgatttgaaccgtcaataataaatgccggatatgttggaaaatgactttcatctctatcgtacaacttctgtggaagtgtatctgtgtttccggttttaggatttatgtaatatatacaaatatcttcctgtttaaattctcttacctttccatctttatctttccagattccatcttttgatttttcatagtcctggccatctattgtaatattggttatatttgtatttaatggttcatatagaagtgctgtaatatatgtcggaataccatctttagacactattgaatacttagtatctcctgtttttgaaacatctgctaattctgtatttaccaaaccattctgctcatcattagaaatcttataaatctttccattattgtaatatgctattcccggaatatcagaatcaataactgatgcatatgtacttccatctgtaagtttttttacatcatttccattgtctatagccatctttaatgtggacgatttatatttgccaaaataataatttttcttcacaactttttcagccattacgtcataaatatttatctgctcagttggttcatcccaaaccgtcactacatcattacctacttttgcaattgcataggatgatatgtaattacaatctcttgcaaagaccattggaataagccttccattttcatcagtactattatcttctgaataaaatgtattattatcagggttatagtaaaaaccttctattccatatgctttcttgtcttctgtatcatagtacactatccatgatacaagaagctttccatcaatctctgttaccttcggagtatatgtactaatattctctgaatcataataagaaacattagtatttttaaattcaacatttgatgtactgtcaaagacagcaagagatactcgcatagattttgcaatatcttcactggtacttgattctgtaaactctttagtagcatttgtccaaacaattatgcccttatcattacctgaatatacaaaaggttccatatccaaagtaccgtcatcctcaacagataccggtactgaccatctttcgtctgtacctatggcatacacaacttcaggacaattaatctcactcctatctcctttatccgtaatgaaagccattatttttcttgtagtattaggaatagatgtcaacgttattttgtccttactatatgtgccttcctgtaataacgtattagaaacattactgtcctgagcagatattatggcaggcatagtgccaactaacaacgcaacagataatgtaagtgccacaaaccttctcttaacatattttacccttttcataaaactcctcctttacttaaacatttacaatttcaaagttcattcttaagtcttgtccgtttgactcatttttcatatgtaacttgaaattaatccgtatcatctgtatctaaaataattttacaatatgaacttgtgaaagtaaatacgaacgttttgcaaaagggagcatatcatttttaaacttctctctatctttttatattgtaccgccaaagagaagatgactgcaaacaataggcagattttcgaaattttgcgagtatagtgtacagcgataaacttactgtttgagccgaaggcgagtttaagttttcgctgtacaatagacgacggagcaaaataagaaaatcaacgtgtttgaaggcatcttctctcttcgatacataaaacacaatagggagcataaaaattatatgctcccttcttacaataattactatttcttgtttagttcctttgaaatcgtgttgtacactgtcattaaatttacagctttcacattttcatctgttgacaatttaatcttctttgcctgatcatcattaaagtctacatctatatctttcagatatttagaatacttgtgattaaaatatgtctgctgtgcattctttatgatttcttctttgtttttttctgtttcagtctttaaataactgtttacacaatatacaagataataatcttttccatcctgtataatgctgcttatttccgaattgcttaagttaaaagcactcttttcgtatgttttagtggcctcatttttctttaatattttctcaaacacgttatcttcactatactgctttgcttctctggcaaatgtctgataaccaccttttacaaggtctgtaactgttttaagtgtgcttttaatcttgtcttctttagtattgtcagtattcattctgatgtactgaatcttcattactcttgcttcttcatcgctaatctttgcgtctgcttctgctgccagtgcatcgtaaaccttgtccgccaaataataattcttatacaagctttccacgttttcctgtgaagctccggtatattctttttcctgacttgttaaggatttataatactctgccgctttagtcttaatcatactgctttcatctgttgacagggaaatatttctttcctttgccattgaagctaatgtatactgaactgttatgtcttctttaaccttttgcattacatatgactgcagtgtctgattgtcgcttactttggcattccaatctactttgccaccaaagtctgccttgtaagttcctgctgtatccataagaacaagcatatattcctgttttgaacatacttctttgtctattttaaacatttcactgctgccaagccccactatcttaccgataacaggtgtttttgaattaaaactgcatccagtaaaactgcttactgacaatgccacaaccaaacctaatgctactattttctttttcataagttctccttacattcgtattatatcttccaaaatcgtattaacattctctgctatgtgtttagctgaacgtcttacctcactgtctgcccactgcattgcataactaaaatatgcatggccaaacatttcaatgtcattgtatcctccgccaaaaacgactgtatcttcttctgatgaattaaacacatgctgtaaaacctgaatggcattaccttttgttacatactttgctgtaagatatagctgttcagggttggaaattgccacatttgcattctttgagaatttcttatagaaatactcatatgaagtctggtcaaagcctttctttgcaaaaatagtaatcttgttaatttcacccttcattgactttgtatctttttccttttcaggttcaattcccattgttctcaaataattaataaaatcaatatctcttgttgttacaactgcatttctctcacctgaaaataataacttataatccctgttcttttccagttcatttgccacttcaagacacacaagtctgtccaatggagtcttacttataactttatcacgatatataactgatccgccatcattacatatgtacacaatgtggtcctttgcttttccaaacataggatatactgcgtcataattacgtcctgttgccacagcaaaatagacgcctttttcctttaattccattatcaattcaatggtttcttcctgaaccatcttttccccgttaggaactaatgctgtttctaaatcactaactacaaaatttatcattacttcaccatttattttcttatttgtttaactgttgaatattttccataaacatatatgcctgacatattcctgtaggccattactttataataatacgtctttcctttcaaaagtccagtattattataagaaatttttgtctgtttttttatttcttttatttttgtatattttcctgttttactttcacttctgtagataatatatccactggcaccagccacctttttccaataaagttttgcaccttttgcggttgactttattgatgttattttcactttggccggctttggatatgcctttgaagccttagacttacttcccttataagttgtctttccaaccttcttatacccttttattttataatagtatttctttcccgttacaagatttttatctttataagacactgtagttccacttactttggctatggtcttatattttgaaccggaagtttttctatatatccaatatcctgttacatcaccaagtttgttccatgtaagtttaatactattgtatccgttgtttgttgcctttattgtagccgttcccggtacaaccttaaccttacatgtaacttttttgccattggcagttgtagctgttactgtacattctccaactgactttgcgtaaacatttcctcttgatgtaacctttgctatttttttgttggatgacttccatgtaacatttccatctgttgtattatttggagttactgtagcctttaatttttcttttgttccattttttaaatttaatgttgtcttgttaagttttatacctgttgcatgtatactttttgccaaaacatttattgttgacacactactttttcctgctgcagtaaaaccgtgtattgttacagttcctgcgcctatgcctttaacatttcctgcatcatctactgttgctattgccgggttgtctgacaaataataaacttgttcagatgtctttaaagtagtaggaagcttcaatcttcctgtttttgcaatagtatattcactttttaagtttacatatgctgccgaaacatatcctgtgtatttttttccatctttcacaaaactaactttgtaccaatacggattacttagccatcttactccatattcaatgtctgtattagaaacttctgtaactgtaactgcctgattctttggtaaaacaccaactgcatcatacgaagttgcaggaccttttctaacatttacgtcactatttgccacaccttttttgtttccacgtattccaagtgtaattgtattactttcatttggcatattattaaatacaggtataacaaatgttttggcatgagctgctattccaaggctttggtaagcatctgccgttgacgctgcttctgatgcggcacctgatatgttagtcatatattggtgtgtataaattgaatatgtaccattgctcttcacattaaatctttgaagatacatagtattctgtcctgcgttaatgtacttttcacctaaatactgtgccccacctaaaatagatttctgtggtgtgttccaaggtctttgataagtacttcctgactttgcccattttaaaccgttggcaattggattagcacttgatgtagctccaatattataaaaattataaattcctgtatatggctttgaatatgtacctgtaatacttccgctggcacccattcctgcgtattttgaattagctttagaaccaatttcctgcaaaatttttgaggcaatatggtacgcacttacctttgctgtctttgcagcagtcataatctgtgctgaatacaaagtattagttgtctgatactttccagccgtatcaatgtatcctatattgtttttatacataaacgaaccctgaagtattgcttcaacacctgcctgtgtctgagatgaactgtcatatgccaactgttcaaacatatatatgtggttttcatccaaaaagtttcttggatccataaaatatgccacacaattctttgatgcactaacccatgaagatccatcttttgctatgtacttacctgtggatgcattataatctccagccagatttgactttaaatacttactatacgcattctctataaggcttctgttatgacttgcctcattttcaacggctgtaaaaaaatccacgcctgtgttatccggtacaaacttccagttagggtatttattatgaagttttcttaaatatgttttataactttctggaaaaccattaatgcttgtctcaaaagcgtctgctgccttaactgttgtatccactattcctgcataattttccaaacctgtaaccaatgcaataattaatattactgcaagtattttccgtattagtcctttcttcaaataaatcaccctatcctttgtataacaaggtttatgccttagatgcacgaacctttactcctttagctcctctttttccgattttaagcttccttaaatcaacggtttttccgttacattttaccacctcattatcccccgtatcaagaaggtaaactttagaaacaaaatctccatcatttagtttaatacccttaactcccaatgtagccttcttcatttcaggcacttccttaagtgggaatcttaagaatattccttcttctgtctgtagcacaagaatctctcttgtatactgtaattcctgttcctgtcctacatccattgatgcagttgtatcaaacaattccatctgttcaaaatctaacggttcaaaatcatctgagccacctgttaacattacaggcatttcttcaacctgttcttctgaaatctgcttatttgatactcttgttattttaactgaaacaacctcatcatcttttccaagttttgtggcaagcattgtttttctgtttgtttcaaactcgcttccatctactaacttaatcataccatttttagttgtaaacaaaagtttcttatcttttatcatatcaaaacttacaagtgtcactatgctttcaccttggctactgtaatttccaagattatcaataggtatccctttctccctaaccttcttagttggaatggctgataccttaatctgatgaacatttccattatctgtaaagatacaaatactatctgtgttcatacatctgaaataatatttattctctttcgtaacagattcaatgtttctgtcaaatgctgccggatcaagaagttttgaatatccaaacttatcctgaacaaaaacaacttcctgttcaacaaaagcattctcatcaaatacagcttccttgccatcttcaataagagtctttctaggcaatgcatattctttcttaatggctttaagatcttttttgatagtctttgtcattgtttttctatttccaagaatatcctcatactgaccgattttgtccattagttcttcatattctttctgaagagctaatatttcaagtcctattaacttagataatctaagttccaaaatagcctgtgcctgacgctctgtaaaagaaagatttcctgcaagaatctcagactcaggatttttaaacttaatatcatcagtttttccatgtacaagacatgccttaacctgtttctgactctgtgaacctctgattatttcaataatcaaatcaataatgtttgttgccttaataagaccttccttaatctctttttgttctaatgccttattaagaagtgttgtatatttacgctgtgccagttcatactggaaatcaacgttatattttataatactcttaagtcccataacttccggtcttccatcagctattgctaacatatttacaccaaaagtatcttctaacttagtttttttatataaaatattttttaatttttcaacatcggcaccttttttaagctctaaaacaatacgaataccgttttcatctgagccgtttgaaatgtcaacaatgtctgttgtcttttttgtttctactaaatcaattacatctgaaataaactttccaatacctgcaccaatcatagtataaggtatttctgttataacaagtttatccttttctctgcctttgcctttttcaaattctaattttccacgaagcttaagctttcctgttccgctttcgtaaatgtcctttaagtctgacttattggctacaataccacctgttggaaaatcaggtcccggcataatctgtaataattcttcagttgtaatattattgttatccatatatgcaataacggcatctacaacttctccaagattatgtgttggaatgttagtcgccatacctacagcaataccttcagctccgttaaccaaaatatttggtactcttacaggaagaactgatggttctttttctgtttcatcaaagtttggtacaaaatcaactacatccttatccaaatctgccaaatatacatcctgtgtaaatttcttaagttttgcctctgtgtaacgcattgccgcagcgccgtcaccctcaattgaaccgaagtttccgtgaccgtcaactaatgccattccctttttaaagtcctgagccaaaactactaatgtttcatatattgaactatctccatgaggatggtacttacccattgtatcaccaacaatacgggctgacttacgatgtggtttatcataattaagacctaactggtccattgcgtaaagtacacgtctttgtacaggcttaagtccgtctcttgcatccggaagtgctcttgcacaaataacactcatggcataatctatatagcttttctgcattacttcagaatactctgtttttataatctgctctgccatttatttctcctaaatatctaattctgcgtctgttgcgtgagtataaataaaattacgtcttggtgcaacttcacttcccattaacatacttgttacatctgatgccatttttgcatcttcaatttctacctgcttcaaaattcttgtctccggattaagtgtagtttcccataactgttttggatccatttcacctaaacctttatatctttgaagtgtaaatcctgtatgatgttttctatatttttctaatgccttatcatcatataaatactcgccttcccccttcttaggcacaaccttgtaaagaggcggtgtagcaatataaatatgtccatgagttataagttcaggcataaatctatagaaaaatgttaataacaatgtgtcaatatgagctccgtcaacatccgcatcagtcataagaataattttgttgtatcttaatttttctatgtcaaaatcatttccataaccttcagaaaaaccacaaccaaaagcattaatcattgtttttatttctgcattggccaataccttatccattgaagccttttcaacgttaagaatctttcctcttattggcataatagcctgtgtctttctgtttcttgcgcttttagctgagcctccggcagaatcaccctccactataaagatttcacattcttccggttttctgctttcgcagtttgaaagtttaccattactgtcaattgaaaacttactttttgaaagaagatttgtttttgttctctcttctgcttttctgatttttgctgacttttcagcacaactaattacattttttaatgtttctaagtttttatcaaagaataatgtaagctgttctccggcaattgattttgttaccttttcagcatccgggttatcaagcttagtctttgtctgtccttcaaatcttggatcaggatgctttactgcaactacagccacaagaccgtttcttacatcagctcccgtaaagttattatctttctcttttaatataccaagttctcttgcatactgattaattgtagaagtcaaaattgacttaaagcctgtaatatgtgtaccaccttcctgtgtataaatattattacagaaacctgaaatattttctgtaaaatcattaatatactggaaagcaatttctacttctatgccgtcttgctctttcttaaaataaataatgtcagtaactttttccttctctttgttcatatcggaaataaaagccctaattccgttttcttcgtggaaagttacttcttcttcctctcctactcttttgtttataaaaataattgtaagattaggatttaaatatgctgtttcatgcaatctgctcttaattgcatcagccttaaaatatattttttcaaaaatctctgcatcagggaaaaatgaaactttagttcctgtatcattctttcggcactttcctgcttcttttaaatcataacaaacctttccctgttcatatctctggttgtatatttttccatctcgttttacattaacttcaagccataaagataatgcgttaacaactgatgaaccaactccgtgaaggcctccggaaatcttgtagtttccatctccaaatttaccacctgcatgtaaagttgtaaaaacaacttcgactgcaggtcttccaacctgttcattaatgtcaaccggaattcctcgtccgttatcttcaactgtagctgaaccatctttttcaagtgttactgtaatctctgaacagtatcctgccaaatgttcgtcaactgagttgtccactatttcatatattaaatggtttaatcctttagttccaacacttccaatatacattcccggtctttttctaaccggatccagtccttccagtacggaaatgctattgccatcataattatttgccattatattactaccttctgctattattgctgttatttttttattatttttctactattctttagtagctctgcttatgccaaattctatttctgtcaaattctattttttcttaaaaaatccacttccaaaatgtttacgaagtagtctgtcctcattttcaaaatgggcaaaatcattaaatctttcaacatgatatgttttgcttttttcatcatataaaagctgtgaaatactgcagttttcaatctgtcttccaactgcaagccagttcttatatggagcacccataattcctgtaaccaatgctctaagcacaccaccatgagtaactatacaaatattttcatagcctttctcaaggctgtcctttactatgtcatcaagtcctgccttagctctttcataaaccatctggcagttttctccatcaggataagtcatatctgttgtcatggttgaacgctgtgcaagatagtcaccatatttttcatcaatggcttcattagtcatacctgtcattgcaccaaaattagcttcctgaattctttcttcaattactcttggcttattaagatacttattaataatgtctgctgtttctttagctcttattaactgacttgaatatacaacatcaatatgatatgtctgtaatctttttccaacaaggtctgcctgctctcttccttccggtgaaagttcaacatctacattgcataatttactattctgtctgccatgtctaattaaataaatattcattttgcaatcctttctcatctatgcatattgatacatgttctttggtataacctttttatgtccttaatatgctattcctgtatcttatccttatcattactgcttatcaatatacttaatcattccgggtcccagcttgtctgttggtcttgctataaaaccaaacttcttatagaaattctctctccccactgcacacattaaatcaagcataattcttgttccaggcaactgaatctcttcaacataattaatcaggctttcgataatcatctgacctatgccctgtccctgatattcgggaattacaataaggtcctgtatataacagattacagctccgtcacctacgattcgccccattccaataggcttgtctccatcgtaagcaaccacagtcaaaagacttcccttaatagctgctgccgcctgctcctttgtaagactacgccagcttacagccgttcttaattctaaatatgtttttacatctaattcgttatcttttaagtacattgtttttccctttttagccattttaactaatatattatacactagttttccaaggggttcaagggtgaagaagctttatcaggttccgaaataggagaaatgcatatagtctcgtctgcttccccacagtcccctttcaaaaccgtatttttctaatatttttaccaatttgcagtttaatggtatggaatatttgtttttctttggtttccaaaatgaacctgccaaaacttttttcccatctatcatataattttcatttgagttgatgtcaaaggcaagtccaagacaatgttctgatgttgaactgtttccacgccagttgtagcatcccatttcatgtattggaaatctttctttgcttttgtatatttctttaaacatttcttttaccgatggtgcaattcctttgtttactgttaaatagaattttcgtgtaaactttcttcctccctgcttgtcccatacttttacagctactgttgtcacatgtttgcttgcctgttttgcatttttatattttttatagtatttctttccaaaaatacgtttacatctgctttcatatgactcgtttttgtatgtaaaataatcgcaatatttttcaaatggactcatttctccaagaagttttttgcccttgtagtttttgtatgcctgtattttataataataagcaactccatttgttaatttcttgtgtgtatatgttaatttgtttctactattgtatgtttttaattttttataacttccatcaattttcttagaataataaattatatatccgtcggcttcactattcttttcccatattattgtgtttgtccttttcttttttgatgttgcactctttacctttgttccattaattgtaacctgacagcttttataatttgaaaaatcaccataaaacgttccttcagaatatgtaatatatggtctgattttataataatatgtttttcccaattcaagatttttttcagtaaacgttgcctgtgattcatactcttgccaccaaaatatttccgacttattttcaacattggaaatccacttgtactcaccatcaacagattcacttctgtatattgcataacctgaacaatcctctgttttgttccacataattgttacgctatgattatttcccgcttttgcttcagttattgtaggaatttctaatggatttactattcctcctgtatataccggattactttctatttctctctctgtttcataatctgtatacaccgttgttattttataataatatgccattcctttattaggataatattcagtgtaactataatcaggtgtcgttgtaacatattcatatgttccgtcttttgatgttgcacaataaattttatactcctgtccttttaattcctcggatgttctccatcttattacaaaatttccattttccatctgactacttgttataattggtgctactaatttaatatcttgcgcatatacatttccttttattcccaaaatgcatataatagcccaaaataatatcattgctttttttatgttcttagtcatttgttttttcactttctccttcttttaattattctttacaaattataccatatttttctttattctctcccaaaagttatcaataaaaatcatcattaaatttattccaaaaaatattactaccaacataaaaatataactcatacacttctctgttcctattttttcataatttaagaaaaaatatggatatttgggtacattgataaactctgcctgactgttacatttgcatcttataaaaaaactaattatatatactagtggaaaaagaagccatgtaacagcatatctccacctaaacaatcctttaggctgaaacaaaatccaatctaaaataaacataaaaggaaccacataatgagccaaaatgctttctattggaagtccaaaaatccatatactattgtttgtcatcactattttgtattcagaaaagtgatataccaaaaacgtacagataatacaggatgttgccattcctttaaaataaatcaatgattttgctaaagtatcttttcctctgaaatgctttataagtaacacacacataagcactaaacaaaatatattactccataacgtaaaaaagctaaattcatgagcattataatctctgtcatttaagtcgaaatgtataaaaattcctattccacaaataattataaatgtaattctataaaataattctaatttgtttttcattctatatcacctgtgttcccctatgtacttcaaattttgtttttacatgattattatttacagatattctaaatatatagtttctaaaaaatagaaaaagcattgaaccaaaatctggcacaatgcttttctatattttattatcattatttttttacaacaaaaaactgttcgtcatgaataaacttcttattaactttgtttttcatctgccaaactcctatctgattctctctgtgagtccaactttcttctgaacttttctaagggttttgttggcaaaataagcagctttttcatcattttctttgataacgctatttaaatatgttttatctttctgaagttcataaaatctgtcctgtaaaggttttagtctgttagcaacacactctcctactgcaagcttgaattcaccatatcctttgccatcaaattctttttcaacctcttcaatagtctttcctgtaatacatgaataaatattaataaggttctgaatacccggcttatcatctgaatatctgatttccatatctgaatcagttacagctctcttaaacttacggataattgtatcaggatcatccattaacaaaatacttgcattaggattttcgtctgactttgacatctttcttgttggatcctgaaggctcataatcttagctgttgactttccaatgtatgcctcaggaattgtaaatacatcaccataaattccattaaatctgtttgcaatatctcttgtaagctctaagtgctgcttctggtcaacacctacaggtacaacatctgcctgatatagcaaaatatctgccgccataagtgatggatatgtaaaaagtcctgcattaatattatctgcatgtttagcagccttatccttaaactgagtcattctgtttaattcgcccatatatgtaaagcaattaaggatccatgcaagttcagcatgagcagaaacatgtgactgaaaataaatacaatttttttcaggatcaagtcctgctgcaacgtacaatgcatataaatctcttgctctctttctaagttcagcaggattctgtctaattgttaatgaatgtaaatctgctattgcataaaaacattcatattcttcctgcattttaagccaattatcaagtgctcccaaataatttcctaatgttaatgttcctgttgactgcatagcactatatgatacctttttatcgcctaacatattgttctcccttatatctttattttttgcttttatgttttatatttctatacttatttgattatcaaagcacccaagtcactatctctttattacacagattgacatatgcttccctatctcataatattatacatcataccactttttaaatggtttgtatatttattttattaagcactgctttaagttaagcctttattgcccagcgcatctttgttgaccttgctcttggattagtgttacattcctctgcacttggtcttataacatcttttgcaacttcactgtaaactccctgcttctgtaaagccttaaatgatttctttacaagacggtcttctcctgaatgaaatgtaagcactgccactcttcctccacttgccaaagcatccggaagtttttcaaggaaatcatacaacacttcaaattcattgtttacatcaattcttaatgcctgaaaaactcttgcacagcttttctttactgcttcttttctctctttttgtggcacaacacataaagctttctcaattacgttttttaaatcagtagttgtttcaatcttattatttgttctatttcttgcaactatagcttttgcaatttcatatgcatatggctcatctgagttttcaataaacattccttccagctcatctacagaaatatctctaagtctttctgctgccgaaattcctttttcaggattcaatcttaaatcaagtggtccttcatacttataagtaaaacctctttccggattgtcaatctgcattgatgacaccccaaggtccgccaaaataaaatcaaaaggtccatgttccttagctacctgatctatatttctaaaattagtatttattgtagtaagaacatctttcccaaaacctttgtctgccaaacgcttagttgtcttttttatttcaataggatcaatatccaatccatagatatgtccttttccatctaacttcttaagcatctgtaaagtatgtccaccatatccaagtgtggcatccagaccaatctgccccggtttaatatccaaaaactctagaatctcctttacacatattgaaatatgcatacctgccggagtacttcccttactaataaccttctcaatggtatccttatatttttccggattatgctctttatacttttcagcgtaagttcttggatgtgtgcctttgtaacgcacacgtcttttatgcggcttttcgctgtttatattttcgttattattttcattattgtttatgttttcgttattaatatccatattttaacgcccctttaagctagagtatgactagtataacatataaatttttccatttctatatcaacaaagaacactttatgccttctgtttgattttcgctataattcgtgttatatttttcctataatttttaaccgttatggtttgtaataggaggaagtttctatggaaaaaatagcaagttttacaatagaccatttaaaattattacccggcgtttatgtttcaagaaaagataaggttggccaacaggttattacaacttttgatattagaatgacacgccctaattttgaacctgttcttaatactgcagaagttcatacaattgagcatcttggcgcaacatttttaagaaatgattctgaatttaaagacaaaacaatatactttggtcctatgggatgcagaacaggattttatatggttttggctggtgattatgattcaaaagatgtagttgaacttgtaacaagaatgtttatatttatgaaagattttgagggagatgttcccggtgcatgtgccaaggactgtggcaactatcttgacatgaatttaaatatggcaaaatacgtatgtaacaagtactataatgaagttctaaaagatatagacgaaacaagactggtatatcctaaataaaagactttctcgtttacgttgaaagttatttaatattgcaagaaaaaagccctttcaaacacgttgattttctcattttgctccgtcgtctattgtacagtgaaaacttaaactcgcctacggctcagacaataagtttatcactgtacactatactcgcaaaatttcaaaaatctgcctattgtttgcaatggcttttttctctcaatattattttaaataactttcaacttaaaaagtgccttttatccac

SEQ ID NO: 12714 - DNA, 310 bp, Unknown
  gut microbiota DNA sequence
tgttcctcctaatatctacgcatttcaccgctacactaggaattccacttacccctccgacactctagtcctacagtttccaatgcagtcccggggttgagccccgggttttcacatcagacttgcaggaccgcctacgctccctttacacccagtaaatccggataacgcttgctccatacgtattaccgcggctgctggcacgtatttagccggagcttcttagtcaggtaccgtcattatcttccctgctgatagagctttacataccgaaatacttcatcgctcacgcggcgtcgctgcatcaggg

SEQ ID NO: 12715 - DNA, 3093 bp, Unknown
  gut microbiota DNA sequence
cttctcataatatccgggtatcttatctgtcattatttctaacagtaatctctcctccggaaaaaccggtctaatatcagtggttaatcttctgccgctacttccacaacactgacattccttctgatacaatggcaccttgcaggtttcgcaccagtatatgtttgatttcgtcagttcagttctctgtccacacacaggacaggtactgcttttagttttaatattgtcatttctgcatatgtaatttagcactttatcacctatctcaaatcttccggttttaaatgcaaataagaacataattccaaaaattctgatgccgtaaaagttacattctcatcagttaactttttctcccaaattccggtatccttagaaatctgtgatgtagatatttctttttcttttatgtatttaattaatgcttttgaaacgctgttattatttttcatttgtcaccgccattcccgtattacaagaaaataatattataatgtctattatattctctgtattcaagaaatgcaatgtggatttttcccgaattaaaagaattcaaaaggatttttcctcttttcaaggtgatttggttgacgttgattttttcttactatattatttaaaaagaggtatttaaaatgaagaatagaaagattgcagaagtattaaaagcttaccgaaaaatgaataatttaagtgtgagggacgttactgaattactggaagaaaagtcacttaaggtagctgaaaaaaccgtttacggatgggaaagcagtgccactcagcctgacgctgacacactacttctactttgtgatatttataatattgataacattcttggcactttcggatatactgacgatgagccaattaatcttacaaaacatgaacatcacttaatagaacaatatagaaagcaccctgaaatacaggatgcagtagataagctgttggatattaattaatagttagtaagatgaaattatttacatttcaaagaattaacagggcttaatgctaattagtttgttgcaaaacattaattagcattaaagctctgttattttttgggggattaaaacaaaagagagcacaccaaaactgatgtgctcccaattaaaaagggtattttttatagtaatttatttaccatttaagatcaattacaagagcatctgccttatcatactgaagcaatgtactctgatcatttacatcatcataacagaatccgtaagcttttcccagaactgaatgttcatggaagaaacctgcatagaagtttgcaacactattcttgtaatacttacttggtgtgtaccatttgtcaggttctgttgcaacacctctgttaaatgctgcacaaagctgtgcttcaatagctttttcaacaccatttcctctgtcaaatgcgcccttgccttctaacacttcctgtgtatttggcttatcaacataataaactgtgctgtcaccttctcttgtaaatcgcatctgatttccaactactctaccaacgaagcttcctgattctgagctgaatcttaaatcttcattggcatatttgttccagaattcattaatataattatcaaagtaatttccgtttgtctttccaacattaaatgtactcttacatggtgcaataattctatcatctcttacaagtgacttatattcatttggaacttcattcttaaatgcattgaagatttcatctcttgttccaacatcacctactacattatcatatccgccatataacgaacctcctattaaacgtgtaatcattgggaaacagaaataatcaacacgggttgtatttccccaataatgctttccttcaatagtaaactctgcgaactcaaataatgtgttagcattcacgtctccaggattgttaagatccggtccggcataacctgtagaaccaacaaacttaacatataccggctttccatagcttaagtacatccttcctgatctgatagttggagcatatacatgatctgattctgcaagtgtatgataaatatttgcatattttgttccgtttacttcaactgtgttaagactctctgatgcaggaatcatatttccgcctttgtccatatagcaaagctgattattttcattatttcctacaatgcaccagtaaatttcactgtcactatattttccattagtcttattgttaagttcaattgcaattctgtcatctcttaaaggaacattttccttaagttgtggcttaagttcttcaggacatgtttcaggttctgtttccttttcaccaattcctgtaatctgaatctgtgtttcaagtctttctgattctctttttcctacaactgttgtaattgctattgtatgtgttccttctgtataaacaggaagtcttaaagcctgtgctgaaattcccgtacgtcttctttctccatctacataaacattgtaacagtcaattgagccacgtccccatacaatattaacatatcctacacttgcctgacttacatccaaaccaaatggcttttcaattgaactgtctgttgtgaaagcaattgttgttgtttcctttggtttagttgtaggtttagctgttgttggtgctactgtaggcttagctgttggtgctactgttgtaggtgctgccgttggctgtgcctcaggagcttttgttgttgtgattgctccatcacctgtatatgtatatttaactgatgttatatttgaaaccttgttacccttaactgcggcaactcctactgtgtattctccggaaccctttgtaaataccgatttttcaagattaactgagtttccactaacatttgttacatatgctccatcaacatagacattatatgaatctacatctacaaccggtgcccatgcaaaataataaggtaaattagtatttcctgcccatacaagtccttcaggtgcctttatactttcgtctacatcctgtcccggtgctgttggcgccactgttacatctgtaggctttgctgttgaaggttccggtgcctttgttgttgctggctgtccgcttcctgcatatgtatatttaattgatgttat

SEQ ID NO: 12716 - DNA, 3846 bp, Unknown
  gut microbiota DNA sequence
agtttctgttcttacttttattatactcaatcaataaaatcaacacggttcagcaaattttaattatttccaatatgacaaaattgcttcctgttatatttatctatttctttatttctctattattccgatccggtcttccaaaggtataaataaggtgtaaattattcgtcaatcatcaaaaaatcctttaaagcctaggctttcacagcatccattaaacactgccgtggcagatgaataggatttttgtcataatttcttatttcctttcaaatgttctcatatgccgattaatacaggctttataagaaatatattatatattttttctttgcaaaaacttgtataactcagcattttataatatttaaatgaagtaaaaattgaagtaatcctctttcttttacctcaaaggttatttccagcaactcttttcatttcatcagcagcttcatcaaaacccaaatgtgtgtatgtatctaatgtaactgagatatcagagtgtcccattatatactgcaatgtttttggattcattctagctgctgccatcctggttttctcaaaatattgcttttattttaattgtttacgggcaaaatagcaatagaccgttatacataaaacttcatcattataatgaaatttttataatataacggtctactttattttttaattattatttctttaaaattctaacttttttaggttttgaccacttcttgcagccaacggctctaactcgtacaaaaagtttctttctcttttcaaatgcttttttagaaattgttacttttttatatttctttactgtctttgttacaataactgatgtaaactttttactcttagaaacctgtacctgatatcttttagcacctttaacttttctaaatgaaagcctgattttctttgaatttttcttctttgttgctttctttacaactgttgtttttaatgctttgtttggagtctttttctgtattttctttgttgttggagaggctgttgttccttcaggttttgtttcacctgaagctgttgttccctcaggttttgtttcacttggatttgttgttcctggagtaaccggcgttacacctttcccaatcttataatctccataaagaccatcctttgctccatttgtagaaactcctgcattattgtctgccttctcgtcttctcctgccttaaccatacgctggtaaacacgaacataatcaactaacattgttcctgatgtaaaactgctgtcaggtacataaccactgtcaaatgttccacctgctgcaagatttaaaataaggtaaaatctctggtcaaacggtgcatatgcatttcctctgtctgagcctgaataccactcaccatatgtacatttgaaatagcatttgccatcacagtaaatcttaatattttcagcatcccactgaacactgtatacatgccagtcgtcaatgcctgtctttttattaccatctcgtgttatgttaaatgcatctgatgtattaatattatttggccactgtgcaccataatgtaatgtaccaaataccatatttggtgttcttccacgtccttcaaatacatctatttcacctgataatggccatgaaccataacgtgagtcatttggaagcatccacatagcaggccatatgcctgtacctgtaggcatttttgctctgaaatcaactcgtccgtatttcactgagaatttatcttttgttgtaatctttcctgatgaatactgagcagttgctttcttagatggatcacctttttctgtaaatacctttgactgctttttcataagaatatttaatgcaccatcttttactgatacattgtctcttgtgtagtattcaagttcctgatttccccaaccggctgtgttaatatcgtcttctttaagtaagaatccttcatcatatgaccacttgcttgtgtcaagagatgcaccatcaaattcatcattaaaaatcatcttccaacctgccggtgtatatgcatttgaattgtcatttactttaatatctgacatatctgacggaagtgttggcttataagatgtatttcctttaattgtatacaatacatagttattgcttgcatctccaccttttttaccatcaataggatatgtgacttttatttctgtatcctgtcttacaggctggagccaaagtccataaacatgatcaacaaaataaccccactgactgcttagtgaatatttgttgtaaccacttccttcatatacccatccacaggctgcaacatctgtaagtggaatccactttccatctaccttaacttcgtatttaaataaatccaaatcatcttttatggcttctgttccaccaatttttggaagtggaataccaactgatgctgtatcacttgtgcttgcatcgtatgatgtgccattatatgctgtgattttgtaatttgatctggttggctttgtatatgtaacttttacatcctgatgtacatttggatttgactttgatgcaaatcttaatgtaaatgaccaactgatatttgtaaaccaatatccaccatcaccatctgagtaatatccaaagttctgatcccacagaaatcctgatgctgcattgcctaaaaactgaacaaatccttttccgtcattgttgtctactgtaatgttaacatcatcctgaatctgttcatacttgatactcttgtctccattaaatgtccatgctccccaatgtgtagctgaaccacctgttgtatctgcctgaatatttgtttctgttgtagaaatacttgtaagcttatactttgaaagtttgttaagttccaatttgtaatcaagatttatgttatttgtttttccatggaaacggaaatatgttgtttctgtaagtttcatccagcaaacccagccaccccatgactgatattcccatgcccaagtgtcattccacttgaagtaacttacatcttcaattttcttccattcaccatttgttccgttttcctgtttaacataaacctgaatgtctttttccacatctgcaatggaaagttcactactggcttttccgttaaactttggcattacaaatccatagctgactgtaccaactcctgaatgtgtaattgttggtccatcatttgttgaataataatccattgatgaaacaacttctgccgctgctccctttacatcattacctgaaaaaattactcctgctgaagtaagcaacaatgccagagacattacaacagaaattatttttttcatagtttttcccatactaaaaaattctttcataatccttcctttcttttcccttacggaaataatctcgctataccgccttttaattatatgaatattcattttttctttaaatggtctgtatttttatatggtattcaaattttataaaaacgttttaattattataataactttttactttccttttagttgctccaaacaaatcttttggggtatctcttaaactagcttgcttagaacgattacaatgcttacaaatacattgtaaatttaatacggaatctcttccaccatatttctgtggaataatgtggtcaatatccatatcaccttttctgaaactacgtccacacttaatacatttataccaaccattgtcgttatcatatgcatcatttttatcaaaataattgcttctataaacccatatcttctctcctttctgcttgtttttactctgtatctaaacttttttatagttttggattattatactacagctataaaaatattacaattatatatcatataatttgaggtgatttcatgaaggatattga

SEQ ID NO: 12717 - DNA, 208 bp, Unknown
  gut microbiota DNA sequence
tgggacctacagggctcgaacctgtgaccccctgcttgtaaggcagatgctctcccagctgagctaagatcccatgctttcggtttgttttctcccgtcctcacgggctgtgctggatttattttcatcaggatttatcacaaccttgttggtttcatcctcctgatgtcattgcaatcatgaataatcacaataagtggacctgcgg

SEQ ID NO: 12718 - DNA, 14083 bp, Unknown
  gut microbiota DNA sequence
tagcaatccaatttagttattaacgaagaattaagcaaactcttcttttaaagttggtccattttatctggaccaactttggaccaaattcggtccaacttttgtgattagttatgatattatgcaataagttgtgtattctcattggacaagaaaatttttatttaagtacctgattaataatcgccaagcccatctaattgatttgcttcgcaaatcaattagcacgcgtcattcgcagaatgacgcataacataaaaagagataggtcctcaattatgcaagcatatgagaatcctatctctttttatgttacgtcgctctgctcaaagcttcgcgataattatttcatctgaagtgataactttttttattattctccttcaataaactttactttcagttttccagaatatgtttgttctaatttctccttttctacaaacttatgtggaatttcatacttagctaattttttttgacatatggaatatatgctattctttatttcataactattctttttttcttttttatttagtgtatattcacaaataattttttgaccatatatttcatctttctgagcatatactatacattctcttaccaaaccactatcaataagtatattttctattgtttctggaaatatattgtgtgcaccagaaataatcattcgatcttttctaccaatgatatacaattccccattttctcctatatatccaacatcattcgtatcaaaatattttttcttttctctttctttggtaatatacccatcatatatcgtatcactatatatacgaatatatcctttctcacccacttctttttcttttccatgtatatcatgtatagtcacctttatattttcaagaggttttcccaccgacataatttcatttatacttttctcgctatctacttttactgtcaccatcgcacttgtttcggtcaatccataagaattaattattttacaattaaaatattttttcgataaacaatacatttttttcgataaaattgccccactacaagttaccatctccaattttttaaatttataatatttatggtctaaatttaataaacttataattgttggatttatacttatatgagtaacatcatactttatcatattggatatattttttctcataattgtactaattgggctaatatacatttgtgcatgtgatattaatgcaaccattagttcaccaatgaaactagcacaatgtgcaaatgttttataaatatacaaaacactactttcattaacattttttatcttcataatcttttttgcactagttgttattgaataatgtgatagacttattcctttatttcttcctgttgttccagaactaaacaatacaattgcttctttatcactttcattacaataatattgcgaataaacatattggggcagtttgcatacttttttactattatctattaaagctgtaatcatatgttgttcttttgcaaattgatataattcaatattatctgtaattacttcttcaacgttactatcttttaacaattcgacacactttaaatgtggaattctactatctaataagactacactataaccatttttccatgcccaaagtaccttttcaacatatttaatactattatctgcaattattgcgactctacgattcattattttctccaaatttacctgtttatttactcacgtatttcttgaatacaactatattacaatacctcctctgccttaaactccctattgttctatattgcattaactattatttcatttttattatcaatataatctaaactccgattacctactataaaatgatagaaagtctctatttgatatttcccattataaaaactatatattttttatctattttcataacttattttctaatattaccccaaaaaaataaaagctattacacaatagcttttatttttcgtaactttcacccagaaaattattacacatataatagaaacatctacctttaacataatttgaaatttttatttttctctcttaaatcaaccttaattattttacccctcgaattaccatcgttacagacacatttgtatcccacaatttaattcctttatcgtaaagtgctaatcgataatcatattttttgttgactaatctttttaactcttctatttcagattcatcaacaatattaggtgcaatatatgataatccatttatattatcaatattaacttgacgattagcatttatcatagcatacgctgtttctctagaataaatgggattgtctggagttaaattaattgtaatatattcagtacttacatttttaaatccatttttttccatatttagtggtatttccgattcattctgttgatataaacatatatcatattttttttcaatgtcgtagaaatagttttcaacacgtttccaaatttgtttttcaaactcagattgttctataacacactgcgaataaatattaattccgtttctagccgataaaacaagacaaacaccatttttttttaataccctatattgttcaccataaaattttgatggttcaatatgttccgcaacagtatttgaaattgttacatctaaactattattatcgaattttaaccttgttgcgtccccttcactaaaataaatagacgaactttttttactagcataattaataaaattgctatccctgtcaatagcataaatactaatattgggataccaacgccgaagagattctgctaatgcacctggcccacatcctatttccaacaatttaagattacttctgtcttcaattttaaaagcctttaaatatttgtccttatatatatccgaaaacctaagtgaacgagtgtcataaagggttcctattttctgtacataagttgaccatattgtattcatagtatcctccaacattaactttctctctataaatataaccaactatattataccataatttatactctaaataaacgaatgttttgtctataaaacaataaaccacttataatttgaaagtgacatatctagcatttcatataatatcattatagctcactgcttctacataccatcactgaatattgctatccatctatattcttctcctactttttatgaatatactcaacttctgcgtccactactccccatcataaaaacaatagctttaagaaaatacgactataaaaaggaatacgacatgaagtagtatttccagacactgttcagtcagtgtgaagtaccaatggatactaattcacgctgtccccaatcatctagttgtcattaatgttctcattgaaaactataagtcagaaaaaactctcacattttctgcctctgaattcatccgccaccattgacctattctatgttactatgtaaaagtctttaaaagctatgacattacttacggtgttggttttaaatcccctctgatatatctgaaatcttccttgtcgatgctttttttctataatttacttgataatgtcatgcaaactaatatgaatatttattctattatatatctctcaaaaaagcatacgaacatcatcgtaacaaatgaacaaactccttccacatccatctgcgattaatcaaaaatttccatcacgcatacaaaaagtaaataattttttgaaataaatagtatccatcacaccacataaaaatattataactatattaagctgtattttgagacaaaaccctgagcttttcgtccctttatttttgtgcagaataaatattcacacctaacagtagtgaatatctattttgctataatttataattatttatcttaccttttttcctgcttcattataggtaaatctgtaccttctagcatcgtaaaatcatcttctttcaataccattaaatccactgcagtataataactttcaatcacctccccatacaacttttccctaaactcttttgtcactggaaagcatatatccttatatcctgcctttccatctttatctttctgctttgttctatatgagggcattgccacaaacacattatcctttccctgaatcagtgtcacattatttattacaaatttgtcatccaaataaattcttgcaagaccttttatattgctcccctctctttcgtacggcgtaacttttactgtaaatggtggctcctctacctcagttttttctgtatttagctcattattttcttttccagcattcttatatccttcaattattgcatcatacaattctgtacggaactcctttgttatagggttgcatatgtccttaaaaacgaaattattatgctcatccacctcactgcttctataccttggcattgatacaaacagatttccattgctattttcaagaatggcaatgtttgtaattttaaatgactcaccaaatactactgttgcaaaccctcttaaatttccttcattttttcttactttatttacttttactgtatacttcatttttttctccttctctactatatatttcttctttttctgtttcttttatttcttcaccaatattcttttccaaatccaacatagcatttaattctgcctgacgttttaacttctccttaagctcttccgcataaacaaaaggcttttcatattctatttttgaagattctaaatctcttttatattgttctatcttcttttttagaaactcttcattttcttctatgttattaaacatattatccagctttatcatatttccaacagcacttgtagacatttctgccttatactcgttttttccctgaagtattaagaaatttattcccatataattcttttcaaccaacagattaaatcctctgaactttccaatctcataaatatcacctgctttatacttgcttatctcttcaagcattgctgtccctccatcgtttctctcggtatacaacatattacctattattattgaaaattcttcgctttttacacgctcagcatttctaagttcaatgtcctttctcacacattcaattttttcttctgctgctttaattaatttaggaaacttaatcataaaattatcctgaaaagtatatctttggctgtcataagatgctttcagtatttttaatcgctgcaattcattgtcaacttccattttttcttttattaatggatttcctgtagcaactgcctttatttctgcatatgacaatgttgcctcatctatgtcttcacacgttcttgatacagccctgctcgtcattatctgactaataaatctctgcttattctctaccagtgaccatgagtacgcatcaaatgtttcttttgtaacatatctgtacactgctacttctttattttcatttccttgtcgtattccccttccctctctctgctcaatgctcgacggtttccatggacaatctacgtgatgaattgccacaatatgtgtttgtacatttactcccgtaccacatttatctgtagaaccaataagtattttcttctttcctgctctcattgatttaaataatgtttctctctgtgcatctgtttttgcatcatgtataaatgctatttcattttcaggtatgtttctttttataagttctttttttatgtaattatatacgtcaaaatccttttccccaggtgttcctatatctgaaaaaataagctgacatcctattttttcttcatcttttgcttttccatattcataaaacacattatcaattaccttatttaattttccgtcaggattattgggtgcgtctttatcaagaagtctcgcatccgttccaagcagtcttgcctcatgggtaattttcaaaaaattatctatgcttgaatccactccaccatttctgatagcctccgctctcctaacaaaatcctccattatctgccttacgtaccaatctggttctgattccacaataatgtattgaccgtctcttaatttaggaacattgagttcaagcatatcctgtgtttgcacgtctgctacctgtttaaatatattcattaactctggtaaattggtaaatttattaaatctgtttttcattctaaagccacttccctcaactgtaagttctaatgctgttgttatttcaccgaaattggctgcccatgaatcaaaatgatatattcccatctgttccaacgtatctttttgaaggtaactttgcattacatacatctcacacatagtattactaattggggttcctgtagcaaaaacgattcctcttccgggatttatctcattaatatattggcattttaattgcatatctgttgctttttttgctcccgaaccactaattcccgaaacattatttatctttgaaaatattgctaaattcttgtaattatgggcttcatctaccataatactgtcaataccaagctcctcaaaagtaattaaatcatctttcctttcttcgtctgcaagactctttaattgttcttgaagctttttcttctgtgcttccatctgtttaacagtccagcgctcaccattcttttcttttgtctcctctatggcatatgctatctgctctatttgttcattaagcattctttcctttctcgctactgaaattgggattttttcaaactgcgagtgagacattattatgcaatcataatctcccgttgcaattcttgatataaactgttgtctcctactcttttcaaaatcacgttcggttgttactagaatgtttgcagatgggtataatctcaaaaattcagatgctgtttgatttatcaatgcctttggaactaccattactgttttatttgcaagaccaagtcttttttgttccatacaggctgccatcatctcaaatgattttcctgctcccacacaatgggcaagtaatgtattacctccaagcagaattcttgctaccgcatttttctgatgagatcgcaactctatttcaggattcattcccggaaatgaaagtaccgagccatcgtattcacgaagtcttatattgttaaatatttcattgtaataatcaacatacttctttcgtctaaccgaatccgcaaatatccattctctaaatttttccttaataagattctgcttttctcttgcaagcattgtttcatttctattaatcacataatgatattttccatctccgtcatcaattttgtctcttactgttacggtttttaggttaagtgatgcttcaaaaatagaataagcatccatgcggcttgttccatatgttttggaagctgccacagaatgcttatcctttgatttattttctataaaccattccatgctatatttatttagatgaacaataatacctgatgtatactttccacttcttattgcccttactctttgtggtgttccaagcaattcataaataaattgctcatagtcctgttcatcaatccatgttgttcctatccttatatcaatctccgaagcatcaaggtctattggttggactttttttaattcttccacgtttatttgaaataattccggctgttcctttgcaaatctttctgctattacaagtttacttctaacatttccagacaaatattcatctgacgtttcccatccttcatccggatttttttcatcatactgcgttggattcaaaaatataattcctttaagttcttcaattaatttttgtcttttagttttaccactctccacattttttcctacttctccacttatatcaggtatgtatatgctcaaaataaatggaatgtttacttttccatattcatttatcgaaatattcaatgcctcaattgctgtctcaactctgtttattgttaattccggtttgatagtctgtttataaaacatatcagccttagtcacataaccattttcatccacattttcaagagagcacaacaaaggatagtctgcatcatcacggaatgctctgtcatttgcccttgaagtaattcttccatacttatctacaaatgtatcataactattatttaattctctttgagcattttttaattcttcttcactacatccttccgactgtatttcaataatatgtcttgttatacttcgtatttcgttaagagctttaattctatctattgttagttttgaatattcttttaaatacatttttgaattttgtctgaaatagagtttgccatccataaaggaatatgtataatttctaacatccgaatttgcaataattacttcatcattcttctctgtttcccctatttcaaaatctgatattgaagtattaacattatttagtgcattgctaaggctttcgtacatattaaaatttttatcattgtttacacaaacggtatactgactttcaactccatatcttcctgtatcatattccatttttcctaataccatttcaggatgttcgacaaaatatgaattaatcggtataccgtcttttgtataaccaagatgcacccagtcaggttctatatctatttgcctttccctttttttcaggaaaagaatgtctgatgtaacctttgttcctgcattgtttttaaatgcattatttggaagtcttacagcacccacaagttctgctctttgtgcaatatattttcttacatttggattagctttgtccatagttccttttgttgttatcaaagctgctattcctcccggtcttatcttatcgagtgtttttgcaataaaatagtcatggacccgaaaattaagtttattatattttgcatcatatattttgtaatctccaaacggtacatttcctatagcaatatcaaaaaaattgtcattaaaattcgtttcctcaaatcctgatattgtaatattagcagtttgataaagctgtttggctattcttcccgtaacttcatctatttccacaccatatagtttacattcgttcattgaagcaggcatacttccaaagaaattaccgattcccattgatggttcaagaatgtttcctttagatattcccaaatttgaaattttctaatttatgcacattgcaatctcgggagaagtataaaaagcattatttacacttgctctagcattgtcatattcggaatgtgtcaacaattcttttatttctctatattcatccctccataagttatttttttcatcaaatacttccgataatcctccccatcctgcatatcgcgaaagtattttctgctcttccatatttgcaattctttcttctttctcaattctttttagtgtttttattgcttccacattccatttgtatcttgtttttgcacctcccttttctatttcccataaattataatgataattgttttttaataatacatcgtttttatttgaatcatctttctttgatttttccatatccgctattggttttttgtccatttcaaaaacctcatcgggaatgtcataatctcctattatctcttcctcattgattttttcataataaattcctttatttataagaattccaatttcttcttctacagatttccaacttaaatatccttctttttccccttctatatctctccactgaaatcttataccctgtggtttaaatgtatcatatccatgtagtccataattctctattggccaaccggctccaccaagaccatattcctttttaattaatttttcacgttccgatgcctttgcaacatttttataaatgttatatactctttcctttccccctgcaaaacccgttccttttaacaatactgtaactatatattcatgcggcacaatccttgcatttttaggattcaagtatgtatatttctcttttttcccgcttggtaaattctttacccttttttcatctgatattcctatttcttttgtattttcatcaaagaaaaaggaagcctgttcaaaacctgcttcctctcctattcctaatgaatcaatttcttctaattctctttctatttcttcatcaatagatatattctcttccgttccagatacactctctaatgaaatctgtacactatctgcttcagaactacttcttccgccatcatttttgcctgctcccttatcttccacatttccattgttgaagatggctccttcggcttgtgtatttttagataattcctcattaatgtttccaataaattgttggcttcctcgtccacttccttcatcttttcgcctaatctccctaaacgataaagtgtgttgtacctgtttctctcgttctctttcagatattctgctgccatcatcccgtatttttccacctgcgtcaaatcttctttctgaatttccggcagttttaggttgggatacaacattccatctgctttcttgtggtacatcagtctcatttcttccatttgtgactctcctttcattttcaatatgtcttactttgtaattaaactctttaagaacactacaggatacgtcacatacaagggaaccaaaacggtaaatatcatcttcatcggatatatttgttataaaacccatgtcctgttcttcagaggacaggtcaaaaccgcatcttgttcctactgcatagaaaacacttttatataacatttcctctactgtaggccccagcgttttattatctctatctttaatcacaccacctgtaatctgattaagttctgaaatcataacctctgatttctcccttattatagatcgcacatttatctttgtatagttctttaaaagcttttgtaaattatttttttcattacttacatatgtttgaatttttccctcgtcaatcagttcatctaccataatttttaaattataatcatttaaattccatgtgagattaacatttcttcctgctgtatcagatatatcgaacacatatcgcatatgtggtttcaaaactttcgatggaaaaattgcaattcccttacttcctctttttacatatcttcctacctttttccatgaatcataatctcccacaagagttgcgtttggtcgctgtgcatacatcattaaaatattatcaaattcatatctgtatactcttcctgttaattctaaaaattttttccatttatctgaatctgatacaatatccttaatatattcatcgtaaagtctctgtaccttgtaatcagcactcattattttctataacctcccttaacgcttctcttatgtcctttccatcaatttcatctcctaagctatcccatccttttactttatctcttgcaaatagttcaatacgtggtaattcgccacacaattcaactatacgttcccttatttctgcgggtttcttactatgttccattattcttgcatcacatatctgcgacactgactttgatacacgtttaggttgtccttttgttcctattaaacatacctccgaatttgaacgtgtccaaaatcccagtcctataaaatacgtgttctttttcttatttcttttcacccaattgaagccacacgtcttatatttaaatccccatctttccattacttctattccttcttttagacatggaaatgttatccataaaaataaaatacaatccttatcggcgattttatcgactggaagagccattatatctttaatattcattgtgtgataatgattctccgcacttcttccctgaccttttttggagtaaactctatattgccatggtggatctgcatatataattttgtacttttttcccactttagtcaccttctttcaatttcaccaaacttgtgtatttttcatactcatctttatctaaatttagcgtgacaaaatctgtctccttttttatttccaccagcagtttcttaataattcttaacataataaagttatcttttgacattttaatgctttccgtaaacatgatattttgattattgtcaataccatcctgctgccttactatgtttaacattacttttctttttagttcatttgcttcgtccttagttaacacaactttttctgtctctgaaccactgttttcccattccttatgaagttctccaattaaaaactccatatatcttaaatacatttccttcatttttcctccaatcaaaaaagagcagaaaaaatctactccttttttaaattattttttatttttgttaggtcttccaatcataactagcgaaccattatgataatcctgtaatactactcctgttgcctcgtcaactgcttccaccattttaccctttcctacatatattcccacgtgactgatatttttatatcttccgttatttgaataactgtaaaaaattaggtctcccggctttaaatctgtttcttttacaacacacccattatcattgcaccattttgcttcggctgctgctgtatttgccccatcacacattaccgatattccggcacttttccaagcataatatgctaatgatgagcaatcaaaatgtgttcctgaatttctaagtggctggctatatggatatcctacttttgataacacaaatgagcaaactgcatttgcattgatatcagttactccatttaatatttcgttaatttcttcctgtgataatgaggacttcttatttccaccatttactgttcctgaatttccattattatatcctaatgccaacattgcatccgaactcataagtgaattcaacagttctatttcattttcgttcatactatattctgtttccatctgataatatgttttcagacttacatcaacgtataatacttttttcttttccttctttcccttgtcatttttcatcttttcttcatttatggaagttgtgtatgtacacatatcgtcaaatactgtttttaactccgtctttgcattttcattcattactgttgccgtgtttccaattccatatttaaccatataaacactcattacatcataataatttgatggtgtatttgatgttccctcataatctttatacactatctttccaatatcacactctttatgttccgatactaacgtatttatttctctgttaaattctgctacatactgactggttactgtcattattgtatctccattttcaagtggtggaaaaaatattgaaaatggtgaattatatataagtgcaattacaagagctattattatggctgcaatgcatataatcataagaagaactaaagcaaatggtaataaacacattcctgcttttattaatatattttttacgctatccaatgttttcacgtttgcacttgtatctgatttattgtttttcaatttgcttgacacataatttaatttttgtttttttactttgtccgaaccgacatccttagttctttttaccttttccttacttctctgttcaaattttctgcaatccgattttacacttttatctttgcggtgtaccgttttattcttttcttttttttgcaatttgtttgaatctttactaggcaattgtttctttttacttctgttctttcctcttacactttttatgtgctcttcctttatatgtttttgttttacctgttcttttatatttttacctgtaatctctgccaccttggtaaaaggttttgtaataactgatgccgttactgatgcttctcttatctctttaccaccatctaactgttctacagactccaacatctttttttgtgcaattacttttccaccactttttaatatactctttttatcctttataacttttcttttgtcagtatcatttctgttaaaatttggcatatcgcgactatgtatgctccttctttttttctccatttttcctcctgacgtaaataaagccattacaaagctctggctttgtaatggctttatttatattttaattaataattttttgttggtaagtgtcttcctatgtatcctatataacatacgttttccttggggctaggcagaaaatgtattcgccccgccttaaatttacctgtaaatccaatatgatcatagaaatattcttctctaccatcaggtaacctaaataacctatatttttttaattctgg

SEQ ID NO: 12719 - DNA, 24959 bp, Unknown
  gut microbiota DNA sequence
tttttacagatgcagattctgttcttgcatccatccccaaatcttttggattgtaataatcaccacatgattcaaaatattgttgtaaatttgctaatttttccataatttgaataatatgatttctctctggatcattagccaactgttctttcacactgtcacaaaaaactaaatttggaaataatatttccttttgatcccacaaatcatatccagaagatatgttagaatatacatctttcgaatgtttcaatttaaattgagctaaagaatttttatcaaataaattatttatatagactatattctctttctcatcattcttactatacctcccttttattatattatttttccaagcagtatctgaacctatacttaatacatagcaattatgctcttgagcatatgtacaccccaaacccaatttttcattctcttcactctttacaaaaaactttcccaataattcttttttttcgtatgtaaacatattcttagaaatatatgacataaaaaatctcttatactctttatctgtttttttatcatttatccattcactaataccatactcctttgtaattttgcaacatataatgctataatctttttcacataatataccatctattaacccttgttctttaatttgttttagtaataatatgaatgaatttataattgcatctgcttgtttaattttatcatctccatttgacattaactcaccagacaactcattaaatgcaatgtacattttccctcctataacaattcttctaaagctttatcccattcatcaaaaaaaccttctggccaataagaaagtcttccatcctccaatatagcgggtgacatttttttatgaaccatcctctttcctattgccaagtcatctgttaattcttgataaaaataatttaatcgtacatttaatcctgaaattattttattttttaccgctaatcttattccattcaatatatgatcactatgtgtttcgacaattatctgtaccctccccgaagctacacgtgctattaactctcccatcattctctgtccctttgggtgtaggtgagcttctggattttcaaggattaataaatctccctctcttgctttaagtaagctaaccacaattggtgccacataactcaatccaaatcccacatttaatggtgaaaatttatcattagcaacattatattccattccaacaattcccgtttcctgatatttttttgaactaagtttaatacctggacttatttctgacaaccatgcttctgtttgatatattaataaatctgatgcagctgttttatgaagtgcatatttatttgttactctatcagtcatacctctttctgctaaataatcagcaaaaagttctccatttattccaacctgattcatctcatatatctgatgaaaagattgttcataaaatctttttggccctattcgatcagccgatatatatgaaaagtttggtttaaacaaatttatattttctaattccttaccttttgcatttgtttcttttatactttgataatctgattttttatcgtaatcatatttccaataatattcttttccatctgcagtcatcgcaaatttaacataatcttcatttgcatttctatttaagaaatcgtatcctgttccaatattaatccaaggaccattcaaatgaactccctttgttaatgagttcatttcaaatgattgtcttaataacaatagtggctgtatagcactagactttcccatactatttatccctgcaaaaacatttaacgttgtcatttctaatttcatttcatcaaagcacttaaaattatccacaactattttatcaatcatattacacttcatctcctgtatccaatattttctccactaattttcctatcttgcttatgcgtgtcttaactgatgttttatccgtagcacgtatggcgttttgaaatgaataatcaccacataaaactgtgaattctccgcatagttcttttcttttatctattaatttttgtacatctgaatcattcatcttataaataataatagaccatgtttcaaataaagctttatttacaggacctctcctttcctctgtatttaatcttctaaatgcaaactttccaaaaatctgtttacatattttcatcgtctttttaaatttatcttgtatttgatataatttttcttctgtagcaccatttaaatattccattccctgatttaagaaatcttccatgatgccattataattatctaaattcaattgagtaaaacatacaaatcttaagcaaaattctctatctaacattctatctttttttatactatagtctgtagcttcaataaattctcttgtatttgacatttgtagcaaaaattttgttgatgtaccttgatataatgcatttctaatttcctgtggtgctaatactagtccaccagtatttattctcttaaaaatattaaactttacattctttggtgttgacggatttaccaaataagcattcaaatttgtttcttctattctacgttgcaatgaccttggtaattcatcaaatttcaagccatccaaatctttcaaaaattccatacccgtcaatgaaaatttttgttcaacaacatattctttaatagttccaattctctgcaatccatcaattatttgccatttatcatcatttgttgcgtcaaaataaaatgctggtaatggaatttttaaaaatatagattctataagctgactcttttgtttttttgtccacaatccagattttctctgaaaagacgaatcaaactctaactctttattttttattctttttataattgaatcaattgtaattttatccattttaatatcaatttttgagggatcaaatggaacaacttttgtatctatttcctcctcttcgcaatctggttccacatcctcattcaatatttcaatcccctttttactaaaataatcaataacttcaggaagttcttctgctgtgcattttattgtaataagaattattgataaattaattttgtaatgttgctcaatagcaattgcttccaaactttccaaatcttttttatatttttcattaatcattttcacttttcctccatataatagtagtatttaaaggagattactatgaatattatttttaaaattgaaatccacttatttcctaatgaaaatgtttactgcgacactccatttttttggacactattctcttatacaaataataactggtgcaattcaggtagtggatggtctacaactcctcaaaacgcttggaatgatgcttataatttttatttgttacacaattctctaaaaaataatacttaaactttagtatcctcaaatatacaataattttaatcttttataatcaatgcgtcaacaaaagattgtttaatgttgacactttctttacacttaatcatactgtttttctcatgtatatttgtattatataatctatacaattctgtatctcttccaattgtattatcaaatggaataattacatttccacattttatcaatcccattcctgacggagcattacttacaaattccaattgtgattctgaaacacctacaacttctgctattttttctgcatctgtatttgactgttttaaaattgctacaaactcactgtttgcaagcattgtagtcactgtataattctgtaaaaggtcaactacgttctgtgttattcctgtacataatccaccctgttttcttactttcttccatagctgctgtaaatactttgcactatattctgaattaggcaacacatggatttcatctatatacaaccatgttgctctgcccttttctccgttctctacgattctttgctgaattgcttccatcataataagcattgatataggtgctaaatcctgacctaaatctctaattccatatactgtaaatctgttattcatgtccacatttgtctgattattaaaaatattaagagaaccttttacaaatatttcaagtgataatgcaatatccttagctattttcttttcatcagcatcagtttgatttaataatctttcatagaagtcagacataaccggtatatacttttctctgctccttgctatatccaaatacatatctgtaagacacctatcaattatggaacgctgctgtggggtaagtggcttatttaaacattgctcacacaatccaaacataaaagaacatttttctctaatccatccctttgaatctcttgcatcaaggttccatacatccatatccaaaggattaacaaaattatttgtatatgtagacaggttaacaatggttccgccataagtctttgcaatatcaaaatattcgtgcatcggatcaattacgataacatcatcatcaccctttaagaaaacacttcccatttccatcttactgaaaaatgattttccagaacccggaacaccaaaaacaaatccgttaccatttattaatttttttctgtttcctacatttatatttttagatacctgattaatgccataataattgccaccatcatccttgagttcctgcacactaaaaggaacaagacccgctaatgaatttgtcaacattgttctcattgtttcaacctgtcttacaccaattggaagaacagtgtttaatgcttctctttgcataaactgatgggtatctattgtaactccattgctttttcctattgtcacaattgtttcacacgcactgtccaattcttcttttgtttctgccattacaaccatatttactgatgtataaaacatactctcatcattttctctaacattagtcatcatatcctcaatgtcctttttttccattcttttcgaatatgatatttctgttgagaaatcattgtttttatttctcactctttgctgtttaataatatccgattcaacaccaagatattttttctgtaataatttgattgtcatatcctttggaatcggcacaacatctatgcttgtaatcatatgaacaggaagcattgttattgtattaagaagttcctccgaaagacttttaggatattttttaaaaaacaaagccctacaaaccttattttcatcctcaaaataatcctgataaaactttatcataccgttgcataaatcatttctaaaatctcttcctacacgctttgcttttcttatattgaaatcaaattcgtcttcctttcctaagttgtaaaaatcgtgtagtactcgcaatctttcatttccacttaatgaagttattcctgttccaagttcattaaatgccttcttaacatttacttctattgttgcaaactgagcttttgcctcttcaaaattttttctctccactgtaattgttaaatatttttcctgttcaattccctgtctcccttcttttattttttcctcaattatattgttataaatttttctaaatctatcaaatccatcatctaaatatggaagtaatatatatcttcttaaatcttccatatccttattcttgttattgattgttatcttaaatgaacaatcaagtgaatttaaaaatttacaatatctttgaagtatttcctcctgttcttcataagttgctgttgtataatttatgtccataaacttatatgtttttgaatacttattttcctgtattttgaatattccattttcagatacttccattatttctatagtttcctgtatggatttaggacttttataaatcggttccgacgctttttttaattccttaaatccatctgaaaataaccccatttaatttcctccttataaatatttacagccataggcaatgcttatggctgtaagtgcaaatacaatactaattactagtattcttatcattttttgtttcgtttttttaatatttatatcttcattattttttaatttttgattttcttcctccataacggttgctacttcttttaactctttcacgttttctgttgatttataaaccaacggtttaactttgaacataaatttaattcttttcttcatcatttgcataaaactcattccgttaaaagaataaaatccacttagtgctattggtgcaacaatcggtattgcaatgtatgctgatagtgtaaatccaacttttttatatgtaagaacaacaattgtcccacctactaaaatacttaatactgaagcaatcaattgctttgctgtaagtccaagaacaactgattccttaaatttatctatatctctgtttatttcaactgacacattcatcacctgcctttatcttaatatcattatgtcctactacaatcctaatgccttacttgttaatccctgtgcaccctttactgttccaactgtcaaagctatagtaaatgtcatttcacacaaataaataagagtctgtgtccaatctgcatactctcccgtaaatgacggaagccctgaacttatcaacgcattacatacaatgattgcaagcgccattgttactgcttcaaacacaattgaaaaaaaatatcttgcatatgtggtagccgtatgacttaccattctattcccacttattgttgaaagtgcaattgctccaaacggaacaatgataagtatttttaaaaatctgaaatacactgtatatataagaaaaaatccacagataataatgactattgatagtattgacgtaagaattaacataaccagacttgccccaaatccaagattttcaataatatccgcctgtgtactgtctatggtaagcttaaccatttttcctgcacttaatagttttacaagatttcccaccgaagtaaaaaatgccttcattatggttacattgtttgcaacaagccattctgctattcctattctcataagcattcttaatattacttcaaatctcatatcttctttcacatccacactttcagaacaaaagcctattacaaaaaacaagacaactaaagatgaacctactccaacaaagataggttcaatactttgaactacaccccaaggtcctccatctttaaatgactcaggagattgtcctaaaagggcaaacacaagtgatatctgattattccaaaatccaaataccatctccagtaaatccagaatctgttgtcctagtttaaatatatccaaatatcatcacctcttttcttacatgatttaagactaaaatccaaggattccaagaactgatgatatacctgccatcattactccagccactattccttttaatgctgaattcattgtggatgaatcctgttgctgataagcctgggcaaactccattacatttttagcaagaataattacaccaatcgctccaataattgcaataaccagcgttttcagattatcaagaggttttgtaacagaacttgtatctgctgccattactcttgtacataacatttccatcattgctaccgaacctgataaaacaggaaataattctttttttatttttttaccaatacctttcatatctttttgtctcctcacttcttccaataaatttctcgtcatagtttctcctatcttcttaacttccatatttttgtctttccttcctcattttttccacagaaacatctgggtaaaaataatttaatatcacattaacaggaacaccttccctcatttccttcttcacttcatcgcactgttcttttgagaacttccaaaaaatcattcgatttgtaactgtatcctcctttaattttttcaaccttttaatttcatttgtgtcattagcgctttccatatcttcctgatattcaagctctcctgatatttccatatctacttttgagttttctttttgaggttcaatcttttttaacctttttatcactgtttcattttttagaagcataaattccgccattgtaagcttgtctatgtacacgttttttcctttctcttttaatctttcatagtactccaatgactttctatttaatatttcaaagggaggtccgataataaccgaatcctcccttggtatatgttcatatgattttccttttccatctgccgtctgattgaatgccggatgattaaatggattaaacttattatctacaataggatcaaaacctcttatgaatattagacattttttattatcaaattttctcgcttcgtcaggtgtcataagttctctaccaagtacatcataatttcttgagctgcttccctgtcgtcctcttgtttctccacttgattttttttcaattgtcccttttcccaataattctgatatatatttatgggtactttgttcatttcaacctaaataaataagtgtgtcacagttaccgggtattgtttcccatgtatccttgaacaatgcttttatctgtgccaaattctgaataattattaccgaacttatttccctgcttcgcattgttgataaaagtgaacaaaagtcatccggaagtgcaacatttgaaaattcatcaagcataaacgtaacatgtatcggcaatctgccaccaaaattaaaatcagcctgataataaagttcctgaaatatctgcgtgtatagcatcccaattataaagttataagacttatcagaatcaggtattacacaaaacaatgcagtttttgtttcacaatctccatttgcacctattcctatgtccgcaagattcaattcgtctttggacaaaattctaagtatttttttattctccaaaaaagccagtcttgaatttgcacttattataattgaacgtaccgtatctcctgctcctctcatacattttttatactgttttactgctggatgatttactcccaacggacttgtttcttccaatgcactcattatgatatcaagttgtgatggttttcctttttcttttacttcagcctttcccatcaacttaagtactgtttcaaaatttctccttttaggtggaacttctaaccacacataataaaataacgcctgtagaaacattccttctgctttttcccaaaatggatcagcaggattagctcctttaggcgttgtatttgcaattaaatttgtaattagtttaatgacatctgtttcttctcttatatatgaaaacggattatagcaatcggactttgccatatctataagattaattacctttacgttatatccattattttttaacatttctcctgtacttcttaaaatttctcccttgggatcggtcaaaataaatgaacaatcatccggcatctgcataagattaggttttacttcataaaatgtcttgcctgctcctgaaccgccaataataaggatattattattaagtttcgtcatccttgtattaagactcattctaacattctgacttaaaattctgtttctatgttcattcttatctcttagtctattgttcacttttgatatgtctgcaaattgtgcagtaccatactctttaccgggcatcatatttcttttacttgtgtagtacatcgttaatgctactgcatatattaacaaagcacttaaaacagcttttactgttgtatatcctttataataattattaaatggctgtgctaaaatctgatttaatttattaataaaatcatttatatttatccccgttgtccatgcaccatttaccagatatcccgcataagccgcaaacactgctccaacaataacgataatgatggaagggcatttcttcttgtaaatcattatcgttttccctttccaatttcttctgttttatttgttatcttctgctttggagacatcttttcatatctttttcttacagcaactcctacactatcatagtgtccttcatataattcactgccctttatcatctgaacgactttattatttttgtcgtatagcttatattccttttccatatcaagaaatgtaagcattgtctttccgttatgtatttccattatattttctttttttatccacacataacgtgccttttctccccatgtgccaggaactcttgttttaactgccctaggattttcttcttttatcaatatctttgatactgtgatatcctcaaggtttctattctttgacattgagactgccctaattcgttcaactatgtttctgtaactattaattctttttgtcagtgcctctttgttcataatgacatcatatttattttctatttctgatttttccaatgcccccattgtaacaagttttcctattatttctttcgctgtattcttttctatgtgaaatttttcctctatggaatcagcgcttatgcttttattatcaacagcatatagtcctactttttcaattagcccctgcattatttctcctgttttttctgcctcctgtgaatgaaacctttcatttccgtctttctgtttttgaaagtagtcaatgagtttgttttttccatcattgtcacttttctttacatagtcatcaaatgtacttatctgacccgatttcaatttttgtaacattacattaattcttggtgttgcctccgaatgaaatataatctctgtttgtcccttgtttatatttggcatcatcgaataaagtattccgtatttttttgcaagtcgtttaacttttcgcatttcagaattactaaactcaagtacctgaaggtctccacctctcataagcagttttctcatagatgttcttccaagatttttttcataatcaagcatcccctttagaacagccaatacttttttcattgcttcaataccatcacttccaactttcattgcaatctctataccgtcataggcaactctgattatctgcactgcctctgccaattcatctgccattatctcctcctttctatccattcatactattttcaagttctgcaatctctattatttccttcattctttctgctgaaatcctaccattaatgatttcttccaattgactttctgtaagtcccttctctattgcactttttatttgaatgagctgatttttgtccaattcaccttcaattacaagctttaccaaatttcttctactctttgtttttatcgctaattttgtaaaaatacttattgctccacgactatttactgtcgtttttctttcaatgctgttactgtctattcttatatgtcgattcaaattatctacttctgatgattctttctttgaaaattcaataacttctgtgtctgatttcttttttttactgtatttttcttctaattcacttattttttctcttaactttttattttcttttctaagaacctctctttctctgctattttctgttgcctgcgaatatgctttatttatttcatcttgcttttcagatagtaaaacatctttttcccgattttcttttagtatcctatcgaaatcctgctgcccttcattgttatctaataaagttctcaacacatcttcaacttcagtaaatcttttatccgcatttgataaatttacattcatttgctccaaatattttataatttttgttacatattcaggttccctatcgtgttcaaacttatttccttcagcaagactatcttcatagagctttttcatcgttactgccttttcgccactttgagtaatttttttcactgcttctattggtacacccttttcataaaattccaatgccatttccatctgtgaaatactgagtccgtcagctacaattaccttaataacctcatcatcataattgtttctcaagcattttgaacatattttcatatgagcaaaatccatatttttatcggcatatcttgctatctgttctcttgtaagcccataatctgcatcatcacttatcagctctaacacctctttacttactcctctgtttctaaaaccttgtataatcatatttttgtctctagtgtcactgcccaattttaacctcctgttaaaataaaaaaacagcctattttttcggctgtctatctctattatctattcctctttcttcttttttgtcctccacttgtcttattggtttttcattttcttcctttattaaattatctgcaattcttaattcctttcttacatcctttaatttgtttcttaactttacatattgacttttataatattcttttaaatttattacttcttcaaccgtgtatccctgactgctaatttccgatataagctgcgtatatttttcatgttcttccttgaaaaattcatctcctcttacataacagttttcactttctgctaattcctttatcacatctacagtcttaaacatattttcggctgctttctcagcatgtcttactgcactaattttcctatttatactttttcttctatcatctaaaacatttcttgcttcagtcaattcagttatactcgtaattccatatttcgaaagcaaactaaactgttcgtgtagtttatgcatttttctaatttcaccacgatatttccatgcctgtgaatacgctctttttttcaatttaccggttctatacaattttgcaaaatattttttctgaattcctgtaagttttgctcttcgatatcttttaaatctgcaatatataatcttaggctcggaattaactttatcgcttttataatcggcaatgctttcgttaataattcttttgataatgttttctcttgtatattcatcccctattttatcaagcctaatatacttcttcattcccggcattaatactgccatatattttccctgcttaattttgtatcccttctctttaagcatttctaaaaaagtatcatatgttgaagcttgaagaatacatgaatcaacatctcttattaccatgtctttccaaacaaatttaccatcacgatatgtattccattctttgtacctttcatctttctcttttttgtcataatttatatctattgtcgaaagaccatattccttacaaagactatttgtaagtggctgaatatattttgcccaatcacctttttcgtaacgatacttttttccattctttatatttacgctattgaatataatgtgcccatgcttatgtttggtattattatgaactgaaaatataacttcgtaatcatccccaatatactcttttgcaaatctttctgttattttaaaagcagtgtcatcatctatgttgtcttcttcaaaagatataataaaatgataagcttgtcttttatctattttgccaaatttaaccttggtatttttcattttgtcatatgcgaaatccggctgacaattaatccctcctacaagtcttcctccatctgttttttcttcattttttatgtaatcaatcgcagcttttaaatgtttcccatgataaccatttccacaatcacctatattaagaaccttcgtaactgccaatacatttctccacttctcttgtagacattataagttttctcatatatgctcttaggctttccatatcattacggctataaaatccagcattattttttcttgcaatctgattaatattgtttccaacatgatttacttcattaataagatttgacagcataattcttatttctggataatcagaaggtttattatttagtaacagacgtatgtattctgattctgtcatattgaattctttagcaagttttctcaattttgctgcttccgtttccgtaaatctgaaatgtttaactactctatgtcttccattttccatttataccaccctctctttatcgtaatccattatttaaatatcacactttgtcataaagtctaattatgattttccttatccgtatcctttaagaatttcccagttatggcttatataacaacctgtcgttcgcaagatacgcattttgtgatacaaatgccatttcttgttaggggaacatcccctaatacccctgttttttacaaatgttatatatttacatagaaatatattggaaatcaaaaatcccctcaacttttttacctgacttctcacatttttctgtgagtatttacattaatgttttttcccttttatttattccatgatattttttcctgtactttttataatttactcaaaatttcccaataactacctgtacttttccatggtaattgtctttttacttcttaagctcttaatccaatcattataatctttatattcctttggcggtggtaaatctataaccttatatcctctgctttcatatttatccttcaatacagatgatgccactcttcccggtccatcattatcaagacataatctaattattcttatattttgattttcttttagaaaagtttctaatggtgcatctgcaatcattccaagtgccaatttattagtcttataatcatcataaatatcgcaataacttagcaaatcaattgctccctcaaacacttctaattcatcggatttatcatttacaaaattaaagccatagtttttatcgttaccttttacatcacacttgaaaacataaccgttcttatcaaaaactcctctcatactagcaaatcttgttattccattttcatcctttcccttaaagactatattatgatatcctttagattcataaatcagatttttgtccacaaagaaatctatacattttttacttatttttcttttgctttgcaaatatgaatataaaaaattattgttttctgactgttgtggaagtacaaattttatattatttttttctggagcaatctttttcacgctatgttttaatgttaaatctgtactataactttccgttcttttgtatcctgcaaagtcaagcagccaaaatactgcttccttaatatccattcctgcaaatactcttaaaaaatctatctgtgaacctccattacttcctttttcattctgccttgaccaacgataccaattagttttgccatatattcgtattgaatccatctcttttaaagtatgatactttcctatctttttcacagtatatccgagtgatgaagccacctcacataaatcaacagattttgcaagttctaattcttttttagtaaagctatcttccattttatctcctagttctctctttttcagcaactaaagtgctttcatttccgtaaaatttaagattattataatcctgctcatatctttcccttttatgaaacataagccctttttctctcatactgaaatattctatattatttcctcccacaattatatgatcaagtagagggattcccattaaatccgtcaactgaataagcctgtctgttatttcaatatcctcttttgatggatttaacgagcccgaaggatgattgtgtattagtaacatatttgcagcatttgaaagaatacttgttttaaatatttctcttggactcacaagcgattgattaagcgaacctacacttgccatagtgcagttgattggcgtattatcacttttcaaattgactacacacaaaacctctctatccatttcgcataaatatttcccaataagccatgttgcaatctctggagttgtgatcttcacatcagaaaagattggagcttcttttaccagccttactgacacaacatccagtttaaagtcgttattcatctccatctttttcatccttccattccaatataaaaataaattcttctttttctgaatttataattttcaccatatcttccattgttccaatttcttcttttttctccattacaacacctataatgtttttcctgttctatcataacttaacggctctgctgctatattgtcatcaaggcttttgtttggtgcatcagatgctacggtcaattcctttttgtttttgtcataatgatacacttcattggaaagtctgtcttctattaatacctcattcatatttacttcatttaccatctcctgaagttcatttacatcctttcctattgatgatattgcaattatttcatgcgttgatgaaggaataatataaatgtcagagtcaaatttttttgacaattcatcaagattttcaggaaataaaagttccgatgctccattaaatttttcagagtttgtcataacatacaaatccataccttttgaacttccctttacttcatcaatcacactcattgtttcttccctacttacaatatcttgagcttctcccatttcttttaagattatttcacaaataatctcatccattggtctaatacttaccggtagtaatttaggtgtatttgccattgcctgttcataaagctgtgcttcattcattcccattgtttctgctaaatcattggttacaactattgaacttgttccatttttatcagtatttattaaacatctatatactactgaaagatctaaaaactctctatgtggaacaccttttaaataattttcattctgagctgtgtttactaacgttacaattaatttctcttttaacttatccatatctagcttttcgtctttcattatttccggcattttgttatatccttctgttatcatatctgctgcatctctaataatttctcccatactttctccctgcttatacatttcataaagactatctatgtatatagtcggtgaaccacttatgcccttattcttctcagcagaaacaacattaattgcgtccctgtcacaatttaccttgtgaacttttctttctactaccttgtaatttttaaattcactaggcatatactcttttatttttttctttaatacttctttaaatatttcgtaattcatcattttaaattcctcctaaaatcaaaaaagaagatgtagtcataaggctaacatcttctctactttcttaattcagttttttataaacgcttttattcctttttatgtctataaaaagtttgatttttttctataaattctacattatagttttgaacttctaaatacaaataagcttctccttctctatgcggagtctcatctgtcatactcataatatatacttccatctgttctttatatgtatcccccaatctatttttcacataaaaatccaaaataatagctttccccaattgagatttaaaaacctcttcatctgcataaaaataaatatcctttttttcaagtggagccaatcctatctttcgtgtcgtagccatcgacatagaatttttccatgtgaatgcaccatcttttgctaccgcagaattaaagataattgtctcgtaaccagacgaaatattaagcaatgtgagtcttaatccccaagcaattccatgtgaatatttacctatttgtatacacaaatcttctggcaatatgctagttgtttcaaaatttctcatcggtgcatcccaatgttcaataacaaacgctggtctcaaatccaatctctgtctatcttgttctaactcaagaagcctttcagatatttcatttgattcttttgtctgccaaatagctacaattgctataataattgttggtattgctacaatacaatttgctaaatagcctagtattccatctgcagatatttccgatcttataaatggcgaaaccaaatgaatagtcataggtgttatcaccataaccaatactacaattcctattagtgttgtccttaaattttttttcataataacacctttcttatactattatatttacttataactaatcttattgttatatattttgtattctaataaacatctattatgtatttatttctaataatattctcacttcgaatctatcttatatatcgaaaaccctttactttttttgcatataattctcaatttatgtggagactttattttatatgaacttaacttatatgaccagattatcatatttaataattcttgttgagaaattgacgcacctactcccccttcaaaccttgtcaaacctgcccccaaaattggaatacatacatcttgttgcccataatatatatctatttctttccacaatattgaaagacacttcaaatactcatcacgtgtaaaaaatcgaccagatccatttttgtctaatgttacaaatgccatcagcaaatcgtctccattaggtactatcctccctgactcatatctttctttatttttatatttagatttgctcttgagtggcttcaattgtgagtctaatattaatttttgaatgtctaaatctggattattaattaaatattgcccacaaatagacgtttcctttacatcagcgggagcttctccaatattcgtagaaaaacattcgtcaaaattgattactcttttgcacttttttgtttttagtaaatccccatattctactgttatctcataattatttccttttatccttatgcttttttttaacttcaagtaaaatatgtatattatcactacaatgctttcaactattataaaagtaattattcgattgacaataatattaatttctataaaatatctatttaacttagcaatctctaaaacaaactctggtattagcgcaacttttccaaaaatgttttctggaacaaatgtgaaaattcctgaaacaatagcaaacgcacacactatacttttttttaataactccatcaaaatccaagttccttttttatgtatgaataatcgccaaccttcttatctttgtcatcctttttccaaaatggtctcgcaatgttttcataatttttcatataagatggcaaccaacttggttcttttttgagagaattataaacaataataattgctttgttttttttctcagcctgcaaaaattcatgttctaaatatgaaaacttatttatatttcctatattaccatctttagctggttttgaagtaacatagactttacatggttttgttccattagtattttgtttataaggcgtacattcacataaattttgttttttattaactctgtcacattgatttcccgcagtacgtaaagctgtcttattcccaacaacaaaaataaccgctgatgatgcgtttatttgtttgttaaattcttgttttaaatcacatattcggcaatcttgattttcagaaacacttcctgatgataccttggacatatcaataaaatccactttatgcagattatcacttccccatttattcaactcttcaacaacattgcgatcaccatcatattcagcatagtctgcactaatatatacttgtttgctcatgttatatcacttcctttcattgtaactctatatttccatcatttttctatatgtagtgccttatgacatattttaacactatatatatgatattacaagaagtaatcattttctatatattattcaaacatattactttaataattaaatattaactgcaaacacaacaaatctataatcatttcccctgtcattatcacatgtagaaagtgttataattttatctccatattggggtgtaattccaacatcatagaaactatatttttttactttatttataaactcatcataatcaagtttatcctgtgccataacaaatttccaatatggaaatgctttcttattcacactaataacagaaaatattttatatttctgttttctatctgttgtaaaataaacatttctatgtttattgaaaaaattttcatctcgatattttgttaattctccaaacatttttgttccatttatgttatgaccatatataattaaattatctgacttttctaaattacaataagctgacagatatggtgttccataaaaactataattcctattaatatcatgattaagatagaaatccggctcatctgttgtttgtaatacaggataacttattgttgtattaggtatttcaatataccctacaatgtctttgtttttcttcttcaagttatagagtattttttcttctgagcttttttcaacattttcccttatataattaaatctcttctcttcatcataatcttctttatatttaattgtagccactacagatattaaaactgtagctactacaactaatgcagaaatacttgtcctaagaaatttctttttattcttcatcttgtttctttctatatcttttttttacatttagacattttgccaacacacctattccaaataataatgccagcacatataaatatatgcttttattataacctgtctgtggtgtatccggcacttctggaatacgttcatccacaaccttaattttctgtattttacctgtatccttaactgtaatctttacattctttgcttttttataatgttcaggtgcctgttgttcaacaaacgtatacgtttcccctgcacataaaatgccattaagtgcagtttcctttttctttgttgtgaattcacataccttctttcccttactgtctaataccttatactttgctcccggtaataactttttagtatcagatgctatctttgaaaactgaatttttatggtatcatctttcatagatacttgctgaatatttcccgtgtcagaaattttaaattcgacactttcagcagttgcgaagccacttgccggtcttttttctgtaaacatatatgtctttcctactacatatttcccttcaactatatgcttatctttacttgaagtccatttatccattatccgtcctgtctctttatctgttacttcaagttcacatcccggaatttccttttctcctgtgatttctgtctttgaaaattctatttttgttgtatcatcatacattaccagtttatttgaaattgcaggaacaaatttttcattttctttaataaaaatctgcgttaaataatctgctttttcaatcttcagttttaacataaatgaaatatctgtcgctgagacaaatccatctgctggctttgtctctgtcaagacgtattccttatcatgcaacaatccatttatttttatatttccattttcattcatcttagcttcaaagttcaaatatcccatttcttctaacttttcatttacaataattgaatctttatctcctgttatccaacttacaatttcatttcctttttcatctgaaatcttaagatgacaatttggaatttctacactacttgcaatcatcagtttattaacttcaacctctgtctgttgattaacaacttttgcttctgctgttactatttgtgtttcctgatttttatattcaagatgaacaaatataggttcttctgaaatatagtaactgtccgaaatattttcttctaagaaatagtaatctcctgaattaataggtaagtctttttctccatatccttctcccattaccggaacagaaaatggtattattgcttttccgtctttatctgtctttacttctgtaatcttagagcccgccttaagaatcacattgccatctttatcataaatattgtcttttgtataaaatccaaaagttgtatctggaacaggtttagatgtccttgcatctttttttgtaaccctgacttctgttgataccaactcattcctaatatctaaaacaccatcttgtgtgttatctgaaatatcagaaacatattcctcatcctgactgttccacacaaattttaaattccatgaattagtacttggtaatacgtgaccgtatgttgtctttacttcctttatttcatattctccaagagggacatccaacgttaccgctccgttctcttctaattttgctttgcatattccattacaatctgacgtaaactctgcacctgaaccagttgtaatggtcgccactaactcacctgctttaaaccatgttgtattctgaccatcctgtgttacaatatcctctttcgcataaagttcgaataccacaccattaagcattacatcttcatatttaaatggattttgctgtaaagaaacattcattgcatttgtataaataaaactgtcaatatttaatgttttcataattgcttcatattcaaatcctgttaaacctggtcccgtctttttaattgtaaactttccatatgtttcatcattgtagtattcatactctgcatatagatactcatttccatccttatctgtcattgttttataagatttatttgtaatttcaatgttaataaatgacttgttgttcttaaatccttccggtccctgtacctcgtaaactcgatatttaccagcttttaatttttcataggtaattatttctcctgtatcatctgaaacaaatctgtccactgtaataattttgtttccattattatatgactgttttacaatcatttctgttccatcatcattcactttataaatctgatatgttgtgtttggttttaatactgtctttttagtctgggcatcctttttaacaatttttaaatatgctgtaaattcaggattatttaaaagatacttatatgtctttccctgctcttttatatcaacataaaaatcaggacaatactctgtctcgtcatcaccactaatctgatgaacaatatatgtaccatatggtaattcttttgttattgcatatccttcactattggttttaagtaaatctttttctgtatcctttgccttatcgtatgatccgcttgatgcaatataaacctgaaactgtgcatttacctctggtgaaacaatacctgcatttccatttccttttcccttaattatagaaacctttcctttaacaacatcttctcccaattctaattttgattttgcactattatattcagccgtatattcctgaccatcttcatgtattttatatactttatcatttttcaaatatcctacaggcggaacaatctcctttaggtaataatcacttccacatcttacataatctgtttcgaactgatttctgctgtctgtagtatattttttcaataattttgtacatccataatcctcatacataccatatactgctcctgcaagtgttgcatctccctgagccacttcacctgtttcattgtcctttttgattgcaataagctttacctttttataattatttactacattaaattgatatgccttctcgtaagaaccatattttccagatgaagtatccggccatacgccattttccttaacccagctcttatccgactgaattgtaattgtaactcctttcgcaatacttccctgtgcaatgatgtttgcatttcctgtgtctaattcctttacaacatatttattatttattgctttcatctgcttatctaaatctgactgaattaatttttctgcaccactttttgataaatcgcttgcatacttatatccctcatcatccaatttatttttaatttctttttttgctgaatccgtcatttcttttaaatcatcagctctacaatagtaataatcttctgattgaatttgataatcaaatttatatgttatttttccatttgaatctgtcaaagcttcaatttcaaatctactttgatcttcgtcaacatcaccactttctgcatcaccccagccattaaatttaaaggaatataattctttaacattttttgctgttaataagaattttacttttggtaatgctttattatcttcatctttctttgttaatgttatacgttgtctgtatcttaacgtatcatttaatgggtagtatttatagtcttcttcctcgtcagttgaatttatttccataagcacctgtcttgaataagcagatgatgtccactttgaaatagaacatataacagtatgatctatattaaaaatctgattgtatatttcatttactgttttatcattataatatccggtattatttcttacctgtttaatcacatctttaagctgactttcacttgttcttccttcttctgcactccatatgagacattgagcatacacccatgctttatttgccttcttttttacatatgcataccaatatcctgtttttgcctcaactgatatttttttgtttgaattatcgcttgagatttcgtcatttgatgatacatatacatctcctgtatgacaagcttttcctaaatcctggcaaaaaactggtttaccgtttaccattgttttaagccatgttccactttcacttttttcaccaatattaactgttccaagccgacctatatttactaaagatgccttacctgttgcagcctgtaccttttttgtcgattgtggtaacacagttatcgacataactattgccagcatcattgccacaattttctttattttattcattaactgaaactctcctttccaaaagaaaaagaccgccaaaactgacgatcttttacaattcatatattttactatctatctaaaatttgcaatgcagactccagactttccatgttattattcaaaacaatttcatctacatctaccatactaaaaattgcgacccatcttccctcataagaagccattgctccgtaacgatagtctgaatgtatcatattatgataatgtcccggactgttcttccatgaagtcatcgcctgtttaggtgaagtacttcctccaaaaatattttcaccactaacaattgtcagtccatattcctttgtaccaaccttacctcgtaacatccatttgtcataattatacttgtcttttaatactttttgagcagttgaatccaatttattgtgtgagaaatcattcactatttcctttgctcttgacttacatatttcatacaacacttcagaccattctaattgtttaacacccactttttttctatattcattttgaagtgtaaatgcttgttgctcacaatttttgtggtatccgttcaaacctgaaacataacatcccttttttactaacttatcattcttagtgtaatataaaagagtgttttcagtatatattaaagcctttgaaaaacgtccatagattgtctttcctttttt

SEQ ID NO: 12720 - DNA, 974 bp, Unknown
  gut microbiota DNA sequence
aatatgttatgtatctgataatggaggcagtaatatgttatgtatctgataatgcaggtagtaatatgttaaagaaaactttaagttgggttatggtaggcatgttatttttatcacttgtttttaatgaaaatttagttacaaagaagattgatgcagcaaagaaagttatagaaaatataatgaaaaaatgtattaaaacatcagcaccatattcttcaaattactttatgagtgaacaaatgggaacgttgatggcattaggtgtctatttacattgatggtggaggaaggaatatgaaaagaacaattgcaattgcagcactttgtgcaggtataatgttaactacatttccatgccaggcaaaggaaagcggaaatgtaaaaattaacgcaaagaattttccagatacaatagtaagagaatatgtgtcagaaaaaatcgacaaaaataatgacggttaccttagcaaaaaagaaatatcagcagtgaaaacaatcattattgataagaataatttgtattgggagaataaagagaagccaaaagaagattatgaaataatagactgcaaaggcttagaaatttttacaaatgttgaaaaagtaaaacttacaacatattgtgatacttatgtaagtgagtatggcaacataaaaaatatcaaagttttaacaaaactgacgaagataaagaacctggaaattagtggtgttaataacagtaattatgatttcacaaaattaaataatttagagaggttatgtataaaaagtacaaaacttaaaaaactgaatttatctaagaacgtaaaattgaaaaatctgaagcttgcatataatcctttgttgaaaaaaattaatcttacgaaaaacaaaaatttagaaaagattaatttatacggaagcggagttaaaaaaattacactggggaaaaataacaaaataaaaaatgctaatctaaattgcacatt

SEQ ID NO: 12721 - DNA, 6069 bp, Unknown
  gut microbiota DNA sequence
aatcacacaaagcttagcaatatgctttattcaatgacacattatactcacgttttaagcggtcaggttcagtatggaacatttagtgattatcttgatgacagaaacatactaaactgtacattggaaacaggattagtacctgcaccggtaaagaatagacagtacaaaaaaatatacaagacaaataagaatgtattagtagcagttgcaaaaatgtattcataaaaaataggagttacagttgatgtaactcctgttgccatacaaaactacaaggaggttcacaatgttattagattttgaaaatatggaagaaacagtaattcacaattttaatggtggtgaaaaagacacaagggcgaaaatgtacaatgatgaaaacatgaaaattttatacggagtattagagccgggagcatctattggtattcatgagcatacagacaacagcgaagaagtcttttgtgtttcaggccaggctacagtttatattgatgggaaaacagaaattttaaaagcaggtcaggcacattattgtccaaagggacacaagcatggaatgaagaatgaggggacagaagaccttataatcttcggcgttgtgccaaagcaataaaaacaattttaaaattgaatatagtaatggtatttggtaaaattatttcataagaaagtacgacagagaagctagtaagatacagattatattttgggaaagaggaaataatatgaacggaatatcattttacaaagaagaaataagagactgtaatgctgtctattttacagaggagttttttaatgtgaaaaacgacggcagcatcgatgtgtctaatgaattacagaacgccataaagacggttgtggataaggccggttatggtgttctttttatacctgaaggtgagtatttgttaagcaagactatttatgtgccaaaggcagtcagacttataggatacggtgacaacagaccgcattttatattaaaagataatgcagaaggatttaatgaaccacatcctgagaacaagggtggatttaaatatttattttggtttgttaacgaactaaaagagaatgaggcggaaattgcagatgccaatccgggaactttttacagtgccatttccaatattaatgtaagccttggtcagggcaatgaatatgcagtagcttttagaactcattacgcacagcactgttttattaaccatattgacatcaatgtgcagtcaggtatggcaggcatttatgatgttggaaatgaaatggaagacatctatattaacggaggaaagtacggaattataacaacaaagtgctctccgggctggccttttgtaatggttgatacaagatttttcgggcaaaccgttggagcaattaagacaagagaggcaggctttaatattattcgtacccattgtgttaatacagctaaatttattgaagttgatgatgattatttcgaaaaaatatatatagaaaattctgtttttgaagatatgaattgtattttaaatgtggcaatggacaacaactcactaacacaggtttatgttaaaaattgtcagcttaaggcagtggaaaatgttgttgaatataagagcagtggcagacagattgctaatgaagattatcagtgcattataaagaaatacattcatggaactacagttagcgatatttatcacgataaacagattcacgaccagatttacagatatgcaaaagacgtagattatagaatcttaaaaacagacatacagccgttgcctgatatgttaacttgggttaatgccaaggaagtaggacttaaaggtgatggtgtaactgatgacacacaggctttaaaagaggcaattgaaaaatatgaaacaatatattttccacagggtgaatatattttttcagatacaattaagttaaaagaaaatacatctcttataggaatgaatccggtttcaacgcaacttattttaaaagaaaattctgaaaagtttacaggatttggcaaggctaaggcttttattgaaacttcaaagggaagaaatattatgttcggccttggtgttaatacaggtggacgaaatccaagagcctgtggtgttaaatggatgagtaacaaaaattcatatatgaatgatgtgaaattctttggcggtcacggtaaccttgtaaagatgacaggagcttttgaacagccatatgatgagggaagatgcagagatgcagaccttaagaaagtatgggactaccagtatgcaagtcttcttatttgtaacggaggtggcggaacctttaaggatatatggtcagcaagtccatatgtttcagtgggtgttcagattcagaatactgaaactcctacaagaatatattgtctgtcattagagcatcattgcagatgtgaacttagaatgataaatgcaaagaatgtaacaatatatggtttccaaagtgaagaagaaaaagcagagggtgagtttgcacttccaatagaattacataattgtaaggatattacttttgcaactacatattgttttagaactgtttttgtgcagaaaccatttccttattgtgtaaaaacatggaattgtgaaaatattaaatttttgaacgttcataatttttcacagatgaaatacacaatggataatttcttattagatgtgaataccggcattgaaataagaccatggcaggcagtttcaatagaaataacaggaaaaggcgagaaacagccaaaaacagaaaagctgtattcaggcttccagtttgctgatggtggaagttgtgacggaaagggtaatttctatttccttgacagcttatataagcaaatttacagagtggacagggaaacattggagctgtctatgatttttgaatctccttataaaattaattctataggatttgatacaagggataatattattgttattggcgagtatgccattccaagagatgcaacaataaatggaaagcctaacattaatgttttgccggaggattcatatggaacatcttatggattctggtacaacagtcaggctcagattgtggcatttacaattgacagtaacagagaatgtgtaaaattagaaaaagtaaacattggcgacatagagccggcaagagttttatatccgggaaacagatggcgtgacggttcagactttaaggatgttattcagtataatccgaaaaaagcattcttagcaccggatggggtaacaattattccttgtcactatgatttgattagagctaacaatctttcaagatcaaagccgggacgtaaattatattcagttgatgaaatgtataagagagttttccaatgtgacattaacaaagaaggcttattaacaaaccctcaggttattattgaagagggtgactttagggttaagaagtttgacgaaaaaatctatgttggtgatgataacattaaggtttataaggatggaaagttaatagatattatcagggttccggaaagacctacaacttttgattttggagggattaagcgtaatactctttttgttacatcaagacatagcgtttatgcaattaatatgcaacaaaaaaaggatgaggagaagtaataaaagtatgagaaagcaactaaaagctttattaatgacagtagctttggttacattgtcaacaggacttattggctgtaacaatgcgaaaaagcagcaacagacaacaactcaggtggaaacaacagaaaataaagttgaaaataatattgaatttaagtctgacggagagccggtaaaggatgatagtgttttaggaaagaatacatatgtattttctcctacagacaataaggatgaaattcaggaaaaagtaagtcagatttttgcaagacaggaatctaaccagtttggagatgaaagatgtgcattactttttaagccgggagattatggaacttcattggaaattaatgtaggattttatacacaggttatgggacttggaattttgcctacagatactaatattaataaattatgggttaatgcagattggatgtttcacaatgctacctgcaatttttggagaagtgcagagaatttttcggtaaatgattactgtatgtgggctaattcacaggcagtatctcttagacgtgttaattttaatgacggtattgttttaagcgatggcgagggctggtcatccggtggctttatggcagactgcaaagtggaaaagatggtttcctcaggttcacagcaacagtatctttttagaaataacaattggggatattttgaaaatggcgtgtggaatatggtttttgcaggtgtaaatgttgatactattcctacaggcggatggccatatgaaccatatactaaagaagaaacagttccaaagattcaggagaagccttatttggtttatgatgaggacaatggatatggcgttatggttcctgaaaaacgaacagaatgtcagggaatttcgtgggagaacggagttaaaggtactttttatagcctgaatatgttttacgtggcagatgcccaaaaggataacgcagatacaattaacaaggctcttaaagaaggaaaaaatcttcttttgacacctggaatttatactttagacaaacctattactgtagaagaaaaagatactattatatacggcatgggacttgctactcttgtttcaactaatggaaatgcatgtatggtaacatcagatgtagatggaattaaagtgtgcggagttttatttgaagcaggggataagcagtcagaaacattgcttaaagttggaaatgaaaaagcagaagtttcccatagcgacaaccctatttgctttagtgatgtgtactttagagtaggaggcgcaaattacaagggcaaagttaagaattgcgttaccattaacagtaatgatgtaattggagacaatttctgggtttggagagctgaccacggagacaatgtaggctgggatatgaatacagcacctaatggtattgtgataaatggtgacaatgttacaatgtatggattgtttgttgaacattttcaggaatatcagaccatatggaatggtaatggcggtaagctatacttctatcaaagcgaaatgccttacgatgcacctaaccagaaatattatatgagccataatggtaaggtgaaaggttatgcatcatttaaaataggcgatgaagttaatgatttttacggctgtggacttggaatttattgttacaatagagatgcgaacatagaaatattcagtggagcagagattcctgacaaggatggagtagaaattagaaatattgtaactgtaaaacttaacggtcagggacagattacacacgtcataaacgataagggagattcagttacttcatcaggagatacagcaagaatccaatcttacgaaaatggcgagaaagaaaaatattaaaaagaagaataaccgaatttaaataataatttgcgcgttcctacaagcaatgcaaattaaggacgaaatacagacgtggagaacttgctcgccaacagttgtatttcgtccttaatgtatagcgccacagtgcgtcatgggcatgtagcgtacgcaaaatgcgaatgagtatcgcgtaaaacaataacttgtaacatatcatgatttgacttaataacgatgaaacttgaaattaaaaaaattatacctgccatccgccgtcaacggtaataatttgtcctgtaacataggagcctgaattaacaagaccatatacagcatttgcaacatcttcagttgtgccaagtcttgatgcaggtatttcttctataatagagtcaacatcttcctgtgtaagatgtccgttcattttggtgtctattattccgcaggaaatagcgttaacctgaatgtttgaaggggcaagttccttggcaagagccttagtgaaagaatcaatggcgcccttggttgtggagtagcaaacttcataggaagcaccgcgctgtccccagacagaagaaatgttgattatttttccataaccctgcttta

SEQ ID NO: 12722 - DNA, 1835 bp, Unknown
  gut microbiota DNA sequence
tgatttgtctaaaagttataagtcattattcaacctgtgcttacgcaatggtggaataattacctttgggcacaacagttagctttcatatattggctcaaaatcatctgctccatgaccgcataacggacaggcataatcttccggcaacttacttccctcataaacataattgcaaatcttacatctccaaccaacaatttttttgccatcttcttttgcagatgctacattgtttttcggctttatttcattttgatattttgcataagttataggttctttatcgcttaatacctttgcatcaacaacttctgcaataaataatgtgtgtgttccaagatcatgttgctcaacaacttttccactaataactgcgcaggattgccagccaagatatggtacatcattacaatctgtaggtggtgtaatgtttccaaacttgtccacatctcttcctgactgaaaaccaaaatgctttattgtttcaaatgtacaatcattgtccaaaatgcttactgcaaaaataccactttctttaatcaaatcgcaagtgtagttactgttcaataccgaaattgctattcttacaggattgcttgctacctgaatacaagtgtttgtaatacaaccgttagccacttcacctgccttagttgataccataaatactccgtaacttaaattatatattgcttttttgtccatatctaatcctccatttcactatattgattattttccgtttcgctttttatttataatatcataacatttttatggttccaacataaatactttggaaagcagttttttatttataattatctattgactattgtattatacccgatttattatatttgagaagaaaaagaaaggattttttatttattatggaccaacaaaagtacaaaacggagaacaaaattttaaggctgtcactgggaggcaccattacttttacagtatttgaaatcatcgcttcctttgtcttaggttcaaaaaccgtaatgactgacggcatatttgacttgtttgacttattactattgcttccaatgtttattttggttccttttctatacaaacctgtttctgaaaagaaaccttatggtttttctcaaattgaatcattacttgttcttgtaaaatatattgttttacttattgtagttatcaatatgattacaaacaacattacagttttacttcacggtggacacacagttaatgccacaaacgttcttatatatgaagcttctctttgcgtgtgctgcataattatgtaccttgtccttcattatcttagccgtaactattcctcaatgataattaaatcagagctttatttgtggaaggttgacattgtaagtactcttggaatttcagttgcatttttgttccagattttccttacacacagcccaattaattttattatcccttacatagattcttctgtggcaattattgttgcactattccttgtaaaagagccgattgtgcagattatcaaaaacttaaaggaattggttttattctcgcctgaccaacagattatggatgaaatcagagaagttgtaaataaggatattatcaattatgaatatagtcttgatttcttagatgttacacaaacagggcgtaaaacatggattgaagtctacgttaaaagcaaaaatgacactgtaaaaatcaaggatttcaaaaaaatacaggaacatattacaaaagatttgatagacaaatttgaccagatttatgttgaaatagttccttctctataacttgtaactataatttacgattaaatttcaaaaatacttttcaca

SEQ ID NO: 12723 - DNA, 1426 bp, Unknown
  gut microbiota DNA sequence
aaaatgcaaaggcttattagtttgccttgcaatcgcaattcctgcctggatacttggcaaaatctttcctattattggaagtgccgttattgctatcattgccggtatggttattgctttattctggcaaccgggaaaaactttcaaaccgggaattacttttacatcaaaaaagatacttcagtatgcagttattttattgggcttcggtcttaatcttaacgtaatatttagtaccggaaagcaatcacttccaataattatttgtacaatttccacatctttgattatagcattcgcacttcacaaagctatgcacattgattcaaatatcagtactttaatcggtgtaggatcttctatttgcggtggttctgccattgctgcaacagcacctattattgatgcagatgatgacgaagtggctcaggctatttctgttattttctttttcaatgttttagctgctttattatttccaatgtttggacatttcttaggctttgatacaacatccggtgaagcctttggtatatttgccggcactgctgttaatgatacttcatcagttacagctactgcttctacttgggacagtatgtggaaccttggaactcagacacttgataaagccgttacagttaagcttacaagaactcttgcaataattcctattactttggttctcgctttatttagggcaaaacaatcaggtagcaattcaaatgaaggtggatttagttttaagaaagcttttcctatgtttattttgtggtttattgttgcttctcttattacaacaattgccataagtcttggtgttccatcatcagtatttgcaccacttaaagagcttagcaaattctttattactcttgccatggctgccatcggtcttggctgtaatgttgtcaagcttatcaaaaatggtggcaaacctattttgcttggcggctgttgctggattggtataacttgcgtaagccttttacttcagcacgttttaagcatttggtaaatatagaatttagtgagcatataatttggtaaataacgacacttattccaatgacctcctattgcttaaatattacaaaattgttacaattctttttgtaattggccagtacaaatcttaaaataaggaggacgaaactatgtgttttaaattcaatagttgcgaccagttatttaacgctatttgcaaattctttaactttggttgttaattagttatttttataaaataatatttatatgtgctttgacacaaaaaaaacagatgacgatgttttgtttacttgttagatgtttaatctaatgaaagcaagacgcacctctgttttttatatacttattttaaaatattttctattaattcttcacttctggttttttattaatattaaaattcaagtctcatttg

SEQ ID NO: 12724 - DNA, 1095 bp, Unknown
  gut microbiota DNA sequence
gaattttagtttctattttgggtttgtttttatcacaaatttctatttcaactttatcttggttttggatggcaatttttgtctcatttacagccttatttaaactacgattttccttttctttctcttcacacattttatcaatctcagaaattgccttccaaagctcatcaaaatcttcctttttatcacagatagaagtcatggcaatcccataagtcaggttctccatctccagttcaatgtgatatttttcatataataactgaaacagctcctttccatttattccgcagccctttactgaaaagaccaatttcccgttatcatatgcaaaacaatttaactttttctgattgagcaggcttattttttggagttgttcacattttcggcgaaaatttttaaggttatccacatattcggcgagttgtccctgattttctttcatatacatgattccgtactcagcagaagccatcaaaagatacgatggacttgaggtttcataaatatcgatgatttcctccacctgctcttttgtcacgatgtctgagcaaagatgaagaactgctgtctgcgtaaaggaaggcaatgttttatgcgtactttgaatcaccaagtcagcaccttcctgaacggcactgtctggaaaatacttatgaaatatgagatgcgccccgtgtgcctcatctacaatcaaaggaatggcatacggtcgagttacttctttaatccctgctatgtcgctcacaacgccttcataagtaggtgaagtcagtacaactgcctttatatctggattcgctcttaattcccttgctacggcttctggcttcatatcctcgcatatatcatactcggcagaaacatctgcatagcaatagacggcctccaactgtaatagcctgatacagttatagaccgccttatgacagtttcgccctattaaaatcttatctccctgtctacagaccgaagaaatggataccagaatcccaagggtactccctccaacaagataccatgattccttacttttaaatatatctcttacaagattcatggattcacgaataatgccctctggttcat

SEQ ID NO: 12725 - DNA, 322 bp, Unknown
  gut microbiota DNA sequence
aagttatctacaaccggaaggatcttctcgatgatatcctttgctccgatcacatacatgctggatttttctttttccgtacgtttacggaagttatcaaactcagccatgttacgcttcagtctgtcagtcagatcttcaatctgctgttccagcttattgtcttttttctttttgccaaagaaagaattttttcctttggtttctttatcagattccttatcgtcttcagctgcactctcggtttcctctgtggtttccgttcctgcggttgcctccggcgattcttctactggttctgtaacaggttctgtttccggaa

SEQ ID NO: 12726 - DNA, 608 bp, Unknown
  gut microbiota DNA sequence
agtgcattgaatcccctggaaaactacaagatagacaaccgtaagctgaacgaggccatcctctcccttaaccgattctataaataactgggagagaggccttccaccaactcctctatcaccttcggatagtattcatactccagccggtggatgcgttgcgccagctcctccggcgtatcgcccggcaatacggggcatttctgctggcagataatgccgccttcgtcataatgctcattcgtataatggatggtaataccgctttccttttcgccggaagcaatcactgcctcgtgcacacggtcgccgtacattccctttccaccgaacttgggcagcaacgaaggatgtatatttatcattttattgggataagcatgcagaatattgtccggcacacgtgccaggaatcctgccaataccacaaaatcaatatcatgctctcgaagcgtcgacaaaacaagctctccactttcccaatcgctcttggcaaaccagacacaaggcactcccagccccttggcacgctctaaaacaaacgcattctgccggttagtcaaaaccagagccacacatgccgaacctttttcccggaaataacggat

SEQ ID NO: 12727 - DNA, 851 bp, Unknown
  gut microbiota DNA sequence
tttactgtgtttctgcttagttccttgttgcatactgtacagtatattacttcgtcatatgttcctccaacttcacatgttgcttccgtggcattttcaatctttactttgcctttaacatgtcccttggctggaattgtttctttttgtacatcagttattttctggtcattgtatgttccggttgctgtgtgtgttatatttccatcctcctcgcatgttgcttccgttctggttgtttccacatcacagtccactttaataacatgctcactattatattcgcatgtgtacacagccttacatgtactataatcgtctgaccactgaaaatccggtcctatgtaattatgaatacagattttatttactttagttgttaaatctgcaatattgtattcctgttttgtagcgtttgaatctgtaagttcatctacaacaagctggaacttgcctgatacattctcattctttatagccttaaaggtcaatttaataacctgtccgtcagcctttatatcgtctgttgacataaaagcaaatttaacttttcctttagttgaagttgaaacattagtaaatgaatttttcaaaatcccatcagaaaatgacgcatcctgtatttcaaatatatctttgtcatattcaagataagctgtcattgaagctattcctgaattgcctgccaaatctattgttacatcaaatgtttcctgtgaatctattgaatcaggtccatttactgtaaaaagattatcggacttactgtctaatgttgatattgaagtcttatagcttccctcaaaaacacattcctgtaattgttcattagttaccactacatctgttaa

SEQ ID NO: 12728 - DNA, 3446 bp, Unknown
  gut microbiota DNA sequence
aaaggtataaactccatattcagaaatttcatcgttgttgtagaacatttattaaaagcataggctaccttaacagttccttcttcaaccttattatatgaaacaattaatccttcaacatttttgttagctgtgactttctgaaatcttacctgctcctcattataatgtaaaataaagcttccggacattactcctgcattgcgactaaagccaaacctgcactgtactgtatcattagcattagcatctgtagttccttctaggttaacctgataattatcactaagtgggttatcaacatttatggttaattgtgaatcaatattaaagtctatgttagaaagatttctgtcatatgcttcatttatattcgtattaaatacacactgttcgcttcctacgaagtcagctgtatatgtaattgcaaacaattctttatcacttatcgacaaaccattgccattaattaatgctattttaactgtaccctgactctctttggctgatgttattgttgatccaagctcactgctaaacttgcattctttataactaagcttctcattgtcatatttaattaacatttgataactgcttagattagttattcctgttccataataatgtattgtaacaacaccattgctctgttcataggatgtccatattgttggattgttatcatctgcctttactattgtattagccgggactattgtccctgctaacaatgaaactacaagaatgatgcttacaataaaatgataaaatttattctttattttcatctaaacaccttccttatttaaactgcgttatttctcctgtagcatattgtaatattctcatagcatctactgctgttatctttccgtctccgttaacatcagcaagtcctgttattgcatctgtaggattgtcaattaatgctaatttcaaagtaagcatagcatctactgccgttacttttccgtccatatttacgtcgcctaattcatagcttgtggcacttgaattaacaagaacaataatgcttgccttctggctgctcttttcaagcgatgcagaaacaactgcatatccattacctacggctgtaatagttccatctgaattaactgttgcaactgccgcattacttgatgtccactgaatatttctcttctggttacttgtttcgttcctaatctgtgcatcggctgtatatgtttcatcagcatacattgttacaatatcctgacttaattctacatatgcctcatccttaaatatctcaataggaatctcacacttagcattgttataatatgctgttactgtagtagaaccagttttagttaattcaaatacacaagttctaccattgtctgttgactgaacaagtttaactgaatcgttataagaccagttaatagttgctattgactctattggcttagcctgtaacttgatagtaacaatattgcctacagttcctgaatacttcttgctttctgaagtaatctcctttacaggaatctcattaacagtaacgtatacatattcacttacaccatcactatttatgcacatgttagttttgccactttgaatagctgtaaatgaaccgtcctcgttctgtttcaatatggaagaatcataactatattcaacataatcatgatatgtagcattagccggtgatactgttacctcaggtgtaaaggaatcgcctatgtctaatgtaacacttgaattcttagcctttatactcttaataggaacatattcactctgttcaataaatgatattctatcctggtcatagccaagattctctacttcaacaccattaatctttacacttgtaatttccggtttagattcagtagtcgcattataataatagaaatatcctaatttgccgccattaatagtctgattatcaaatttatatttatatacgcctcctgtactactagagctaatattacttattgaactaataaaactcttatctgacattttaacttctaagctttttatttttcctgaaaagtttgtttttaaataaatatatttttctatatttaattcttttacgactatatcttcatcattgtaaacccttacattaggatctgtaacatcgaaagcttctttgtaacttgataccactacctgattctctgtaagctgaacatccttctttcccatgtattcaggcttatatgtgaatttgagctctttagcagatatatattccgtatcaacttccttgtcatcaattacaactttatcattttcgttgaaattaatacccttaactgttcctgtcatgctctttccaactatacctgattcagctctaactgccgagatatacgccttagattctaccggtactatattcggttcaccgatactaccactataagcataattagtaccgtctgttgcctctatatagtattgcagatttccaacattcatatcctctgcatcaatgtgcgctgtgtaattaatacctgttgtgttgttcattgtaactgacttatagttctcttcgccttccattctatagaataaagttacgccttgtactccaatattatccttaactgtagctgtaacagtagcgcctactccattaattatggacttaagtggtgtatgtttaataaccggcggtttatcatctactgaagcattagttgtaatattagaaggtcttgactcagacattgccgtatctactactgtaaagtaataataatacttctttcctgcctcgacttttttgtcttcgtattctttctcttctgatgacaaaatagatgaattaatcttcttaaagcttccttcctctccagtttcacttctataaatattaaagcctgccatagtgtcatattcatcctgtgtccagttaaggtaaatacttccaactctaccttccgactgcaatgttaatgcttctgctccactggcagtaacatcgaattcaaatcttccccagtcagttcctgtagtaagccaatggtcatctgctgcaacagcatccttaaccctgaagtactgatgtccctgattaataagaaccttaatcggcatcttaccaacccattctctactactattccactgtcctttcaatgtataatcagtatatggatcatccggtccgtaagaaaccataggatctgtgttcttatccatatctctgttaaataatacatgaacatcatatgttccgttaccaacagtgtctaccttatcaccattcttatctgtaatgtaaatatcagaaacacaaggataagtttcctctgatggttcatttaagtatggacttgtaataatatcaccatattgaacattagtatcaaaatcaactaactgtttctgaataagattttcatctgtagttccccaataattatccgttgccatataagttaaat

SEQ ID NO: 12729 - DNA, 160 bp, Unknown
  gut microbiota DNA sequence
gcgtaggatatttgagaggagctgtccttagtacgagaggaccgggatggactgacctctggtgtaccggttgaaccgccaggttcacggccgggtagccaagtcgggaagggataaacgctgaaggcatctaagcgtgaagcccccctcaagatgagat

SEQ ID NO: 12730 - DNA, 283 bp, Unknown
  gut microbiota DNA sequence
tgtttacaagctgtggaacatctttatatgatgaaccgcgtactttttgtagaacggtccggcgagttgcggatgccggcaaggttaagcacttaaggtgtggagccgaagggaaaccaagtctgaagagggcgcatatagtcagtatccgcagacccgaaaccgggtgatctacccatgtccaggttgaagttgccgtaaaaggcaatggaggaccgaacgcacatccgttgaaaagggtggcgatgaggtgtgggtaggggagaaattccaatcgaacccg

SEQ ID NO: 12731 - DNA, 1670 bp, Unknown
  gut microbiota DNA sequence
agtaggagcaactgttgttggtgctactgttgtagctttttctgttggtgctactgttataggtgcctgtgttgttggcactgctgttgtagctttttctgttggtgctgctgttgttgttggtgcctgtgttgtagttggtaatgctgttgtaacttttacaggttccttatacaagtaaacatcatatgttgagttgtccgctaatgttactttaaataaattctgtccttcttttacagaatcaacagggaatcctactccggctccttctatctttgcttcttctgctgttgttgaagaaactgccactggaaatgttgtataaataactgatgctccatctgcatttttttgaatattaacaatattaactttgtctgattcacaatatgctttatatttatttacaagctttcctccttctgctccatctttaagatatttaacacctgaccaatcaacatctattactttatgtgttgttggagtttctgttactttttctgtcgtagtcgctgcatctgttggcttttctgttgtagcactatctgcttcctgaacagatgatatactaatgttatcaataactgttcctgcaggcataccactcatttccattactgcagtattctttgaatctgctgtaatctgaagagttttagtattgattccggcatttacattgtattgtactgttcctaaatctacgctgtcattttcaccttcattcttccaatgcatatttccggcattagttgaattaaactttaatgttacattatattttttaccttgcactaaattcatcggatacttaagttgtgttccccatgtacccgcatttccacttgtactattcaatttaatacttaaatcagacaatttgcttcctttataactcattgctccattgtcccagcttcctgcatataatgtacaatctcccactgttgttacagccttatcaggaactgatttgtaaccatctgtatccggctgactacttccaccatcaggatttaactctccacttcctgaatatgccctaacataatctacttccattgttgctgactgaaatgaatcatttggtgctgtgtttcccgtataacctgttgcattacttcccaatgccagatttaataaaaaataatgattttttctaaatgcataagcattgtcatcattaagatatgctgtcaaataaatattattatctacataccacttaattgtattttcatcccaaatcacaccatatgtatgccaaccattaataccattgttgttatcactataataataatatgcaggaacactataacttccccaaaatatatgattatatggtgtattataagaacttccacctgcattccagtgaattgttccctcaacatagtttcttgaattagcatgttccataatatctaattccccacaccatggccatgctgttccatcatctcccatcatccaaaatgccggccagacaccatcctggtttccaccatttaccttaatacgtgcttccatttttccatatttaaagctttttttacctgctgtttttaaacgtgcagatgtaaatctacaattactgtagttttctctttttgcaactatttttaatgttccatctgatacatatgaattgtctgtacggt

SEQ ID NO: 12732 - DNA, 362 bp, Unknown
  gut microbiota DNA sequence
ataatctttaagttctatattggcattatacatctgaatccatcttcttaatagactagatgagatatcgtattgattacctaattcaattgacgatgcttcaccacgtatatatttttcaattatttcaatcttaaattgttttgaataagaacgatttttatttttctttgcaaatcctgcaacaccatattttttatatatggctgcccaatcttgaatggttcttgtagaaatatgaagttcactacatatttctgatctggaacgattcccctcaatgtagtcaatacaagcttgttctttttcttgaggagtaaatctttcttttctagacataaaaaatacctccaaagtaacag

SEQ ID NO: 12733 - DNA, 2725 bp, Unknown
  gut microbiota DNA sequence
agtatgttttttatttatatcccattatctagccatataaaatcaccttcaaaccatactttttcaattatagcttgaaggtgattatttttaaagttaccattaaatttaatagtgactgtgatatcagatgtaaaaagtattatttttttgtctttacctttatcgtcttggaccaaattccaccaattttcttatatccttttagagtggatacgtcagttgtaatactatatcttatgtagtaagttgtgttaggctttagctttttaattgccctaagtccaccgccctttttatcccatacagttttagcattcttaaatgatttattttttgaatattgaacaatatcaacaggtatcagcattttttcaaaggatatctgttttttctttatattaagacgcttctttttcatctttggtggtctgttgtccaacgaaagaactatctgtgtagcttctgttgctcctgttttataatttgctgcaatattcaccagaataatatttctgttatttttaaaataagatctttttacagtaattgatgttttcttataatcggtctttttaaagaaagctttcgagtttttcccgataccggtgtatgtaatgttgtagcctgtacatccaggagacttagaccatgacaatacatattgattattttttacattgcttacaaaaagattttttactttagttttcttttcaaccagctctacatctgtcaaatatttggttctaacataagctctttcactgttaaaccataccgtggtccaatttgaatcactttcctttggcaatgtttctatctctgcatttgcctgaagaaaccctacaacattgtcattattcgactcatcctttgattttctaacaccaatttcctttaatgttttcaagttataaacttttttcattaccgcgtcatttggcacttttgttccatttttgtaaaggtttatgtacttactttttacatagtagtaaccatatccgttcattagatagttggtactgttgttcccctggaatataactttgtaatacaaatcatctgtatctggtgtattagaataaagtcttcttgtggtaactatatatatcttttggtttactcctactctgtatacatcaccactgtctgctgttcccggtattggactaataccaataaatccacatgttacttttccctcagcaacatatttaatatttgtaccttccggtatacggttatattctttgtcaagatcaatccagacattgtttctggatgttctataaaatcctggtggatgtgaagcttgtaataaatattgggcacacataaccggtgctcctgtaaaacttttatatccgttactccaaaaagtaacagtatacttatcatatgctaccacctgtaaattggctgtttcgctttccagatacgcaccgttaatccatgtgaaattttgatatcctataacacttgaatacagcacctttaaattttcaatattgtcctgtggcagatacttaggatctactgttttaccctgaatctttgttcctgcaggtactacatccatggcaatatgatttttccaatgtgccacattgtcaggaccaaccagatatgccctacctattacttttatatttggacatgcctgattaataaattcagtatgatatcttgacacatctcccagtgcatagacagactctctcatacatctcattccaataagaaaaactgcaaaaaacataaaaccaccaatcatcatcttaaaatgcctttggattttgctcatacacatctcctttctctactttagttttgtgttccgttcactaatgtcttacatctcttaatgcataaacattgtctatttgtctaataactattatatcacttttatgctactttttcacttgctttattatctatgcatgtaaccctaaaataaaattttggcttaagagattgtcaaagattttttctttttcccagccttgtatcccggtttggaatgcatgattacggcacataaatttaattctttattcatgtatttatgcatggtggtattgcttaattcatagccataacgtttgatgaaaatgcgcatagccctatatcctataacacgattattgttatggtacacatattttataagttcaaaaatgtgttccaaacgtttgtgatattcacgcttggcatctttttcgttaagaagttgatttaatcttcgtattttctttgcgtcattagactcggatgttgtatcggtggtataaaggcattcttccctgtattcgttagcccacttgctaacggaactttttgcaacattgaattcaacagcaagttgatgtattgatctgtcgcctgccatataggctttaactacttcttttttgaagtcttcgctgtaacgtattgacataattatgtcctccttgtttgagtaatattataatatattattcgaacgaggtgttacaaatttagtttaccactacagaagtttttttcattttttaacatactcatcttatttcccatgccctttcatttcaggtatgggattttttctgtccttcatgataacgaactttcctataaagtaaacaagagctataagctcatttcatgaacttacagctccatcaattatcatagaatgtctatttacagactttatttcacagtctcctctcat

SEQ ID NO: 12734 - DNA, 4880 bp, Unknown
  gut microbiota DNA sequence
tgatgcattgatcaaagtttataattcatttttaagtgaaaaatagcataaaaatctagttatccgcataaaaactggacttatcacactttatcaaggtcaaaaccactcaatttactactaatttactacttatgaatgagctttgatacgacgatttatccttgaaaagtgaagatataaagatacttccaataaaatttgaatatttaataggtagacacttcaaaaaatgaggtgtctatttttttacccgattttgaaaggaagtgaacttatgaaaacaaaaaatcaagaatcaaaaggtcgttccccactctttaagaccatcaaacattcattcagccaataaaaaagaaaggataggtaaaaatatggaacttaaatttgtgattcccaacatggaaaaaacattcggcaatttagaatttgctggcgaggataaagtcgttcagcgaagaatcaacggacggctaactgtcttatcaagaagctataatctctattctgatgttcaaagagcagatgatattgtggtggtgcttcctgctgaagctggcgaaaaacatttcggctttgaggaacgtgtgaagttagtcaatccacgtattaccgcagagggctacaaaatcggcactcgtggttttacaaattaccttttacatgctgacgacatgataaaagaataaagaaagagaggaaaaatgatgagattagcaaatggcattgtattagataaagacacgacttttggagaattgaaattctctgctctacgtcgtgaagtgagaatccaaaatgaagacgggtcggtttcagatgaaatcaaggaacgtacctatgacttaaaatccaaaggacaaggacgcatgattcaagtaagtattcctgccagcgtgcctttgaaagagtttgattataacgcacgggtggaacttatcaatcccattgcggacaccgttgctactgccacctatcaaggagcagatgttgactggtatatcaaggcagacgatattgtgctgacaaaggattctagttcattcaaagctcaaccacaagcaaagaaagaaccgacacaagacaaatagtcgctaggtagaaaggagactttttcgcatgaaacagcgtggtaaaaggattcgcccatctggtaaagatttagtctttcattttacgatagcgtcactcctgcctgttttcctgctggttgtcggactgtttcatgtgaagacaatccagcagatcaactggcaggattttaacctatcacaagcagataagattgacattccctatttaattatcagtttcagtgtcgcaattcttatctgcttgctggtagcgtttgtattcaaacgggttcgctatgatacggttaaacaactttaccaccgtcaaaaactggcaaagatgatacttgaaaacaagtggtatgaatctgaacaggtcaaaacagagggtttctttaaagatagtgctggtcgtacaaaggaaaagataacctacttccctaaaatgtattatcgacttaaaaatggcttgatacagatacgggtggaaatcacgctgggaaaatatcaagaccaactcttacacttggaaaagaaattagagagtggcttgtactgtgagctgacggataaagagttaaaggattcctatgtggaatatactttgctctatgacaccatagccagtcgtatttctattgatgaagtagaagctaaagatggtaaacttcgcttaatgaaaaacgtatggtgggaatatgataagctccctcatatgttgattgctggtggtacaggtggcggtaaaacttactttatactgacactgattgaagccttgcttcatacagattcaaaactgtatattcttgacccgaaaaatgctgatcttgcggacttaggttctgtgatggcaaatgtctactatagaaaagaagacttgctttcttgcattgaaacattctatgaagaaatgatgaaacgtagtgaggaaatgaagcagatgaagaactataagactggcaaaaattatgcttacttaggtctcccggcacacttcttaatctttgatgaatacgtcgctttcatggaaatgctgggaacaaaagaaaacaccgcagttatgaataagctgaaacagattgtcatgttaggtcgtcaagctggcttctttctaatactggcttgtcaacgtccagacgcaaaatatttaggcgacggaatccgtgatcagtttaatttcagagtggctttaggtcgtatgtctgaaatgggctatggcatgatgtttggcagtgacgtacaaaaggatttcttcttaaagcgaatcaaaggtcgtggctatgttgatgtaggaacaagtgtcatatcagagttttatactccccttgtaccaaaaggatatgatttcttggaggaaattaaaaagttatccaacagcagacagtccacgcaggcgacgtgcgaagcggaagtcgcaggtgtggactgatcttgctggctggtgtggcaatagccacgccagcacttaaccccccgtatctaacaggggggtacaaatcgacaggaaacagtcaaaaaaacattagaaaatcctttggttacaagggatttacaaaatttcagcgtatgtcaaatgggctttaaaagttgacatacgcctttttgattggagggatttttactgaatgaacaaacttggttacagcatttaaaagaaaaacgcttggcttatggactatctcaaaaccgtttagctgttgcgactggtattacaaggcagtatctaagcgatattgaaacaggaaaagtcaagccatcagaggatttacagcagtccctttgggaagctctggaacgcttcaatcccgacgctccccttgaaatgctgtttgattatgtaagaattcgctttccgacaacagacgtacagcaggtggtcgaaaacatcttacaactgaaactgtcctattttcttcatgaggactatggtttctattcttattcagagcattatgctttaggcgacatattcgtcctttgctcccatgaactggacaaaggagttctggtggaattgaaaggtcgtgggtgcagacaatttgaaagctatcttctggcacaacaaagaagctggtatgagttctttatggacgttttggtggctggcggtgtgatgaaacgccttgaccttgccattaacgataagacagggattttaaatatccctgtactcactgaaaagtgccaacaggaagaatgtatctccgtcttccgcagttttaaaagctatcgcagtggcgaactggtacgcaaagaggaaaaggaatgtatgggaaacaccctctatatcggttcattacaaagtgaagtttatttctgtatctatgaaaaggactacgagcagtacaagaaaaatgatattcccattgaagacgcagaagtaaaaaaccgttttgagattcgattgaaaaatgagcgtgcctattatgcagtccgtgatttactcgtctatgacaatccagagcataccgcctttaaaattatcaatcggtatatccgttttgtagataaagacgattccaaacctcgttctgattggaaactgaatgaagaatgggcttggtttattgggaacaatcgtgaacgattaaaactaaccacaaaaccagagccttactccttccaaaggacgctgaactggctatctcatcaagttgccccgaccttaaaggttgcgattaaacttgatgaaatcaaccagacgcaggttgtaaaagacattctcgaccatgcgaaactgacagaccgacacaagcagattttgaagcaacagtcagtaaaagaacaggacgtgataacaacaaaaaaataactcaaatacaaattcattgaatatagagaggagaacatttttatgaattttggacaaaacctttataactggtttctatcaaacgctcaatcactggtgcttttagcaattgttgtgattggcttgtatcttggcttcaagcgtgagtttagcaaactgattggctttttaattattgcgattattgcggttggcttagtcttcaacgctgctggagtaaaagacattttactagagctattcaatcgcattattggtgcttaaataaaaccgttcttttgtggaatataagtggttttcttatgttccgcaaaagaatggtacaccaaacgaagtgcggtagggatttttgaatctctataaagaaaggacgtgtgaatacatggacgatatgcaagtctacattgccaatttaggcaaatacaatgagggcgaattagttggtgcatggtttacctttcccattgattttgaggaagtcaaagagaaaatcggcttgaatgatgaatatgaggaatacgccattcatgattacgagttaccctttacggttgacgaatacacttctattagcgaactcaatcgcctatgggaaatggtatcggagttgccagaagaactacaatcggagctatctgctctgctcactcatttttcaagtattgaagaattaagcgaacatcaagaagatattatcattcattccgattgtgatgatatgtctgacgtggcacgctactacattgaagaaacgggtgctttaggcgaagtgccagccagtcttcaaaactatattgattatgaatcctatggtcgggatttagacctttcgggaacgtttatctcaaccaatcacgggatttttgaaatcgtctattaaatctgtcggtacattcttactggcagattttcttgtttacggggtagtcaaaagactatccccatttttatgaaaggattgattacatgaagaaaatacgaagctataccag

SEQ ID NO: 12735 - DNA, 579 bp, Unknown
  gut microbiota DNA sequence
gggaaaggtatagccggatattggttttcctcgaaaactaccggaatattaccattcagcgtattcagctcctgctgtttgttgcggagtgctgtttcgttcagagacgcttctgttctgacattcaacagttccagattgattttgttggtttcgagagcatttgcatctcctgtttgaagacgcttggcatacatctttgcaagttcttccgcattgcggaggcgttcttccagaatatgcttttgctgacgaagcatgataatatccaggcaaagttctttcgcctgtaacagcttctcttgacggaaaacatccgactgactgtcaaaagctccggttttcagacgattcaatttgttgcgtgtagcatataaactagggaaatcaaagctttgtgaaacaaccagttcgccgattgtttcgcttttatctttcgctccccatagatgtgcgtaagaaagagtaggatcaggcaggttattatccgttttagcttccagcttctgcgaagtaatcagttgctcgtttgcctgcaactccttattgttcgtttcgatattcttcaatacctgttca

SEQ ID NO: 12736 - DNA, 353 bp, Unknown
  gut microbiota DNA sequence
atacccattccaaatatttgcttttaccggatactctttcctgtaaacaaatacagtgtgatatttaacaaaatgtattctacaccaattatgtatatctttcatatatatgttatttataccattcacccactgttctaaagaccatatgtctttatctgacactaactccattatgaacagtacattataatattgaatgacacctactctcttcctttcctctattaaccttttacacaataacctatacttaatgttcatatcgttcctatgtctctccctctaatctatattttccatccttatatacgttatatatataattattatatagtacatataaatgcctg

SEQ ID NO: 12737 - DNA, 3134 bp, Unknown
  gut microbiota DNA sequence
atgggacataagtggaaatggcttgcaaaagttttttcgttttttggagcttgtgtaggcttattcggtatcggaacatttacacaggttaacggaatcgcatcagcagttcagtctttttttgatcctaacaaagaagatacagttagtattttaggaaatgattattcaatagccatagttattacagcttttgcattagctatttgtgtaggtttagttgtcattggtggtattaagagaatatcaagtgtttctcaggttatagtaccatttatggctatattatatatcgttgcagtattagttttgattgtaactaatattgaaaaacttccgggagcattagcaacaattgttgaatatgcttttggtgttaaagcagtggcaggtggtgtattgtcttcaatagcaatatcaatgcagaaaggtattgcaagaggtattttctctaatgaagccggacttggttcagcacctattgcagctgcagcagcaaaaacaaaagaacctgttcgtcagggacttgtaacaatgacaggtacatttattgatacaatcattgtttgtacattaacaggtctttcaattgtaatgatggactcatataaagtagtgggacttgaaggtgttcaggtaacaacacacgcattccagaatggtttaagtttcttaccagctgaagtttcatcatttatcttaatggtatgtttggtattcttcgcattcacaacaatccttggttgggattattatggagaaagatgtttggaatatttatcaaacaagagcaaagttgcagttaacgtttacagatggttatacatcttagcagtatttatcggaccatatatgactgtaaaggcagtatggacaattgccgatatctttaacggattaatggcaataccaaatattattgcattatttacattaagtggtgtagttgcaaaagaaacaaaagaacactttgaaaaaaagaaacaggaaagtaaatagggaaattacaaataatgaaacttaaaatataattacatagggagttacggaataaataaaactgttgtgttagtgagagattaatgcaacagtttttttgtgataagttataaagcttgttctggctaatctgacgcagaactaccccataagattgaagaattgtttgttatggagcagattataagtttgaatctattgaaattaaaggaaaactaccccatggaactaaagaattgtttgttatgaggcagattataagtttgagtttattctccaattgaaactagaagaaatctgtaccatatacgcgaaaaatttcatatatggtacagatagagagcttgtccagctcagagcagaagaaatatgcaccatataagaagaaaaattcgtatatggtacatatgaaagcttgttccagctcggggaagaacaaatctgtaccatacaagagaaaaaattcacatatggtacaaatgagagcttgttccgactcagagtagaagaaatttgtaccatacaagagaaaaaatttgcatatggtacaaatgagagcttgttccagctcggggaagaacaaatctgtaccatacaagagaaaaaattcgcatatggtacaaatgagagcttgttccagctcggggaagaacaaatctgtaccatacaagagaaaaaatttgcatatggtacaaatgaaagcttgttccagctcggggaagaacaaatctgtaccatacaagagaaaaacatcatatatggtacaaatttcaaaaattttcaaactttcatttcaaaatgacaaataatgtcattttctcctgatatattggaattacaagataacgcaggaattaaccaaatcccgcagatgctaagaagttgtcttggattgaatcattgaaattttatagaaagcagtattattaggaggatttgatatgtttaaatttattgaaaatgcagtagcagaccacagaattagaaagattgaaagtgaattagaaagagataatgcaacaatgggcgatatttatgagcttaacacagctatgaagttgacaaaagaaggtatgaatgcaggcgaggcaattgatatggcagcagaaatgcgagcaaatgcagagtgtattgaagcagaatagaataattcatattttaaacaccggacagatttgctataatgaaagtagatttagtgagaggaatataaaaaaatgaaacttagaaatgtacttattgtggtttctgatatagaagaatctattaatttttatagagatttgtttggacttcaagttgtacttaacaatgatggaaacgtaataatgacagaaggtttggtacttcaggacaagaatatttggaaagattttcttgagaaagatgttgttccacaaaataatatgactgagttgtattttgaagaaaagaacattgaggattttgttgaaaagcttaataatagcagatatgaaattcagtatgtgaatgaattgatggaacatagttggggacagaaaatggttaggttttacgatttagatggaaacctgattgaagttggcactccaattaattagaaaagcacaaaatagaaaattaatattcgaatagcataaaataataatttatgaagaaaaacaagtcaatctttaaatgttggaaattagtctggcatataaagattggcttttttattggagtacaaaatcaaaaaaacgagaaaaatgttgaaaaagctcaaaaaaattgcaagattagcgttgcaaggggtgtttttgggacagctaaaaaagtaggatctacttaacaataagaaaaaaggcaagaaaaaagacaatatttagaaacaaaaatacaaaaaagcgggacagatatatttaaatttttaggaggagaaagttatgaacaataattcattgaaaccatttataaaatttatggcaattgttttgggaggcttatttttaataatgtttatttacgaagttaacagtgagcagaaaagaagctgtgctgcaccgggatgtaaggatcagccaatttatggtagcgactattgttatcagcatagggttaatgatgaaaattatgaagttgaatcagatagtcaggagagcaagactactgct

SEQ ID NO: 12738 - DNA, 7007 bp, Unknown
  gut microbiota DNA sequence
agattataataattcaaataacagttatgataatagttcatcagacaatagcaacagttattcaggtagttactcaaacagtagttcatcaaatggcacatatagtaacagctcatcaggtaaaagtaattcttcaggaagttcatcaaagaagaagtacagcaacccatacaagtcttatgacgatggatatgaagatgtttatatggatgatgattatgacgatgacagatataatagtgattcagattatgcagatggagtagatgatgcgttggatgactatgatgatggggattggtagaaagttggacagatgttttgcaaatttgcaacggtgttttagatgtgttatattttagaaataaaggagatgtttggaatggactcaaataaaacaccgtcagaaattattgcagaattatgtgtagaagcaggtatttcaaaaagtgaattggcaagaaggctggaaattacaccatcacaaatcacacgaatattaaacggagataccaagactataagtagcgacatacttattaagttaacaaagttgtttggagtttctgcagattatttgctggggattacagataaaaaagaaataataaaagaaaagcatacaacacgagtaccaatgttacttatgagttcggcatttccactaggaaggtgcatagaatttatagaaagtatagatgatgttccacagaaagaaatggcatatgctgaatactattattttagtggaaggcacgaaaaagcagttgaatatgctgaaatgtatttaaattgcgaagatataatgcttaaattgtcagcaagcctgatatatacatttgccaatctttctcttgatagaatacattcggcaagatttggacttgaaaggttaaaggaatatcttaaagaagcaatgctagaagaaacagataagaaaacaagagcctgttgtgtatttgtagcaacagcagcacatacgttgttacatattcctgttggagatttaccacctttagctgaatatttatcagaatttactaagggaatgcagttgtggggagcctatgttttggcacacaaagcatatttggttaaagattatcagcgttctttaggaatagtacagacctgtcttatgacttgtagcaaggtatatccaatagctatgatttatttaaatcttgttgttgcaatggatttaatgaaccttaaagaaacggataaagctaaggtatactttatgaaagcatgggagatttcaaggccggataatctaatagaaggtataggtgaacatcacgggcttttgcagggattaatagaaacttgcatgaagaaagattatcctgaagattatgcaaggataattaatattacatacaagtttagtgcaggatggcgccgaatacataatcctgatactaatgaggatgtggctgataatctgacaacaactgaatttactattgcaatgcttgctaacagaggttggacaaataaagaaatttcagaatatttggaaatcactccaagaacagttaagcaacatctgacctgtgtatttaacaaattaaatatagaaaatcgcaagcagttaaagaattttatgcttagataaaaaatacaataggcttaatatcgaatagagaataatggatgtgtcccagtggaaatgtccatttttcttttaaaaagtacgatgtgtaaaaactaaaaaaatattataatttagacaacttataatgttaaagacaagaccttatggaatagtacaaaagctttgaaaattaaaagactaggaggatggactatgggaagaaattattttttgaaaattatgtttttgttagtgttaagtatattaacaataccatttatgacacaggaggcgaaggcttttacaatcacggatgacggagaatacgctgtggtattaaaaacgggagaaggggaaattgacggaacttatggaaaggttataaaatttaattttgatgagaacgaaaaatccataaaagtatctgatataacaaaaggcattattccatataatggggaaactgcttttgcaggttggacaatgacaaggaatgacaccatagataaaatagttacagaacttaagattgatgattttatttctcagggtgaaatgaatggtgtatcatacaagaatggatgcagtttatatgccagattctctgataagagtttagatgaaacagaaaactactatttgaaaatagatggttttggtggaaaagttaatggacaatattcgattttacttgtaataaacaaagatgaatttaaaacaatcgatttaagcaagtacgttgcacaaagagaaggatgcacattttgtggatgggattaccatgggaaagttgtaatgtcaatagataaatcgtattttagtaaaacttctaatgtggttatttctgccgtgtataaaagtaatattttctacggagtagatgcgaatggatgtttaaatgatccaaatcttccagaggatatgagaccattttcatatgtacttacattagatgccaatggcggaacaattgaaggacagaaatcacagaagtatgattatcttggtggagcagatagtggaacagaaatgaaaatattccaatacgttcctgaaagaagaggatacatttttaaaggatggaatgctaagaaagatggttcaggagaatccttaaaatatatgtattggggctcatggcgaagcagtaacgatgaaagttcacagtttgacaaagatggtttaattgaaggaagaaatgtatttacaaatattacattgtatgcagtatgggagaaagatccgaactattcagaaactagggaaattacgtctacaagcggtataaatggaagtgtgacatttttagagtgggttgatgatattaattatagtttgcaaataaaagaattggatgtaccggagagtctttcaaaggaaaatgtaaaatatctggttgatatatttttcttaaacgacaagcaggaaatagtagaagtcaatggcttcaaaattaaagttaaattcaaaatgcctgataacctgaaagattatgatacatataaaattgtatttacaaggaatgggaaaatcattgaacagttagatgcaactgttgaagatggatgtataatttttgaaacaacacatttaagcaattatggtattgttgcaactaaaaagcaggtcgaaataacaaccagcaataatgataataaaggtagtaatacaaacactacagttaacaacaatatcaatactaaattaagtgttaagaaagttacattcaaacaggttacacgtacaaagaataataagaaaatcaaacttaaatttaagaaaattgccggtgcaaaaggatatgagataaaatattcaacttcaaagaagtttggcaaaaaggtaacaaaaacggttaagactaaaaacactacaaaaatgcttagcaagctaaaaaagaaaacctattacataaaggttagagcgtacaaagtggttgagggaaagacttataatagtaagtggagtagtgtgaagaaggttaggactagaaagtaacgttttttattgaaaatgaattaatgttgaagattggatgtgaattggaaatattatggcttgtttattaaatataagaagtgtataatttaaaggctagcactcttaaaattacaatgtagttttttaaaaatgaaagaggtaataatgtttccaataattgacaaacgaaaaacaggaattaacatccgcagaattatggatatgcgtggcttgacagtgaaggatgtgcaggaatatcttgaacttggaagtgtgcagagtatatatcattggattaatggtatcagcatgccaacaatagataatttgtatgcacttagtgatttgtttcacgtaccaatagatttgcttgtttgtggaaatagaaagccacttacactgtgtgataatgcacataatgaaagcaatgagcgagtatatgaatattatgaaagaataaagaatggacgtgcagcataataataaaaattattatactacaagttcaatgacaaagtagaaaacctccattagaattattgtatagacaatgattcgaaggaggttttttatgagcgaaaaaatgttagtaacacaggctttggacgaaagggatttattagtaaagaagataaacgataaaatagaaaaagccagttttatagatacaattaaacctaatgaagataaagtttttgaaaagaaaattaaaaaagaagattatgttaaggaggcaaaagcagcatatcagaagataactgaccttatagagagatttcagactattgatgcagctattgttgattccaatgccaaaacagaaatatctacatcttatggtaaatttaccgtagccggagcaatttcacttagaagcagactacgcggtggtggagcatatgatggagaagcagactttgagcgaagaatccagtataagctccagagcgaatatgatgaaagagttagcttttgtgatattaaaaacacacaattacaggatacggctgaaagtatgcgtttgagtattttaggcaaagacaacaaggttaaagatgacaagccattagcagttgttgatacatatgtgaaagagaatactactgagcttgttgatcccttagatgtgaaaaagaagatagaggctttacaggaaagaagaaattcacttttaactgaacttgatactcaaataaaggtttccaatgcaacaacttttatagaaatataataagttattatatttgcctgcattacgaaaaccttgcacctggcttccctgtaacagggttacgttacatatacagttacgttcaaattaatttaaacaattaagttggaaaattaataagaagatgaatgcaagcatcgagcaaattaactgttttatgttttctttgaatggtcaaagattaactgtcaatgaatttatttttgaacattcttaagttaagtaataactttcatttagacatagagatatgttgaaatccgtgaagaaggttaaggcgttaagtcagttggctggaggcaacctcatggctgtaatgtaggcaaaaatagtgtcataaaaaatgtgaatatttattaaataaaggcaactgtgtgaaaatcaaaaacactcatatttttggtacaacgaggtgtattgacataatgttaaataaaaatataataagtaattatcatattaaatgtccatgttgcaatgaaggaacaataaattcacaatatgatatatgtttagtgtgtggatgggaagatgatatagttcaaaatgaagatgaaaatttttctggaggagcgaataaaatgtccctaattgagcatagacagaattttttagaacaaaggaagaaaaatcccaattataaatggggtaataattgcagataagttgtcaattataaaaatgttagaagtgttatctgtagaaaaggaaagtacataaaataagattgtaggacaatttgtcccgaaaaaatattaggatgtgagttgtgcaaaaacgaggaatgtgtagatgatgttttggttatttattgtgcaaaacatcctacatataattttacaacagttgtaggctggtataatcatgctgatatttatagacattatcagaatgtggagtttaatggtggttatgtgcaaagttataacgcaattgcaaaggctaaagattgcgttttgcttccaataggtgaaaggtcaagaaagattaaatggcaggtgccaagaaaagcaaatggatggaagtttggctttggacgagcaaatgtttggtatgcaagtgaagataatgaagatttaaaggaatatatgaagaaacttttatatcaaattgaaaattatgacggagaaaattgcataaagtaatgaataatattacagtaatacgaacaaaaagaaaaacaatatcaattaaggtaaataatgatttgacaattacagtaagagcccccatttttacttctgataaagaaatcggagaaattttaaagtcaaaagaaaagtggatttctaaatgtattgaacaaataaaaagagaaaacgaagagttatctaaaattgattattttacagcagaagaaattagtaagctggcagataaggcattgaattacattccgggcagagtgaaatattatgcggatattataggtgttacatacggaaaaataacaatacgaaatcaaaagaccagatggggaagctgcagcagcaaaggaaatcttaattttaattgccttcttatgctgatgccacctgaagtaatagactacgttgtggttcacgagttatgtcatcgaaatcaaatgaaccactcaaaagctttctggaaagaagtggagaaaatacttccaaactataaagattcagttggatggttaaagaaagaaggagggggaattataagaaggatgggatgaaaatgaaatggtttgatgtaatagcatcaggttcacttttaggaatagattataaaagagcatcttcttatccagtaggatatgtggattatcttaaaatgtatggaattgactttgaagttaagacaggatttggctcaaatgaggtaaaagttgacagggaaacagactggtctacagatgtggtattagagaatgcgtctgattcatcacaatatatgaagacaacaatgacacagggaagtccaatggcattgtttagaatgaatggaacaaagacagcatcaaaggtagttggcaagacaaaatactacggtaaatggagtaaggttaaaaagattagaattaaaaaataatcttgttgataattgcgtaaaatcaataatttaacaaaaatataactcaaatataacattaatataggtaatacggggttgacacacaaaaaaaacagccgtatactattaaacgtaaatattgactagatagcaaaggag

SEQ ID NO: 12739 - DNA, 116134 bp, Unknown
  gut microbiota DNA sequence
caaaggcccactcttttgttgtaggtatagaatagacaaagaaagtctaatagaaagtttaaaggagaataaagtgtcaagaagagaagaatatgaaatgaagacagaagctctgattacacctatagttgatgaaaagggctttgaattagttgatgttgaatatgtaaaagaaggcagcaactggtatttaagagcatatgttgacaaggaaggtggtataactattaacgaccttgaatctgttagcagaatcttaagtgacaaattagatgaagaagattttatcagtgatgcttatattttggaagtaagttcaccggggcttggccgtccgttaaagaaggataaggactttgacagaaatatgggaaatgaaattgaagttcatttatacagagctgttgacagacagaaacagcttgtaggacttttaaaagcatataatgcagacacaattaccattgaaaatgaagatggtagtgaaacagatatagacagagtgaatgtatcacttgtcagaccaacaattgatttttaattttttaggaggataaaaacaaatgaacaaagaattaattgaagcattgaatatcttagaaaaggaaaaagatattagcaaagagtcattatttgaagctatcgaaaataacttagtagtagcgtacaaaaataactttaacaaagcagacaatgtaacagttacaatggacagagaaacaggagatttccacatttattcacagaaggaagttgttgaagaagtaatggatcctgtaacagagatttctcttgaagatgcaagaagcattaagggaacatacgaacttggcgatattgtaaatattgaaatccagtcaaaggactttggacgtattgcaacacagagtgcaaagaatggtatccttcagaagattagagaagaagaaagaaagagcctttacgaacagtattttgaaaagcaggatgacattgttacaggtattgttcagagaatcaatggtaagaatattagcgtaaaccttggtaaggttgacacagttcttatggaaaaagaacaggctaagggagagcatttcagaccaactgaaagaataaaactttacattacagaagtaaaagacaatggtagaggaccaagaatcgttgtttcaagaactcatccgggattagttaagagactttttgaacaggaagttacagaaatccaggatggtacagtagaaattaaaagcattgcaagagaagcaggttcaagaacaaagatggctgtatggtcaaataacgaagacgttgatgccgtaggtgcatgtgtaggtgttaacggtgcaagagtaaatgcagtagttgatgaattacgtgatgaaaagattgatattgtaaactggagcgaaaatcctgcaatcttaattgaaaatgcattaagtccatcaaaggttgttgcagttcttgctgatcctgataacaaggaagcattagtagtagtacctgatttccagctttcacttgcaattggtaaagaaggtcagaatgcaagacttgctgcaaaacttacaggatttaagattgatattaagagtgagtcacaggcaaaagaagaaggaatccagtatgtattcgatgatgatgaatattatgatgacgaatactacgatgatgaatacgatgcagaatatgatgacgagtattatgatgatgaatatgattcagagtcagaggctgattcagaagaatctgaagaagtaacagaagaaacatccgaagctacaactgaagagacagaagaataacagaccaaatcagggattaggagatgatgctatgggacagacaaaaaagatgcctgtaagaacctgtacaggttgcagacaggcaaaaaacaaaaaggatttgattcgagttgttcgtgacaaagagggaaatgttagtgttgatgcaaccggaaaattaaacggtcgtggagcttacatatgtccggataaagaatgcctgaagaaagcaattaagaataaaggtttggaaaaaacacttaagatttcaggtattggcgaagaaatctatagtcagcttgaaaaagaattaggagagataaatgaataaggtattttctatgataggacttgcaacaagagcagggaaaaccgtggcaggtgaattttcagttgaaaaggctgttaaggataataaagccaaggttgttattgtttcaacagaaagctcagacaatacaaaaaaactatttgaaaataaatgcaagttttataagattcctgtatttatttatggtactaaggctgagttaggcatggcaacaggtaataaagaaagagcatccatagcagtgttggatcccggatttagcaagtcgattgtgaagatgttaacagaaaatgaataagcggaggtagttaaatggcaaagatgagagtacatgaattagccaaagagttagatataaaaagtgctgacatagtaaaggcacttggagaaaagggcatagatgtaaaggcagcaagttccattgaagatgacaatattgaatttgtaaaaacaaaattcaagaacagtcagaaggaaagcagtggagaagctactgaagatgaaaagaaagaaaagtcaaagccaagagttataattacaagcaaaggtgtaattagaagaggcgaaagacattctaagggtgatggagaaaagagacgcagaagacacagtgatggtgaacatcatcattcatcagataagaaggaaaagagtgcggaagcaaaggttacaactgaaaagaaggctgagcctaaggtagaagcgaaagttgaaccaaaggcaccggttaaagctgaaccggaagtaaaaaaagaacagcctaaggaagcagttaaggctgaaccggttaagaaagaagaagttaagccggtagcaaaaacagaacctgaaaaaacagaaacaccaaaggttgaagcaccaaaggttgaaccaaagaaggaagaggtaaagccaaaagatatgcagaaggatacaaaggtagaaaagaaaacagaacagaataacaacagacagaataagccttttaacagagacaataatgatcgtagaaatgatggtcagagaaatgaccgcagaaacgacagaggagacaacaaaggcggatataacagagataaccgtaacaacaggaataacaacggaaatttcagagacagaaacaacaacggccagggcagaaatgacggtcagagaaacgatcgtagaaatgatggtcagagaaatgaccgtagaaatgacagaaacgataatagaggttataacagagatagaaataataatggcaataacggaaattatcgtgacagaaataacaacggaaatttcagagacagaaacaacaacggtcagggcagaaatgacgacagaagaaatgactttagaagaaatgataattcaagaggcggtatggcacctgctgaaccaattcagaataaggatagaaagtcaagagagaataaacttcgtcaggaccgtcaggaaagaaataagaagaattatgacgataacagacagggcaagaatggcagaaagaaagatttctctaagcctgtaatggaaaaacctaagaagaaagaagaaaagaaggaagaaatcaaggtaattgaggttccggattttattacaataggtcagctcgctgaaagaatgaaaatgcaaccatcagcagttattaagaaacttttccttgaaggcaagatggttactgttaatactgaaatcgactttgacagcgcagaagaaatagctttaggctatgacattatgtgtgaaaaagaagaaaaggtagatattattgaagaacttttaaaggaagatgaagaagatgaaagcttaatggttaagcgtccacctgtagtatgtgttatgggtcacgttgatcatggtaaaacatcacttcttgatgcaattagagaaacaaatgtaatttcaggagaagcaggcggtattacacagcatatcggtgcttcagttgttaaaattaatgaccagactattacattcttagatacacctggacatgaagcatttacatcaatgcgtatgcgtggtgcccagtcaacagatattgcaatccttgttgtagcagcagatgatggtgttatgccacagactgtagaagctattaaccatgctaaggcagcaggaattgaaattatcgtagcaattaacaaaattgataaaccgggagcaaacattgaccgtgttaagcagggacttgcagaacatggattattagcttcagactggggcggaaacgttgaaatggttcctgtatcagctcacactaaggaaggtattgatgaccttcttgaaatggttcttttacaggcagatgtattagaattaaaggctaatcctaatcgtcaggcaagaggtattattattgaagctaagcttgataagggtaaaggacctgttgctacagttcttgtacagaaaggtacattaaaggttggagcaaatattgcagcaggagctaaccacggtaaagtgagagctatgtctgatgacagaggaaacagaattaagacagcaggcccatcaacacctgtagaaattttaggtcttagtggtgttccaaacgcaggtgaagtatttgtatcaactgcaacagctaatgaagcaaaagactttgcaaacacattcgttgaagacagcaaggctaagcttatggaatcaaataaatttagaatttctcttgatgatcttaattcacagattgaagcaggagaacttaaggaacttaaccttattatcaaggctgatgttcagggttcagttgaagctgtaagacagagtcttgttaagctttcaaatgaagaagttgaagttaaggttatccacggtggtgtaggtgcaattaacgaatctgacgttatcttagcatcagcatctaacgcaattattatcggatttaatgtaaaacctgatgcacaggctgaagaaacagctaagacagaaggagttgacttaagactttattctgtaatctacaacgctattgatgacattgaaagagctatgaagggtatgcttgaacctgtttacgaagaaaaagttatcggtcatgcagaaatccgtcagattttcaaggcttcaggtgttggaaacattgccggttcatatgttttagatggtgctatgcagagaggatgttcagcaagagttacaagagatggagaacaaatttatgaaggaccggttgcatcacttaagagatttaaggatgatgttaaggaagttaaagccggttacgaatgtggtcttgtatttgaaaaattcaatgacattgcagaaggcgatcaggttgaagcatatattatggtagaagtgccaagataggaactttaacctagtccggaaaggattaaaaattgagaaaaaacagtataaagaacactcgtattaacggggaagttcagagagagttaagtgtaattatcagagaacttaaagatccaagaattggaataatgacaagtgtaacaggtgttgaagttacacctgatcttaagttctgtaaggtatatattagtgtattaggtgacgaagaagcaaaggcagaaacaatggcaggacttaaaagtgctgccggttttatccgccgtgaattagcaagaacagttaaccttagaaatacaccagaattaaaattcgttatggaccagtctattgaatacggtatgaagatgtcaaaattaatagacgaagttaatggaaataataaagaagaatcagaggataacgaataagcataaaggaattaatttgaatgatgaagaagattaacgatattattggagatgcaaagactattggtatagcaggtcacttgcgacctgacggagattgcatgggttcatgtatgtctttgtataattatcttaaaaagaacagaccggatttagatgtaagggtatttttagagtttgtggacaaaaagttcaatattattgaaaatacagaccagattatcacaacaggatatgacggtactaaatttgatttgtttatatcactcgatacggcaagtcttgacagattaggacttaatttgcctttctatgagaatgccaaaagaacagcctgcattgatcatcatgcaagtaatgacggatatgcagattataattatattttgccaaaggcaagttcagcaagtgaagtattatatgatttgttagatgaagaattaattgataaatcaattgcagaaccaatgtatatgggaatcgcacatgattcaggcgtattcagatttcaaagtacaacaccaaaaactatgagaatcgctgctaacatgattgaaaaaggtgttaatgtgaatatgattcttgaagaaacattttttagaaaaacatataaccagatgatggttactgcgaagattcaaagtgaagcagtgttggcattagatggaaaatgtatttatggttactgcacatcagaaatgatggaagagtacggtgttacaactaaggatttagatgcagttgtggcatcaataagaaatgttgacggtgttgaagtggctatgtttttgtaccagttaagtgaggattcatacaaagtcagtctacgttcaaagaattacgtggatgtaagcaagattgccgttgaaaatggtggtggcggtcacgtaagggctgcaggagcagagatacacggcgaacttaacgatataataaacaaactgcttaacagaataaaacaggacatttaaaatgaaactgttgaaggagttgatggtataaatgattaatggagtcattaatgtttataaggaacccggctatacatctcacgatgtagtggcaaagttaagaggaatcctaaaacagaaaaaaataggccatatgggaacccttgatcccaatgctgtaggagtgttgccggtttgtcttggaaaagcaacgaagctttgcaatttattgtctgaaaaggacaaaacttatacagctacaatgttgcttggaacagagacagatactcaggatacaacaggtcagattactaatcagacacctgaagaggaagtcatgaagctttccgaagaaaaggtttttgatgtgattaaaagctatataggcgaatatgaccagattccaccaatgttttcagcaataaaaataaatggtcagaaattatataatcttgcaagaaagggagaagaaatagaaagacctccaagacattgcaaaattatagacattacaataacaaaaattgatttgccaagagtaagttttcacgtaacatgttctaagggtacatacgtaagaaccctttgctacgacataggaaaggatttaggtgttggggcatgtatggaaaaacttacacgtacacgagttgaaagatttgacataaaggacagtatttctctatctcagatagaagaaattagggaccagggagttttggaacagtatattactcctgttgacgagattttggatatgtattcaaaatgtatggtttcagaggaagctgaaaagttactttataacggtaatatttttacttcgagaaacacattgttaaagatgaatcatcaggatggtcagacagtaagagtatatactcacgatggcaaattcattggtttatatatgtatattacagaaaaacagatatacaaaccaattaagattttcttataaaaatggagaaattatgcaacgcatttctttagatgataacataaaattaaaaaatacaattgtaacaattggaaagtttgatggaatacataagggacacgaaaagcttcttgaagttatagttaacaatgctaatggtagacagaaagtagttcttacttttgaaactacaccttcagcattccttaaaaataatgccaacaaaacaattgtgacagaagaggagaagcagattctttgtgaacagcagggcgttgatgtgtatatgaaaatgcctatgaagaaagagtttcttgcactttctccggatgaatttgtatcaaaaattttaaaagataaaataggtgccacaacaattgtatgtggaccggatttccattttggaacaaaggcttccggaaatgttaagtttttgaaggacaatcagaaaaaatatggttataatcttatagttgtagagaaggaacagtatcacaacaaagatataagcagtactagtattagaaaaaaaataacagaaggtaagatgcaggacgtaaatgaaatgcttggacatccttacaggataatcggtaaggttgagcagggcaagcacttgggacgaacaatcggacttccaacagctaatatcattcctgatgaaactaagttattgcctcctaatggcgtctatagaacagttgtggtagttgaaggtcagacttttaatgccataagcaacgtaggcgtaaatcctacagttgaaacaggtacaaagataaaagttgaaacccacataattgactatgagaactatatctacaatgaaatcgttcaggtacagttttatgatttcataagaccggagcgaacatttgacagtttagagaaattgaaacagcaaattgaagcagatatagaaacctgtagaagaattgttgggaataaataagataaaaaattaactatattaataaaaatggcaaacaaaattaaaataattaaatattgtaaaattatataaaaattattgacatttgcaattacctttgttagtataaacgagtatgtttaacctacacgcagtacttggatactccatccgatacttcagtgtatggggatattttaaaatttaggaggaaatataaatgatttcaaaagaagtaaaagctcagttaacagcagaatatggtaagacacctacagatacaggttcaccagcagttcaggttgcaatcttaacatacagaatcaaagatttaactgaacatttaaagacaaaccacaaagatcatcattcaagaagaggtcttcttaagatggtaggtaagagaagaggtttacttgactacattaaagaaaacgatgttgaagaataccgtgctttaattgaaaaattaggaattcgtaaataataataaattttatttgagagtttttatgaacaaagaaacagaatgtgtagaaatacatattctgtttttcttttttttggataagaagaagttttctttgtttggaagatagagtaaaagataaaaataaaacaataaaaatatagaaaaatactaaaaaatgaaggcaagtacagttatgcgtacttgctttttattattgttttgtttataatgtaaaggattgcgtatatttatgaaaatatactttatgaaagcaatacacattttgcagaagaacctagccgaagccactgtaaagactattatgatttaagctagttattgtaattattagttacatagtgatttttacagtagtttcggattcttctgcagagagaaaataaaaaggagaagttactatagaaagtaacgaaagagagttatgtataagagttttagtatggagcttgcaggcagaacacttacagttgatgtaggacgtgtagcaaagcaggctaacggtgcagcatttatgcactacggtgatacaacagtattatcaacagcaacagcatcagataagcctagagaaggtgttgatttcttcccactttcagtagagtttgaagaaaagatgtattcagtaggaaaaatccctggtggatttaataaaagagaaggaaaagcatcagaaaattcagttcttacagcacgtgttattgaccgtcctatgagacctttattccctaaggattacagaaatgatgtttcacttaacaacttagtaatgtcagttgatcctgagtgcagacctgaattagttgcaatgcttggttcagcaatttcaacatgtatttcagacattccatttgatggcccatgtgcaatgacacaggttggaatggtagatggagaatttgttgttaacccaagtcaggcagtttgggacaatggtgatttgcagcttacagttgcttcaacaaaacagaaagttattatgattgaagcaggtgcaaacattatccctgaagcaaagatgattgaagctatttatatggcacacgatatcaaccagacaattattgaatttattgaaaaaatcgttgcagaagttggaaaagaaaaacacacatatgaaagttgtgcaattcctgaagaattatttgcagcaattaaggaaattgttcctccagcagaaatggaagttgctgtatttacagacgataagcagacaagagaagcaaatattaaggaaattacagaaaagttagaagaagcttttgctgacaatgaagaatggcttgcagtacttggtgaagcaatttatcagtatcagaagaagacagttcgtaagatgattcttaaagatcacaagcgtcctgacggaagagcattagaccagattagaccacttgcagcagaagttgacattgtacctagagttcacggttcagctatgtttacaagaggacagacacagatttgtaacgtatgtactttagcaccattatcagaagcacagaagattgacggacttgacgaaaatgttaagacaaagagatatatgcatcattataacttcccatcatactcagttggtgaaacaaagccatcaagaggaccgggacgtagagaaatcggacacggagctttggcagaaaaggcattaatgccggttcttccttcagaagaagagtttccatatgctatcagaactgtttctgaaacatttgaatcaaacggttcaacatctatggcaagtacatgttcatcatgtatgtcattaatggcagcaggtgttccaattaagtcaatggttgcaggtatttcatgtggtcttgttacaggcgaaacagatgatgattatgttttacttacagatattcagggacttgaagatttcttcggcgatatggactttaaggtaacaggtacaacagaaggtatcacagctattcagatggatattaagattcacggtcttacaagagacatcgttgaaggtgctattgcaagaacaagagaagcaagattattcattatggatacatgtatgaaacctgcaattgctgaacctcgtaaagaagttaacgcatatgcaccaaagattgaaacaatccagattaatcctgataagattggtgatgttgtaggtaagagtggtaaggttatcaatgccattatcgaagaaacaggcgtaaagattgacatttctgatgaaggaatggtttcagtatgtggcgttgacaaggatatgattgataaggctcttaagtacattaagacaattgtaactgatttcgaagaaggaatgattcttgaaggaacagttgtaagcattaaggaatttggtgctttcatcgaatttgctcctggcaaggaaggaatggttcacatttctaagattgctaaggaaagagttgagcatgtagaagattaccttacacttggtgacaaggttaaatgtaagtgtcttggaaaagataagatgggaagaatcagcttctcaattaaggatgctcagtaagaacttacttgaaataaatacattaaaaatattaacctgcattggctttgctgatgcaggttttttaaaaaaatgatgaggcacctatagtttataaatcaaatccaacattatttgaatggttttcttctccaatagtatatttagaaacagactttgcggacagatttagaaaaattatgggagaatatttttctacaaagaaaagcctgtatcactatataagtatggcagagggaaactatcgtgaatatctaaaaactgaaatggtaaggacaaagaaatatttctacatactaagaccagtgttggcatgcagatggattcttgaaaagggaacaccgccaccgatgttgtttagagaattgatggaaagtgaacttccaaaagaactagtgccggaggtggaaaaacttctggacttgaaaatgaactcactggaaataaaagaaattccacgcgttgacaaaatcaatgaatacttaaatgaatcaattgaggaaataaaatttaagttaaaatcagtgggagaaaataaggaagtgcagtgggaagaattgaataaagtgtttttggaagaggtaggagaataagggaaagcaaatgaagtttataaaatttataacaatagtgttgattttaatagtatttatagaaggctttaatggagagtttgcaaacccaaccatgtttgacataataaaatggatattttgcattgctcttgtaggaatatggttaattgcttatgtaaagcagaatagacgatgattacatatgttataagtgagcgtaaatttatatgaatgctatatgggaaaaatacatacacaatgaatttgttgacaatatggcatataagccatataataattgaaaatgagactatatgactgattttaaaatagtggcttatgaaaaagaaaatggggaagttcctgtcgaaaaatttttggaggatgttaatccaaagatgagagctaaaatatatggattattggaaattctacaggaaaagggaaatagacttagagaaccatatagtaaacacttggaagatggaatttttgaattgcgttgtaaatttggaaatgatattacaagaatattatattttttctattatgagggaagaattgtaatgacaaatggttttgtgaagaaaacacaaaaaaccccaagagaagagatacagattgcaaaggatagaagaaaagattttatagaaagggtgatgaagaatgagaacatttgacgatatgctttcgaaacaattgaaagatgaagaatttaggaaagagtatgaagcaattcagccggagatggatgtaataagagcaatagttgatgcaaggacatctcagaatttaacacaaaaagaacttgcagaacgaacaggaattaatcaggcagatataagtaagttggaaaatggaacgagaaatccatcagtaaatttgcttaaacgattagcagaagggatgggaatggctcttaagattgaatttgtacctaaacaaaaaatttgaaaaattaaggagatatttgaaagagaataaattataacaagaaagaaggaactccctacgacaacaatagattgtctttaagctgttccttctttttatattatataaaaattgattataagtattgttttgcgagttgtaattccacaacactatcagaatatctgtagcttatgcttctattttttcttattcaagaagtacaatacttcatgttttcgtgggtcttttacatttggtgcagggaatttaaccttgccgaaccaccacttaaatactacaaaatataatccgattgaaagtatggctccgcagattaaatcaatgactgagtgctgtttcaggaaaacagttgaaaggcaaatgagaaccgtaagaacccatgaaactttcttaatgcgttttcttgaattaagtttctgcatatgcttacttttaaccaaacaaagatgagcagaaattgtggcaaaaacgtgaatgcttgggcaaacattagtaggtgtatcgctagcgtaaaggaactgaacgatagttactagaatgttgttgcgaccaatatttgtcaatcttaaattaagtccgttaggaaatactgtgtatacaataagtgcaattgtcattcctgtaaactcataggcacacattctatagaattctttctttgaatggtaaaacaaaaaaagaaaaacagcaggtatgtacagaaaccaaatcagatatggtattacaaaccattcacagaatggaatcatgtcatcaaggggacaatgtataatatgtaatccggcataatccggagttattttttgctctaatattaaaaaccatggcaaatatataaaaaaatacaataaaggccaggcgtgtttgtactttggaagttctttttttactctattcataactcaccttctaaaattgtatgaaaatagcagaaactaaatgagtaactgccacaatattttacatagaaaaatatcataaaataaaaacaaattattaaaaatctgttataatactaaagaatttgaaaaaaacatatacatatctttagaaacacataaaaaaaagtataacatccttgtgaaaaaatacaagcagacatttacaatgaatataaaaaaatcaaaattgagtgttttgatacataaatcgtataagaaaagaaatgatacaaaacatcaaaaatgaaaaaggagaaattagtaatgaacattaatcatattattgcaaatgagctttcagttaagctttggcaggttgatgcagcaataaaacttatagatgaaggaaacaccattccgtttattgcaagatatagaaaaccggtaacaggtgaattaaatgatgagcagttaagaacacttgatgagcgtttgaaatatcttagaaatttggaagaaaagaagaaaacagttgtggattccataacagagcagggcaagatgacagacgaaataatgtctaaaattgccatggcagaaacaattgttgcagtggatgatatttacagacctttcagacctaaaagaaaaacaagagccacagaggcaaaggctaaaggacttgaacctttagctgatattttcttaaaacaggaaaaaaacaaaaatccggaagaagaggcgaaagcttttgttaacgaggaaaaaggtgtagccaatgttgcagaagcaattcagggagcaaaagacataattgcagaaatagtatcagataatgatgagtttcgtaaggctattagaaatacagttgttaaacatggtttaattgtttctaatactaaaaatcctgaggaaaaaacaccgtatgaaaactattatgattatagcgaaggagtaaataaaattccggggcataggatccttgccattaacagaggtgagaaagagaaagtattaaatgtaaaaatagaaatgccggaagaaaatataattgcatccttagacaaagttattataaaaggcgaatctcaatttaaaccgctgttaaaagaggcgattgaagatggctttaaacgtcttataaaaccggcaattgaaagagaaataagaagtcagcttacggaaaaagctgaagatggagcaataactgtatttggacagaatcttaaacaattacttatgcagcctcctattgccggaagaaatgttttgggctgggatccggcgtttagaacaggatgtaagcttgcagttgtagacaacacaggaaaagtattgtatacaacggtaattttccctacagcaccgcagaataaggtggctgaatcaaagaagattgttcttgacataattaagaaatacaatgttagtcttatttcccttggaaacggtacagcttcaagggaatcagaagcagtaattgttgacattataaaagaatgtcctacaaaggtagaatatattattgtaaatgaagcgggagcttccgtttattcagcaagtaagcttgcaacagaagaatttcctaattttgatgttggacaaagaagtgccacatcaatggcaagaagattacaggacccattggctgaacttgtaaaaatagaaccgaaagcaataggggttggtcagtatcagcacgatatgaaccagaagaaattggatgaagcattatctaacattgttgaagactgcgttaacaatgtaggcgttgacttgaatacagcctcagcaccgttacttgaatatgtttcaggtattagtaagactattgcaaaaaacatagttgagtatagagaagaaaacggacagtttcaaagcagaaaagatttgctttcagtagcaaagcttggacctaaagcttttgaacagtgtgccggatttatgagaataagagaaggaaaagaaccacttgattatacaagtgttcatcctgaaagttattcatcagcaaagaaacttttaaaaaaatacggatttacaactaaggatattcttggtggaaatattcatttaactgacgaaataaaagatgttaaggaagttgctgaagaaataggcactgatcccataacattaagagatatgattaaagaattggaaaagccgggaagagatccgagagaagaaatgccaaagcctgttttgaaaagtgatgttttagattttgatgacctaaaagaaggaatggaattaaaaggcacagtaagaaatgtaatagactttggtgcttttgtggatattggtgtacatcaggacggacttgtacacatatcagaaatgagtaacaaatttataaaacatccgttggatgttgtttctgtaggagacgttgtagacgtaagagttcttagtgtagacaaagaaagaaaacgtatacaactctccatgaagaaataaaaattaaatattttcaaaccagttttttgtaaactgaagaaaattaattgcctgtttgctaagtgaagtgttttcatcccaggcaataactaaggttctaaagacctgttcttttaaaggtacgattttaaatggtttgatgaatttaaataaaaaactttaaaatatgaaaatattgtgttaatataaaaacgttgcttaaatatttaatacgtaattagttagaaaaaaactttaatgtttggcaggacgtttttgtaaaagatagatggccgaaattaagaccatctatctttttttaagcagagtagttgatagacaaaaagataaaatgaacggagaagttaagatgaagtttaatattaaaagcgatgtagacacaactcgtaaagaaattgaatctgcgttgaaaaacaatgagcaggaaaaacaagatactcagtcatatcttaataaaaagaagaataacaaagtaaaatgggacagaactaagtggattatttccataattcttttattggctggcattatttttgtaggagtaaacaacggattggcatatagtactgttagaacaggacacaagaagtacgaagatgccaaggtttattatttaaaatcagatagtaaatgtacacaggaatttaaaggttatgacggaaccttggaagatatgtctatttatatagacaatcagggaagagaaagttcaaagggttcaatgattcttactgtagttgacaaggatggaaatgaacttgcaactacttcaaaaccgttaacaggaatgaaaacaagaaagtatactcattttacttttgagaagcctgctaaactaaaaagaaatgaatattatacacttataattcagtgtgaagatgcttataatccacagaaattcggtgtatatacaacggacaaaaataacagttacttaaagagtggaacaattgatgggcagaagttggctgatggagaaaaaatagccatttccatggaatttcagttttataacacaggtgctttaagaataatgtttggaatgcttattctttcgcttatttttgttttagtaccttttggagtaatagaagaaaagtttaataagaagtttaacaagaacatatcacttgataagattctttcgagaattttattctgggtatctcctatagttgcctactttatggttgaaagtctgtcatcttttactgtaggacctattttagagtctttgtttacagtaagaggattgttaaatattattatttattatattgtgctatttgtattttttgcaattacgaacaagacacagtattcagctattttaatgtgcatagcaatgtttgttcttgcgttaactaactattttgtatttggctttagaggaatacctgtgcttgcggcagatgttttatcaattggaacagctttaaatgtggcagatagttttgagtatacatttgatatatatgttctttgggcagtaagctttttagtggcattctcaggagcaatgtttagcttaaagagctataaaggattaaaattaaagaaacgtttggtatcagtagcagttattattgctattgttatcggtggatataatttctatattaattcaagtggagtagtaaatgctggcattattgacagtcagtggaaaccacagttaacatatgctcagaatggcagtgtgttgtcatttacaacatcatggaaatatattaagaataataaacctgatgaatactcaacagacgacgttgaaaaaatagcaaagaattttaagtcagattcaacagacaaaaattctgcaaaaacaaagaaaatgcctaatgtaattgcaatcatgaatgaatcattggcagatttaaatgtggatggaccttttgagacatcagaggattatttgccatttattcatagtcttacaaaaaatacaattaagggtaaactttatgtgtcgattgaaggggcaaatactgctaactcagaatttgaattcttaacaggaaattcattggcgttttttgcaccaagagcagtaccatataacaactatgttaagggcgttgttccttcattaacaagaactcttgtatctcagggatatatgggcaataattcatatcatccatataagagaagcggatggaacagagagaatgtatataacagcttaggatttaatcatttctattcaatggaatattacaaaaaacctgagtttataagaaactttatttctgataaaacagacatggaacagattacaaaagattatgaaaaggcaagaagcaagtcatctgatccgttttatttgtttaatgttacagttcagaaccacggcggttatgttggaaatagaggttttgtagatactgacattcaggtaacaaacagtatgttaagctcagatgaagtagaacagtatgttacattggcaaagaagtcagatgaagctttcgaggagttgataaaatattttgaaaaagtggatgagccaactattattgtaatgtttggagatcaccagccacctcttagcacagatttttacagtaatattttcggaaagaaaatagataattttacagctaaggatactgcaacgtggtattcaacaccatacgtaatctgggctaactatgacatagaagaaaagcagaatgaggatatgagtgcaaactatttatcttcatatcttttaaaccttattggagcggatatgacaggatataacaagtatcttttagacttacagaagaagatacctgttcttaccggattgttctaccagggagatgatggagaatttagaaatatagatgaaaagtcaaaatatactaaatatataaatgaatactcaaaagttcagtataatggtttatttgataaaaaacatagattggaggatttctttttcctaaaagatggagattatcaagtgaaagaagataattaaaaaagtttgaaaaaataaaaaaagttgttgacaaatgttgcctaaacgtatatattaatagagcagtttaaatctgtaagggatcttagctcagctgggagagcatctgccttacaagcagggggtcacaggttcgagccctgtaggtcccattacatttttaaataagcaacttttcggcgagatagctcagttggctagagcacgcggttcatacccgcggtgtcgagggttcgaatccccctctcgctactttttttatgcaaatatggaatgtaaaaatggcagaatcacttttacattcctttttttatctaaaattatttcattttttattctattgatacatttatcgaaaaatgtggtatactaaaacagaatgtgcgttgagcgaggtgaatgtaatatgagaataggaatgggctatgatgttcataagcttgttgaagatagaaaattaatacttggtggagtggaaattccttatgagaagggattgcttggtcattcagatgcggatgttgtagtacatgccattatggacgcattacttggagcagctgcacttggagatataggaaaacattttccggacactgatcctaaatataaggatatatcaagtattgaattacttaaatatgttggaaaacttttagatgagaacaattacagaattggaaatatagatgcaacaattatttgccagagaccaaagcttgcaccatacagagaacagatgataaaaaatgttgctaaggcattaaacatagatacatcaaaggtttgtatcaaagcaacaacagaagaaggacttggatttacaggagaagggcttggtatttcatcacaggccatagccttattggaaaattaaaatggaagaatataatttacaggaaataagaatagaggattataatagtataaaagaatattatcagatgagaaggccggagacggcagacagcaatatacttgatttatatatttggcttaactgttatccaacatggtattttactaatgataaaggattgatgtgggtagcaaaaagtgaagatggacaatattattcttcaataccctgttgcaaagatgaagatttaaaagaatgttttcttgaaactcagaagtattttaatgaagtacttcaaaagaagcttgttatgtatgtggtggacaaggcagcagttgacttgttacaacttccggaagatgaatatgttgtagttcctgacagaacatatgcagattatgtttatgatgccgaaaaattacgtacatttagcgggaaaaaataccacaaaaagaagaatcacttaaatgcttttaagagggaatatgaaggcagatatgagtttaaatttttaagcaaaaaagatgaacctgaaatattggcttttttagaagattggaagaagcacaaaagtgatacggaggagcatgaatttattgacagtgaagctgttggaattaaatatattcttgaacatgaagaagtgtttgattacaaaataggcgcagtttatgtggataataagctggaagcttttacaatcggtaattacgaaagtaaggaagatatggtttatattccggttgaaaaggcgaatcctgaaatcagagggctttatccatatatttgcagccagtttctgatagaagcttttcctgaagcaggaaaagaaaacagggaagatgatatgggattagaaggacttagaaaatcaaaattatcatataatccgatttatatggtggaaaaatatactataattcaaaaataaagggcttaggaaacgttatgattagatatcttgaaaataatgaaaaacaaaatatcagaccattatatgagcactgttttgatgatacaaaagagtacactgattactattttcaaaatagattgccgggcaatcatgttattgtaaatgaaagagataacaagatagtgaattgtgttcatcttatcccaaagacagttatacttggaaaactaaagacaaacattatttatatatatggtgttggtacttatgaagagtatagaaaacagggaattatgtcagaaacatttaaacatttgctgaaagatatgtttatggatatggaggctttcacatatctgataccttcagatgaaggtaaggcaaaggtttatagcggattggggtttgaatatgttatggataagcagaatttaaaacctgttgatcaaagaaagaaagctactcattcccttatttacagaaaagctgaaaagtcagacttaatcagacttgccatatttgctcaggcatcaatggaaaaaaattatagcgtaagccttgcaaaagacagcgattattttaagaagattaatgaacttataaaaatcgaaggtggcgacattgatatttatgttgaaaataaggttattgtaggttatagaatatggatagatggtgaaatccttgaagaagttcttgatccgtcaatacagagtcttaactggcttgaaagcacaggaaagccttatgttatggcaagaatcataaacatcagaaagacagtaagacttttaggatttcagggagaaggaagaaagattttaaggattacagatccggttcttgaggaaaataacggttgctttatattgacatatggacacggtaatgtaaaattggataaagtaaaagaagaacagttaatggaagatattgagtttgatttgactattggagagttgacagctcatatttttggttacaaaataatagaaggtttacctttggtatgtaagaaggacagcttttttattaatgactatttgtaagatattaacatatatataaataaaagtgaaagtgtgtataaagtgggattttggagttattacaaagaagaagttaaagttataagggatagggatccggccattaagaaggacattgaagctatactttatcctagtttttgggcgatatataattatagaaaggctcacaaactttatgaacagggaaagatttttaaggcaagaaggatttctcagagaacagccagaaagacaggaatagaaatacatccgggtgccaagattggcaagggactttttatcgaccatgggcatggcgttgttattggtgaaacagctattttaggtgacaatattactttgtatcagggagttactcttggaggaacaggaaaggaacagggtaagcgtcatcctacgcttgaagacaatgttatggttggtgcaggagcaaaagttcttggttcctttacaataggcagaaattcaaagattgcagcaggttctgttgtacttgaagaagtgccaccttattctacagttgtaggagttccgggaattgtagttaagagaaatgacgaggcagttccttgttatgatcttgatcaggttcacattccacatcctgtacagaatgaattaaagagattaagtgacgaaaatacaaaacttagagaaatgatagaccaaattaacaacaaaattaaggagtaaagctatgaaaatatacaatacgttaacaaagaaaaaagaagaatttgtacctcttgaagagggaaaggtaaaaatgtatgtttgtggacctacagtttataaccttattcacattggaaatgccagaccaatgattatatttgacactttcagaagatatctggaatataagggatacgatgttaactatgtatcaaactttactgatgtagatgacaagattatcaagaaagcgattgaagagggaacaacagcagaagaaatttcacagagatatattaaagagtgcaagaaagatatgcatgatttaaatattgaacctgcaacaactcatccacttgcaactcaggaaattgatggaatgattgaaatgattaaaacattaattgataagggttatgcttatgatgctgacggaacagtatattacagaacaagaaagtttaaggattatggaaaactttcaaagaagaatattgatgatttggaagcaggtcatagagatataaaggttgcaggagaagaatcaaaggaagatcctcttgatttcgtgctttggaaacctaagaaagaaggagaaccttcatggccatcaccatggagtgacggaagaccgggatggcatattgaatgttcagttatgtcaaagaaatatttaggagatgaaattgacattcacgcaggtggagaggatttaatattcccacaccatgagaatgaaattgcacagagcgaagctgcaaacggatgtgaattctctaaatattggatgcataatggcttcttaaatattaacaataagaagatgtcaaaatcattaggcaatttctttacagtaagagatatttcagaaaaatatgaccttcaggttttaaggttctttatgcttagtgcacactacagaagcccgcttaactttagcgatgaccttatggaatcagcaaagaacggacttgaaagaataatcacatcaggagcaaaaattagagatattatttctaatggcaaagacggaaaagttacagatgcagaagctaagttattagatgaagcaaaagaatatattactaagtttgaagaagctatggatgatgattgcaatacagcaaatgcaatttcagcagtatttgaattagttaagtttgctaacagtaacttaaatgaagaaagcacaaaagaatttgctgcaggtgtatatgaaattttagataagctttgcaatgtacttggaattattcttgaaaaggaagaagaaaaagtaggcgatgaagattacattgaagaaatgattgcaaagagagctcaggcaaagaaagatagagattttgcaatggctgatcagattcgtgatgaattggcagcaaaaggaattgtattaaaagatacaagagaaggaacaaagtggtcaagagcttaattagtggtaatatggaagaaaataaaattttaggggaacatagtgatttgttccaaattataaaagatacaatggagttaaaggatattgacataatgaattattcacctttgactctggcatatataggcgatggaatttatgaaatcgtaattagaaccataattgttgaccaggcaaacagacaggttaacaaaattcataaggcagcatcaaatcttgtaaaggcacacactcaggcagaaatgatttttgcaataatggataagcttactgaacaggaacttgccatttataagcgtggcagaaatgccaaggcagtaacccgtgcaaagaatgcgtcaatgtctgactacagaacagctacaggatttgaagctttaatgggatggctgtatttaacaaataagtctgaaagaatgatgcttttaattaaagaaggcttaagtattatagaaaaggaagaagatagcaaatgagatacgaggaatttacgttagaaggacgtaatgcagtaatagaagcatatcgtgccggaaaaacaatagataagctttttgttttggaacattgcaaagaaggttcaatgaacacagtgcttcgtgaagcaaaaaaacatgacacagtaattaactatgttaaaaaagaacgtcttgatcaaatgtcagaaacaggaaagcatcagggagtaatcggctatcttgctgcttacgagtatgctacagttgatgaaatcttagataaggcaagagaaaaaggcgaatcaccttttgtaatattacttgatgatattgaagatcctcacaatcttggcgcgattataagaacagcaaaccttgcaggagcacatggcgtaattattccaaaacatcgtgcttcaggacttactgcaacagttgcaaaaacatcagcaggcgcattaaactatacacctgttgccaaagtaacaaacatttcaaagacaatcgaagaattaaagaaagagggaatgtggttcgtctgcgccgacatgggcggaacaacaatgtatgatcttgaccttaaaggatcaattggacttgtaatcggaaacgaaggcaaaggagtcagcagacttgtaaaagaaaagtgtgactttgttgcttcaattccaatgtttggagatatcgattcccttaatgcttcagttgcaacaggagttttggcttacgaaatagtacgccagagaatgggaaagtagaagaaaaatgacttgttaagaaataactattatgatatactttctaagtcttttgtagataagctgtcttggctcagtcggtagagcgtcgccttggtaaggcggaggtcgggggttcaagtcccctagacagctttaagaatgaaataagaattatatgattttttaatcaatgtgatattgtgttgagatgaaccggaccagcattagctggtccggttcgttcatttaaatgttatgtattgaagaatgtataagcaagaaaatgaatgatattttcataactttagatagagaatttaagtaaagttatgattagtaaaggaaatatataatgaaatgttgtgaatttcataactttaggtacatttttgcacgaaagttatgttgatttcaatagaaagcattgcgcaaaagattttcgcacaccacaatgcttttgaaaacgaaaagaacacaaattaaaatcaatagtcgagtttgaactataaacacgaatgtagcgattttaagtattttacagattaaaaattgtcatacaaaaggttaaaaataatcaaggtacatcagtgcctaacttattgacaaaaaatacatatgtgataagattataggagcacaacgctaagaaaagaggatatacatatgaacaaaaaagtattatcagttttagtagacaatacatcaggtgtattgaatagagtagcaggattattcagcagaagaggttacaacattgacagtcttactgttggtgaaacagaaaatccgaagtattcaagaatgacaatagtggttacaggtgatgatgatatccttgaacagattgttaaacagattacaaagttagaagatgttcgtagagtagacgttttagaaccatcagattcagtcacaagagagttaattcttgtaaagattaaggcagagcctgcacagagacagcaggtaatatctattacagaaatcttcagagctaatatagttgatgtggctagggatagtcttatgattgagattacaggtagtcagtctaagcttaaagcatttttaagtttagtggaggattatgaaatccttgaacttgtaagaacaggtattacaggtcttgcaagaggagaaaagtagttttatatctgtttttaacagattataataaatcatttttacagatggaggcaataattatgtcagaagcaaaaatttattatcaggaagactgtaacctttcattattagatggaaagaaaatcgcgattatcggttacggtagccagggacatgcacatgcattaaacttaaaggaatcaggatgtgatgttatcattggtttatatgaaggaagtaagtcatggcctaaggctgaaaagcagggatttaaagtatatacagctgcagaagctgctaaaaaagcagatattattatgattcttattaacgatgaacttcaggcagatatgtataagaaagatatcgaaccaaaccttgaagcaggtaatatgttaatgttcgctcatggtttcaatattcactttggttgtattaagccacctaaggatgttgatgtaacaatgatcgctcctaaggctccaggtcatacagtacgttcagaataccaggcaggtaagggaacaccttgtttagtagctgttgaacaggatgctacaggtaaggctttagatatggcattagcttatgctttaggtattggtggagcaagagcaggagttcttgaaacaacattcagaacagaaacagaaacagacttattcggtgaacaggcagtactttgtggtggtgtttgtgcacttatgcaggctggtttcgaaacattatgcgaagctggatatgatccaagaaatgcatacttcgaatgtattcatgaaatgaaattaattgttgacttaatttatcagtcaggttttgcaggaatgagatattcaatctcaaacacagcagaatatggtgattatattacaggaccaaagattgttactgctgaaacaaagaaagctatgaagaagattcttacagatatccaggatggaacatttgctaaggaattcttacttgatatgtcaccagcaggacgtcaggtacacttcaaggctatgagaaagttagcatctgaacatccatcagaaaaagttggtgaacagatcagaaaactttacagctggaacaatgaaggtgataagttaatcaacaactaatatttttattaataataagaatggtacataagtctaatcgtagccctctttagtggatatgtttggtatataattcttattagattagaagttgaatcatacgcgggtaggctgctttttagcttacccgctttttttgaaaaaataatggaagaagtaagccataaacagcttttagaaaaaagaagaatgtattataatctttatatggcacaagtagattattaattaaaaaaggtttgcaataaaaatgcaattacatacgtattatatataacagaccaatgaagagtagggttaattatggagaaagaacagactaatatcattgatgaaggactatttgaaaaaatagcaaatggggatgatgccgcttttaccgaattgtattatgcatcatacagacaaatatatggtttcctcttggcactgactaagaataaggaagatgctgaagatttgttacagaacacatatataagaataagaaatggaagtcatttgtacaggaaacagggcacacctatgacctggatgtgtgcggtggcgaagaatcagttcttggattttgtaagaaagaaatctaaaggcgtaagcgttgattttgatgaagttgaaaaatacgtttcagagggacttggaaccggagttaagcaacataaggatgtagagaatgaaatggttttagaaaaggcatttgaaatactaaataaacaggaaaggacaattgtagtattacatatgattgatggtttgaaacacagggaaatatcaaaaataacaggaataccattatcgacggttctttcaaagtataacaggtcattaaagaaactaagggaatttattaaagaataggaggtcattatgcaggaaaaagatattaaagaacaattaaatcaggaacttgacaaaatggctcctgatattttagaaaaggttttagaaaaaacgattgaaccaatagaatcagaagaggatttgtttaacaacgaacctttatttgaagaaaaaaaggacaagggcaaatacttatggattccacaggttattgcagtagtagcctgcttagtgcttgtagcagtattatcatcaatgtggtttaagcctaacgttacaccaacggcaccggatccaaagatggctacagcttttacaattacaatagacgtaaatccaagcattacaatgaaagtaaagaaagataatacggttgaaagtattaaagcatcaaacaaggatgcaaagaaagtagttaaaaaggttaagaaaaaattaaaagatgatacaacttatggcgaagctgtcgaaatggttgtgtcaggcttaaaaaagaaaggatatcttaagaaagacaacagcgcaatgcttgtttcagtagttactgatgacaaaaaagccggagaagaaaagcttaaagaagtaaaagattacacaaaaaaggtaaagaaagataaaaaagtaaaatgtgcaacaatttatcagaattgtgttagcaatgaaaaaataaagaaagtagctaagaagaataaggtttcagaaggtaaggcagctctttgtataaagattgctgaaaaagaaaaagtaagtattaagaagatgtgcaagaagagcatatttatacttattaaacaggttgaaaaaacaaagatagatgttgagccggatattgaaattgatgatgaaataaatgttgttccggaagaacctacaggagaaacggaatcagcaataattgtggaaacaacagagattgaaagcgaatcatctacagaaaatatggaaactgaaacaggtgaggagacttcacctgtttcagagaatgttaatgagaatgaaactattccggaaacagtacagaatagtcaaccttaagaacaaagacttccctggataacattaagttcattgaagcgcttgttcatataattaagaacagctttcttgttaccgctccacagaggggcaacgagaattgatttaggaccatcaccggttaggcgatggataactatgcttttgggaatataacgtaaacattcagcaataatgtctacatattcttccatggatagaacttcaaatttatttaaagaatactccttttctaaaggggtattttttaatacatgtaaaagttgaagctttatgcctgaaatattcatagacgaaacatacttaacactttcaagaatatcctctttggattcaaatggaagaccgataattaaatgaacaataacatcaacgttaattttgttcaggttattaacggctgtattaaaaacgtccaaagtgtaaccacggttaatatacttggcagtattttcgtgaatggtctgaagtccaagctcaacccatacaggcttaattttgtttaattcacctagaaggtttaaaacttcatcaggaaggcaatcaggtctggtgccaatggaaagagccacaatatccgggtgattaatagcttccgtgaagatacttctaagataatcaatatccccataagtattagtgaaagactggaaataagctatatactttccatttttgattttggctgaaactttgttcttggcactttcaatctgctcagtaatagacaacatcttgtccgcagcaaaatctcctgaaccaccattactgcaaaaaatacagcctcctgtactaatggttccgtcacgattagggcaggacagaccgcctgaaagggcaagcttatatattttgcaaccgaatttttcttttaaatatgaattaagggaattgtacctcattgtaatctctccttgtaacaaaagtcaaaatatggtataaaataaatgttgtaaaaacatggagacgtatcgaagtggtcgtaacgagcttgactcgaaatcaagttgtccacccgggcacgtgggttcgaatcccaccgtctccgctatttagaaacttacaaactattataaaataaaattttacaaaaaggtataagaaatgcagacttctatgttatagtagcctgtttttttattgtaatgttaatttttataggcataatatcactaatattaaaaaatgtatcaaacaatataattaattaaaatcaagatatggtggctttacatcattgactaagaaatgtttttgttttagaatagtagggattataataaaaattaggtttgtcgtaactttaggttttgtggcaacttaaatataaactaggaggaaagcattatgggaatgacaatgacacagaagattctcgcaaaacatgcaggtcttgatgaagttaaagccggtcagttaattgaagctaacttagatttagtacttggaaatgacgttacagctccggttgctattggtgaaatgaaaaaaatgaatgtggattgtgttttttgcaaagataagattgcattagtacccgaccactttacaccaaataaagatatcaagtcagcagaactttacaagtgtgttaaagattttgcagaagaaaatcagattactaattattttgaaacaggaagggtaggtattgaacatgccttactacctgagaaaggtctggttgttgctggtgacgttgttattggtgcagattcacatacatgtacatatggtgcacttggtgcattttcaacaggtgtaggtagtacagacatggctgccggtatggcaacaggaaaggcttggtttaaagtaccatcagctattaagtttaatttaacaggaaagcctgctaagtgggttagcggaaaagacgttatccttcacattatcggtttaatcggtgtggacggagctttataccgctcaatggaatttgttggagacggtattaagtacctttcaatggatgacagatttgctatgactaacatggctattgaagcaggtggaaagaatggtattttccctgttgatgatttgactattgaatatatgaaagaacattcaacaaaagaatatacagtatatgaagcagatgaagatgcagaatatgatgaagaatatactattgacttaagtacattaagaccaacagtagcatttccacatcttcctgaaaatacacgtacaattgatgaagttggcgatgtgaagattgatcaggttgttatcggttcatgtactaatggtagaattgaagatatgagaacagccgctaagattttagaaggcagagaagtagcaaagggagtaagatgtattgttttccctgcaacacaggctatttatttacagtgtattgaagaaggcattatgacaacatttattaaggcaggatgtgctgtaagtacaccaacttgtggaccttgtcttggtggtcatatgggtattcttgcaaagggtgaaagagcagttgctacaactaacagaaactttgtaggacgtatgggtgatcctgaatctgaagtttatcttgcaagccctgctgttgctgcagcaagtgcaattacaggaaagatttcgggtccggaagaacttggattatagtagatattttatagaaaggctgggttcatattatgaaagcagaaggaagagtttttaaatttggaagcaacgtagatacagacgttattattccggcaagatatttaaatgttccggatccatcagagcttgcaaagcattgtatggaagatatagataaagaatttgttaacaaagtatctaagggagatattattgtggcagataagaactttggatgtggttcatcaagagaacatgcacctatcgctattaaggcagcaggagtaagttgtgttattgcagaaacatttgcaagaattttttatcgtaatgccattaacattggtttacctattattgaatgccctgaagcagcaaagggtatcgaagaaggagaccaggttgaagttgattttgacagtggaatgatttataacaaaactaagggaacagagtacaaaggacaggctttccctgagtttatgcagaagattatttcaaacggtggattaattaattacataaataatgctaagtaatacgcaactattttgtggcaaggaatgaaaaaggagacaatgatgaaagaaatactttataagagtactagaagcacagaaggaactttaaaggcatcagaagcaatcttaaagggattggcagatgatggtggactttttgttcctttggaaataccggcacttgatgtaacagttgaagaattatctaagatgacatatcagcaggttgcatatgaagttatgaaattatacttcacagattttacggaagaagaattaaagaattgtatcaacaatgcatatgattcaaaatttgatacagaagaaattgcacctttggcagaagttgaaggaacatatttccttgaattattccatggcaagactattgctttcaaggatatggctttatcaattttaccacatcttcttacaacatcagctaagaagaatggtgtaaagaatgaaatagtaattttaacagctacatcaggagatacaggaaaagctgctatggcaggttttgcagatgtaccgggaacaagaataattgttttctatcctaacggtggtgttagtccaattcaggaaaaacagatggtaacacagaagggtgacaatacatacgttgttgcaattgaaggaaactttgaccaggcacagagtgcggttaaggctattttcggtgataaagagcttgcaaaagaaatggatgaaaagggatttcagttctcatcagctaactcaattaacattggacgtcttattccacaggtggcatattatgtatatgcttacgcaaaattatttgcagaaggaaaagtaagcaaagaccagaagattaatgttgtagttcctacaggaaattttggaaatatcttagcagcttattatgctaagaacatgggacttccaattgataagttaatctgtgcatcaaacgaaaacagagtattatatgacttctttacaacaggtgaatacgacaagaacagagaatttattcttacaaactcaccatcaatggatattcttatttcaagtaaccttgaaagattgatttatagaattgcaggagatgatgcggaagctaacaagaagatgatggaagaactttcaaaagacggaaagtattctattacacctgaaatgaaagctaaattagctgacttctatggcaattatgcttcagaggaagaaacagcagcaatcattaagaagatttatgaagaaacaggatatgttatggatactcatacagcagttgcagcatctgtatatgaaaaatacaagaacgaaacaaaggatgacaatgtaactgtaattgcttcaacagcgagtccattcaaattcacaagaagcgtaatgaatgctattgatccaaaatatgactcaatgggtgactttgaattagttgatgaattatctaagattggaaatgtaaaagttcctaatgctattgaagaaatcagaaatgcagaaatcagacataacaacttatgtgaagtagcaggaatgaaggatatcgtaaagaaattcttaggaatgtaatgaatataagaagataaatataagctgtggcatagtgcttgttttaaggcattgtgttcacagctttttttatcttcttgaattgaaatcgatttaatagtacaataataaagactatggttacaaaagagtttaggagattattatgggaatattagaagcaatactattaggaattattcaggggatagcagagttcctgccaattagtagttcaggacatttagcaatctttcagaaattgtttggaatggatcaagtaggtatatcatttgatgtttttcttcatataggaacattgattgcagtttttatagttttctggaaagatattttaagactttttgtagacggagtaggaattgtagtagattcatgtgttaatgtttacagattttttagaagcaagaataaaaaagaacctgtagaatacataagggttataagaacagcatatagaaagttcgcacttcttgtaattgtgtcaactataccaacaggaattattggatatcttggaaaggaattagtaagcaacgcaagtgatacgcttattattccgggcatatgcttgcttgttacagcagttttactttttatatcagatcagatgcctgacggacagaagacaccaaagaatacaagttattttaatgcagtatttatgggaatctgtcagggaatagcaacattgccgggattatcacgttcaggaacaacaattgttgcaggacttttatgtggattaagaagagattttgtagtaaaatattcatttataatgtctattccggctatacttggtgcagcagttttagaaattcctgatatgggaaaagatatggcaacaacaggtgtggcatcatatgtagtgggaatgattgttgcagcagttgtaggttacatatgtattaagactatgttagtagtagttagaaataagaaatttaagtatttctcatattattgtgcagtagtaggtttggtagccattattgcatcatttgtaattaaataattagatttaaattacaatagaattacaataagaagagaataagaggaataagtagaaattaaaaacgaggtgtgaaaagtggccaatacaacatcaaagagtaatggcaaaaaatcaaatactaaaaaggctacagctaaaaaaaagactacaaatacaagaaatagtagttcaaccagtgctaaaaaagcagcagaaacaagaagacaaaatgcagccaaaagaaagagaaaagctgaactggcaaagaaaaatgaaaaaatcgttaaggaagtgtatctctggatttttgtggcagtttcacttttactctttttaagcaattttggaatttgtggaattgtgggaaatactcttagaggtgtaatgcttggggtttttggctcaatgggatacgtttttccaattatacttgtaatagtagtaggactaatggcgtataatgaagctaacattttagttgtttcaaaaataacaggatttttattattttttatggatgggacattattgttccacttaatagcgtatggtagtgataacgataaatattcacattattacaaagttggtgcagctaatgagtttggtggaggctttataggaagtgtcctagggaagacattacattcattattaggattaacaggcgcttatattattgcagtagtattgcttatgatttcaattgtgattttaacagaaaagtcaattatgtctgttattaagaaaaatggcgagaaagcttataagagtgccaaagaagaagccaataatagaagagaagagaacaatcttattagggaacagagacgtcttgaaaagaaaaaacagaaggctgttggagttaatttcaaagacacaacaattgagcctgaagctgctgaaaatggcaaagctgaggataagaatcaggatgttcatgagatacatatagaaggtattgatgagcagccacttaaagagatggaacaggatcctgttacatatacatatgaagaaatggcaggaaacaagcagattaagattgaaggattggatgagcctgaacctatggcatatgagccggaagagagttacaattcaggtgaagaaagtttgaatgatgaatctgttttaaatggagaatttgttccaaaagagagaattattgtaagccggtctgcaaaggatgcaatgaaacgcaagccatatggaatggcacaggctgcatcaggaacagggggaacatcaggaacaagtgtttcatcatatgcaaatgctacagccggacagagtgatgcagtaattgatttagaggctgagaatatgcagcagtcaggtgtaacagcgcagactgaggtaaagaaaaattcttccgaaggaaaaataatagcaccaaagaagaaaaaaatgagctacaagaaaccaccatacaagttattggcggacaatcctggaagttctaatggaacaacaaaggctgtattaatgcagacagctaataagcttaaagaagttttgactaattttggtgtaaaagttgaagttactaatgtaagcaagggaccttcagttacaagatatgaattgcagcctgaaatgggaacaaaggttagcagaataacaggtttggctgatgatattaagcttaatatggcagcagcagatattcgtattgaagcgccaattccgggcaaggcagcagtgggaattgaaatacctaacgacagcagagatacagtgtatctgaaagagttgcttatgtctaaggaacttaaagagcataaatctaaacttgcttttccggcaggtaaggatattgcaggacgagttgttgtggcagatattgcaaagatgccacatatgcttatagcaggaacaacaggctcaggtaaatcagtatttacaaactcaattttaatgagtattctatatagaacaacacctgaggaagtacgaattattgtaattgatcctaaggtggtagaatttcaggtatataataagattccacatttgttgtacgatgttgttacagatccaaagaaggctgccggaattttaaattgggcagttgctgaaatgacaacaagatacaagaaatttgccaatattggagcaagagacatttcaagctataatgccaaagtggaaagtggcgactattcagaagatgaacaggttgaaaaaatgcctcagattcttattataatagatgagttggctgaccttatgatggttgctgcaaaagaagttgaagaggcaatatgtcgtcttgcacagcttgcaagagcagcggggatccatatggttattgcaactcaaagaccttctgttgatgttattacaggtctgattaaggctaacattccatcaagggtagcattaacagttgcatcaggtacggattcacgtactattattgatatgaacggtgcagaaaagcttttaggaaacggtgacatgctgttttatcctgcaggttatgttaaacctgtaagaatacagggagcctacgtttcagaaaaagaaatttcagataccgttaattatataaaagagcatagtggtgaggcagaatatgacgataccattgatgcaaaacttacaacggatcaggaagcaatggcaaacggaggagagttagatccttattttgcccaagcaggaagattatgtattgagaagcaaaaaggttctacaagtatgattcaaagacagtttaaagttggtttcaacagggctgcaagaattatggaacagctttatgatgcaggagttgtaggacaggaagagtcaaacaaaccaagaaaggttattatgtccattgaagcctttgagcaaatggttaacggtggtcagtaagcaaaaatgatgttgtgaaagagaggaaaaaagatgaagactgatattgaaatcgcacaggaagctgaaatgatgccaattaagaacgtggcagaacagttaggaattacagaagatgacattgaattatacggaaagtataaggcaaaaatttccaatgaatactatgaaaaaatcaaagacaatgaagatggaaaactgattcttgtaacagcaattaacccaactcctgccggtgaaggaaaaacaactgtaacagttggacttggagaagcttttggtcagttaaataagaaagcagttatcgcgcttagagaaccatcacttggaccatgttttggtattaaaggtggagcagcaggtggcggatatgcacaggttgtaccaatggaagatatgaaccttcattttacaggtgactttcatgctatcacatcagctaataacttattggctgcaatgcttgataactcaattcagcagggcaacgtattaaacattgatcctaatcaggttgtttggaagagatgcgttgacatgaacgacagagttttaagaaacgttgttgttggtctgggcagaaaagtagacggaacagtaagggaagaccattttgtaattactgttgcgtcagaaatcatggcaattctttgtcttgcaacaagctatgcagatttaaaagaaagattaggaaagattattgttgcatacacatatgacggacagcctgttacagcaaaagacgttaaggcagttggcgcaatggcagcacttcttaaagatgcaatgaagcctaacattattcagacattagagcatacaccggcattagttcacggtggaccttttgcaaatattgctcacggatgtaactcggttaaggctacaaagacagcattaaagatggctgattatgttataacagaagcaggttttggtgctgacctgggtgctgaaaagtttatggacattaagtgcagaaaagcaggtcttaagcctgactgtgttgtattagtagcaacagttagagcattaaaatacaacggtggagttccaaaagaccagttatcagaagaaaatcttgacgcattaaagaaaggtattgtaaaccttgaaaaacatattgaaaatcttcagttattcggagttcctgtagttgtaacattaaatcagtttattacagatacagaagcagaatatgaatatattaagaatttctgcgaagaaagaggatgtgaatttgcattagcagaagtttgggctaaaggcggagaaggtggaaaggcattagcagaaaaagttattgaaactattgaaaacaagccatctaactatgcacctctttaccctgatgatatgtcaatcaaagaaaagattgaaacaatagcaacaaagatttacggagcagatggtgttacatattctcctgaagccgagaaagctattgcaaatattgaaaaaatgggatacagagaatatcctgtatgtatggcaaagaaccagttctcattctcagatgataagactaagttaggaagacctacaggatttaagattaatattcgtgacgtttatgtttcagcaggcgcaggatttgtagttgcattgacaggtagcattatgacaatgcctggtttatcaaaatctcctgcagcatttggaatagacttaacagacgatggaaaaatcacaggattattctaaagtatacaaaagtggaggagccttttaggcaataaataaatggcaaaaattatagacggaaaacagatttcattagacattaagaatgaattaaaagaaaaggttgcaaaatacaaagagcagggaattgagattactcttgcagtagtaaaagtaggaaatgatcctgcatcagcagtttatgttagaaacaaagagaaagcttgtgaatatgttggcataaactcaaagactttggcattacctgaagaaacaacagaagaagagcttttaaatgttgttaagaaattaaatgaagacaaaaatgttaacggtattttagttcagttaccacttcctaaacatattgatgaaagcaaggttcttcttacaattgacagcacaaaagatgtggatggttttcatcctgtaaatgttggaaagatggtaataggtgaagatacatttttaccttgtacacctgctggaattattgaaatgattaaaagaacagacattgatattgaaggtaaggaatgtgtggttattggaagaagcaatattgttggaaaaccaatggctatgttaatgcttaaggaaaatgcaacagttactattgcacattcaagaactaaagatttaaaagaggttacaaagagagcagacattattgtggcagcaataggaaaagctaagtttgtaacagcagattacgtgaaagaaggcgctgttgtaatcgatgttggaatggacagagatgaaaatggtaagttatgtggtgatgttgattttgaatcagtttcaaaagtggcatcagccattacacctgtacctggtggcgtaggaccaatgacagtaacaatgcttttggtaaactgcttaagaagcgttgaactaaacaaataaaatttttgagcctgtcgaatatgataggctcaaatagcttatacaagattaaaaatatttgaagggaggtttaatgagaatatgaagtttgccaatgtcattgtagacatttcacacgaaaagttagaccgtccctttggatatattatacctgatgaattggaaaaagagattacggtaggaaccgctgttatcataccatttggtaaaggcaacaggcagataaaaggctatgtaattgaaataacagaccagccatattttgacatatcaaaaatgaaagagattatggcagttgaagagggagcagccaaggttgaaagtcagttaattaatttggcttattggattaaagaaaattacggctccacaatgaatcaggcattaaaaactgtaataccggtaaagaataagattagaaatattgaaaaaaagacaatagtattaaatttgaacagtgaacaactggaagaaaaaataaaacaatataaaaagaaaaatgcaaaagcaagacttaggttgttagaagaattaaagataaataacagaatggcaagagagcttgtggtagataaattaaatgtttcaccaagtactcttaagtcaatggaacagttaggggacattgtaattgagaaaacaattaattacagaaatcctattgaattaaaagaacagcctgaatatgacatagttcttaatgaaaatcagagaaaagtttcagaagcaattaaggaaacaatggattttaagaaaaaagacaaagtgaatgtgcatcttattcatggaattacaggaagtggaaaaacagaagtttatatggatttaatagattatactattaaaaaaggcaaatcagtaattgttctgattcctgaaattgcccttacatatcagactgtaatgagatttacaagaagatttaaagaaaaggtatcaataataaattcaaggctgtcatcaggagagcgttacgaccagtttgaaagagcgaaaaatggtgacgtaaccataatgataggtccaagatcagctttgtttacgcctttttccaatttgggattaatagtaatagacgaagaacacgaaagtgcttacaaaagtgaatcggttcctaaatatcatgctattgaagtggcgcagaagagagcatatgacacaggtgcaacagtggttttaggctcggcaacgccatctcttgaatcatattataaggctaagaatggaacctatattcttcacaagttaacaacaagagagaaaggcaatcttccatcagtatcaattgtagatttaagggaagagttacagcagggaaataaatctattttcagtaataaacttcaaacattaattaatgacagattagagaaaaaagagcagacaatgctttttattaatagaagaggatttgcgggatttgtttcctgcagggattgtggaaaagcaataaaatgtcctcattgtgatgttacactgaaacttcataataacaagaagctagtgtgccattattgtggctacacaacaaagcttccaaccaaatgtcctgaatgtggttcaacatacttaggaggatttggaataggaactcaaaaaatagaaatgcttataaaacagttatgccctacagcaagagttctcagaatggatgcggatacaacatcaactaagggtagtcacgatgaaatcttgtcagcctttgccaaccatcaggcagatattttggttggaacgcagatgatagtaaaagggcatgattttcctgatgttactttagttggagtgcttgcagcagatatgtctttgtatgcatcagattatactgcggcagaaaaaacatttcagcttttatgtcaggcagcaggaagggcaggccgtggtaaaaatccgggagaggtagtaatacagacttatgcaccggataattacagcataatagctgcaagtcatcaggattatgatgagttttttgagcaggaaatagtttatagaaagcttatgggatatccgccggttgcaaacatggtatcggttttgttacaatgttccggggaatcagagcttgaaatggccacagaatcagtggttcaattaatcagaaaagtaaaagagcagaaatataatgaactgttcgtaatcggaccggctgatccgcctgtttcaaaaataaatgacatatatagaaaaatcatatatttaaaaagtgataatagagtacatcttataagattaaaggattatttagaatatgtaataaatagttcacagaatttcaaaaatattaatgtacaatttgattttaaagcatagatatgcagaaaggaagataaaatggcaataagaaatattagagaattaggagaaccatgtttaagaaagatttgtaaacctgttaaggaagttaatctaagaacgaaaatcttaattggggatatgtttgatacaatgtatgaggccaacggagtaggacttgcagcaccccaggtgggaatcttaaaaagaatatttgtagttgactgtggagatgaagaaggtaattcagtaccatatgtatttatcaatcctgaaattattgatagagaaggtgttcagacaggatacgaaggatgtcttagcgtaccgggcaagtcaggtatggttccaagagcacagaaagtaaaggttaaggcttttaatgaaaatatggaagaattcgaaatggaagcagaaggtttacttgcaagatgtattcttcacgaaaatgaccacttagatggaattgtttatgtagacaaagttgaaggaaaactttatgataattcagaattgtatcctgaggaggaacagtaagaatgaaaatagtatttatgggaacacctgatttttcagttccggcattagaagaacttgcaaaagtacatcaggtggcagcagttgtaacacagcaggatagaccaaaaggcagaggtcacaagatgcagtatacacctgttaaggagaaagcattagaattgaatattcctgtttatcagcctgaaaaagtaaaaaatcctgagtttgtggatatactaagagagataaatcctgatgttatagttgtaatagcttttggccagatactttcaaaagaaatattagaccttccaaagtacggctgtatcaacgttcacgcttcattattacctaaatatagaggagcagcaccaattcagtgggctgtaatagatggcgaagaagaaacaggcgttacaacaatgtacatggcagaaggacttgacacaggagacgtaatagacacagcagtcataaaattagacgaaaaagaaacaggtggaagtcttttcgataagcttgcaatagaaggtggaaaattaatagttgaaacattatcaaaacttgaaaatggaacagctacaagaacccaacaggatgatgaaaaatcatcatatgcaggaaagataacaaaagaattagggcaaatcgattttacaaaaccggcagttacaatagaaagattaattagaggactaaacccttggccaagtgcatacacaacactagatggcaaagccatgaaagtatgggatgcaacagtagaggaaggaaacgtaacagaacaacccggtgaaatcgtagaaatcgcaaaacactatataaaagtagccacaggagagaattatttaaagataaacgaaattcaacttgcaggcaaaaagcgaatgccaatggatgcgttcttgaatggttacactattaaagaaaatatattaggcttgtaatgtgacatatgaaaactatattagcaagtgctctgaagccgtcgtcccttagaaggtggggatagcgaagctgtcaccggcttcttagtaccgctacgggctgaaggcagcgggagcgtgcttgcgttatagtttttatatggcatagtagaaaggagacgatattatgctttacggatattattttgatccaacatatgtacttattgtaatcggtatggttatttgcatggctgcatcagcccatgtaaattctacttttagaaaatattctaaatacagaagtaattcaggattaacaggtgcccaggcggctaagatgattcttgaatcacagggtatttatgatgttacaattcagcatataggtggagatttaacagataactataatccttcaaacaaggttttaagcctttcagatgcaacatataatcagactaatgttgcggcaattggtgttgcggctcacgaatgcggtcacgcaatgcagcatgcaaaaggatatgcacctataagtgttagaaacgcccttgttccttttgcaaactggggctcaagattatcatggattttgattattgtaggaatattattttatggtaatggaacaggacagacattgcttgaccttggtattattgctttttcattggcagtattgttccagttagtaacattgcctgtagaatttaatgcatcaggaagagcgattagagttttggaaagcacaggaatatttggaaatactgaattaaagtatactaaaaaagttttgggagcagcagctttaacttatgttgcagcagcagcttcatcgattttacagttattaagattggtaattctttttggaggaagaaatgacgaccagtaagccggtaaatcaggtaaatttaagaaatatagttttggaaatgcttttgaaggttaataaaggagaaaaaagtcacgttgcattaaaaagcacattagacaaaaatgttagccttgacaaacatcaacgatcttttattacaagactttttcagggaacattagagagaagaattgagcttgactttattataaatcagttttcaaaaactccggttaataagatgaaacctgtaataagggagattttgagaatgggtgtttatcaaattaagtatatggataatgtacctgtttcggcagtttgcaacgaaggggtgaagctggctgaaaaaagaaaatttagaaatcttaaggggtttgtaaatggagttttaagaaatgtggcacgaaatattgaaaaaatagaatatccaaaggaacagaaagaaagactgtcggttatttattctgttcctaagtggataattgaaaaatggacaaaagagtatggaatttcaaaaacagaagagatgcttgaagggttatataagccgaaagcaacttctgttagatgcaatacatcaaaggcaactgtagaagaaattgttaaaagccttgaatatcagggaacaacagttgaaaaatctaaactttatgataaggcacttaaaatatcaggctatgacaagttagaaaatcttgatgtttttaaggcaggaatggttaccgttcaggatgaaagctcaatgatggtaggaattgcagcaaatcctaaagaaaaagactatataattgatgtgtgtgctgcaccaggaggaaagagtcttcacgtttcagaacttcttaatggaacaggaactgttgaggcgagagatttaacagagtataagatagggcttatagaagaaaatattgccagagtaggtaatgaaaacataataacaaaagtaagtgatgccacagtattagataaagaagcaattgagaaagcagatattgttattgctgatcttccatgctcaggacttggagttattggcaataaaagtgatataaagtataatataacacagaatcagatcgatgaattagtagaattacaaagaaagatactaaagcagataagcaaatatgttaagcaaggtggaaagcttttatatagtacctgcacggtaaacagacaggaaaatgatagtaatgttaaatggatacaggacaatcttccttttaaattacaatcattaaatggaattgtgccggagcagcttaaatgtgaaaagggttgtcttcagatttatccgggacaatatggcatggatggatttttcgtgtcattatttataagagaataaaggttatggttatgacagaaaaaaaggatattaaatcatataatttagatgaattaaaacaggaattagctaatatgggcgaaaagccttttagagcaggacaaatatataaatggttacatattgaaaaggttcagtcttttgatgaaatgactaatatttcaaaaaaactaagagaaacattagatgagcagtttaaaattgtcacattagagcctgtaagggtgttgatttcaaagattgacggaacaagaaagtatttgtttagaataaaaggtggagcagtaatcgaaagtgtacttatgagataccatcacggtaattcagtatgtatttcaacacaatcaggatgtcgaatgggctgtagattttgtgcctcaactcttaacggactggatagaaacttaagaccttctgaattgttagaacagatatatgaaatagaaaagaacataggagagaaagtttccaacattgttttaatgggaagtggagagcctcttgataattttgaaaatgtgacaaagtttcttgaattaataagcgatgaaaatgggttaaacataagccagagaaatataacgttgtcaacctgtggattggttccaagaatgaaggaattggcaaatatgcatcctcagattacgttggcattgtcacttcacgcttcagatgatgatacaagaagggaacttttacctatagcaagaaaatataccatagctgaagttttggatgcctgcaagtattatttcgacaagacgggcagacgtataacttttgaatacagtcttgtggcaggggtaaatgacacagtggaagaagcagagaagctttcagcactggttaagaatcttaactgtcacgtaaatcttataccggttaatcctataaaagaaagagatttcgttcagacgggaaagaaggctgttgaacgatttaaaagggtacttgaaaaaaataggataaatgttactataagaagagaaatgggacgagacattaatggtgcctgcggacagcttagaaatgacgctatgcgggaagaaagggaggaatcaggtgaataattacaaaataaatgcatttgggaaaactgatgtagggttaatgagaaccattaatcaggatagcatttttgtttccactaagccggtgggtaaactcccaaaccttttcattgtagccgatggaatggggggacataaagctggagatgtggcatcaagagtagcaatcgagaagtttgttaaatatgcctgcacaacacatatgacagatccggctaacatattggatgccggtattatgtccattaataaggaaatatacgatatggctaattccaacagggattatagtggaatgggaacaacttttgttgccgctgttattgcagaaggtcatgtttatattgccaatgttggagacagcagattatattatattggaaaagatatacaacaaataacaagggatcattccttggttgaggatatggttagaatgggacttttggagaaagaagaggcaagaactcattacaagaaaaatgtaattacaaaagccattggcgttgctgaagacaaaacagcaacacctgatatatttgagatagaaatagataatggggacaaattattattatgttcagacggattaactaacatggtaattgactatgacattaataagattatcaggaaaagtgagtcaattgaggatgcagtgagaactttaattaatactgcaaacgaaaatggcgggaaagataatatatcagcaattcttattagcgcagaatatacggaaaatcaggatagtctgctatctgaacaataggagtgagaaagtttatgttggaaagaggattttttattaataaccgttatgaaattcttagcagagtaggggcaggcggaatgtctgatgtttataaagctaaggatcataaattaaatagaaacgtagcaattaaggtgctaaaaaatgaatttagcaaggataaaaattttgtgtccaaatttagggttgaagcacagtcagcggcaagccttattcatcctaatattgtaaacgtatatgatgtaggtgaggatgcgggcctttattatattgttatggaattgatagagggaatcacattaaaaagctatattgacaagaaaggcaagctttctgttaaagaaacaataagtatagcaatccagattgccaatggtattgaatgtgcccataataatcagattgttcatagagacataaagcctcagaatattatgatttcaagagaaggaaaagtcaaggtgacagactttggtattgcaagggctgcatcagccaatactattaacggcagtgcaatggggtccgttcattatatttcacctgaacaggcaggtggacagtatgttgacgagaaaagtgacatatattcacttggcattacaatgtttgaaatgcttacaggcagagttccttttgacggtgaatcaacagtaacaatagccttaaagcatattaaaagcaatgtacctagtgttagggaatatttgcctaacgtacctgtaagcattgaaaaaataattctgaaatgtacacagaatagagcagacagaagatatccaaaaatttcattgcttatatctgatttaaagagagctttgtctgaaccaaatgttgattttgttcagcttgaacagagagtagacaatggctcaacagtaatgattacagatgatgaaattaaccagcttagaagtggaagtaataagaaagtaaaggatgataatggcaaacctgacgatgacattgattatttaccgcctaaagtaggcaatgcagtgacaattggtagtgttgttgcaggcattgtggcgttaattattgtggctgcaatagttacaagttttgtattttcaatggttaacagcaacaagattaagttacagaatacagttacaggcagtgatgtggaaacaactattgatcctaagaagacagaagttcctaacgtagttggaatgagtgaagatgaagcagaaaaaacacttcatgaaaaagaattaggtgtaaaatatgaagcttatgaatacaatgatcactatcagagtggttatattattaaacagtcagttgcaaaaggaaaagtaattgataagaatgaaactattttacttactgtaagtaagggagcagaaaagatcgaagttccatcaggaataaagggctcagaccttgacactgcaatttcaaagcttgaagataaagaccttaaatgggaattggtttatgaatacagtagtagtgaaattaacagagttatttcatgttatccaatagaacaggctttggtttccaagggagatacaattaagcttactgtaagcagggggcagaagacagttgaaaacagcaatgttggtacaataccaaatgttgaaggaaagaagcttgataaggcacagcagcttattagtaatgcaggatattctgttggtgacacaaaggaagtttacgatgaagaaatagaaaagggtattgtaatcagacagacaataaagtcaggctatgcaccaaagggaacaacaataagccttgttgtaagtaaaggctcaaaagatgctgacaagaagtataagggaacatatacttttgcaaaagaggacctaatggatgaagagggcaatcctattaaaagtggaacagtagttgttttattaaacggctcatcacagggaattgatcctgaatattcagatgtatcaaagtggccgggagattatacaatgacacttacaagtgatacaaagggcaaggcaacaattgaactgttaatagacggaaaagttgtaaaaacagataaggttaaactaaaataaaatcaggtgccgtggtaaatgctacggcacctttaatgaaattaagtggaataagaaggtatgcagggaaaaataataaaaggaattgccggattttattatgtttatgttgaaaacaaaggcatatatgaatgcaaggcaaaaggaaaatttagaaacaaaagcataaaaccattagttggggacaatgtaatggtggacattattgatgaagaaaagaaaaaaggaaacatatcagaaattttggagagaaagaaccagcttataagaccggctgtggcaaatgtagatcaggcaatgatagtgtttgccgtgaaaaaaccaaatccaaatttgaatcttttagatagatttcttgtaatgatggagtttcaaaatatagaaacaataatatgcttcaacaaaacagacataggcgatgatgactacatgaaccaattgcagaccatctatcaaaaggcaggctacaaagtaatgtttgccagtgccacagaagaacaaggggtagatgaaatcaaaaaaatgctaaaaggcaaaagtaccgtgtttgccggaccttcaggagttggaaaatcatcaatgcttaatgcactaaccaaagactacaaaatggaaacaggtgcaataagcgaaaaaatcggtcgtggaaaacatacaacaagacactcagaaatattcaacatagacagcaactcatacgtttttgacacacccggctttagctcactattcgtaccgggaatgaccaaagaaaaattacagtactgctttcctgaaatgccacaatatgaaccggaatgtcgtttcacaggctgcgcccacataaacgaaccggactgcggcatcaaaaacgccttagaacaaggcaaaatagcccgggaaaggtacgaaaactacgtactgttatacaaagaactagaacaattagaaaaaaataaatactaaatataaaaatataataaaaaagtaatacctatatttgccacataaaattttctattcagcaaacaatagacggcggagcaaaataagaaagacaacgtgtttgcaatagaaaattctacgtggaaaaagtaaaagaacatttaaaggagaaagaaaatgattaaactagcaccttcaattttatcagcagactttgccaatcttggcaacgacatcaaaagaatagaccaggcaggctgtgactggatacatgtagacataatggacggaatgtttgttccaaacatctcatttggaatgcctgtaacaaaagctgcaagagcatacacaaaaaaatactttgatgtacatttaatgattcaggaaccaattcgttatgtaaaggaattcaaggcagtaggagcagatatgcttacagtacatgtggaagcatgtgaagatgttcaggctacgattgatgcaattcacgcagagggaatggatgcaggtctggcttgcaatcctgaaacaccggtagaagatatagttccttttattgataaggttgaaatgattttgataatgacagttcatccgggatttggcggacagtcatatattgacgagtgtacagaaaagattgagattgtaaatgcaattgtaaatgaatacaatcttaaaacattgatagaagttgatggtggaattaaagtggataacgtatgcattcctttagatgccggagctaatgtaattgttgcaggctcagcagtatttggcggaaatgtggaagaaaatgttaaaaactttaaagaacagtttcagaattttgaagactaataattgaaaaaatgagaagaattatatatgatataaaaaggtatcctgacaaaactgccgggacacctttttttgttactaaaattatttaatatttattttagaaaaataatattattaatttaaacattaaatctaaatgtaattacatctccgtcctgaacaacatagtccttaccctgtaatccaacaagacctttttctttagcctttgctaaagaaccacattcaattaagtctttgtaagcaacaacttcggcacagataaatccacgttcaaagtctgtgtgaatctttccggcagcctgtggagccttagtacctttcttaattgtccaagctcttgtttcatcttcacctgatgtaaggtagctgattaaaccaagaagagagtagcttgccttgattaatttatcaagacctgattcgctgatacctaagtcttctaagaacatctgcttttcatcatcgtctaattcagaaatttcctgttcaatttcagcactgataacaaaaacttcacttccgttttcagcagcaaactttctaactgcttcaacgtgtgggttagaattgccatcgtcagccaaatcatcttctgaaacattagctgcaaaaataacaggcttgtatgttaaaagattgtattcagcaagccaagctaattcgtcttcatcttctgtttcatatttgattgcaaggtttccttcttcaaggaaagccttcattctctgttggaaatctaattctttagccaaagctttgtcgtttcttgcaccacgtgttgtttttgcgatacgtctttcaagaatttcaacatcagagaaaattaattcatagttaattgtttcaatatctctaataggatcaatgcttccatcaacgtggataacattagtgtcctcaaaacatcttacaacatgtacaattgcatcaacttcacgaatgttggcaagaaactggtttcctaaaccttcacccttagatgcacccttgaccaaacctgcaatgtcaacaaattcgataacagcagggatagttttttttgaattatataaagctgtgagcttatcgattctttcatccggaactgcaacaacgcctacgttaggatcaattgtacagaatggatagttagcagattcagcacctgctttagttagtgaattaaataaagtactttttcctacatttggtagtccaacaatacctaatttcataattagaatcctccaatctttagttatatatataaaattattattggctatacataaatcaattgtaaataccaaatgatagtttaacatatttttgaaaaaccctcaataaaataaagaagtatttctaacaaagtatttccgtaaaaagtaatatgttacaaaaattaaaatcaaaaaagcattgcgaagaaaattctaaaaataaaataaatttaataagtatctcataaggctgtattattataaaaataaatgtggtataatttcatagttaaagtaaatgagcgtataaagagaggacacaataatgaatttaaatttgttagcaacaacatcaattgaatttcctaatttgcatatttcattaaataatcttccaaagtcatttagtttatttggcgttgatatagctttttatggagttattattgcatttggaatgttagcaggaattgcacttgtatgttatgatgccaagtcatcaggtcaggattataatttgtatatagattttgcaatgtatgcaattatttttagcgtgattggtgcaagattatactacgtagtttttagttgggattattacagtgcacatcctttagagattattaacattagagaaggtggacttgcaatctatggcggagtaatagccggagtaattacgtgtattgtctatacaaaaattaaaaaaatctcatttttcaaggtggctgactcagcagttttaggattgattattggtcagataattggaagatggggaaacttctttaacagagaagcgtttggtcaggttgccacaagcaagaatccttttatgatgaggatattttttgacgataattatagcataaatcaggtacctgatgctgtaagaattggaatggaaaaccttaagggaatggatttgtcagagattggctatattcaggtacagccaacatttctttacgaatcagtgtggaacctgatggtattaatattaatgctaatattcagaaaaaagaaaaagtttgatggagaagtctttctctggtatctctttggatacggaatcggcagatttgtaatagaaggctttagaacagaccaacttataatgccggtaacaggctggccggtatctcaggcattgtcactggtgttggcagtggttgcagcagtagtagtcgtagttaaaagagtaaagataagcaggcaggaaaagatggcgtagaaggggaaaaaagctaaaagaagagagataaaaaagagaagagagtatagaaaaagagggtataaagggaaaagtaaagatttaaagaattagaaccttgattgttcagaagaataatcggggttctttttcttttggcggtaagacaggaaacaagtggttgtgtggtagaacattgtttatattctggcataaatgggaagaaatataagtttagaggtagtgaaatatattatttcttcgatagaaaactgccggaatattgaatttgtaccatacaggaacatttttgaacatatggtacagatattaggcttgtaacaaacaaatattctttaatctgtaccatataataaattttttgcttgtatggtacaaatattgctttttggctcgctgaagttgtttctatttgtaccatatgtagggaatttgattaatatggtacaaatcgcaagattatagttcttgaagtgctttaaatctgtaccatataagaatttttttacgtatatggtacagattctagaattgtcattctcaaatcattgaaagcttgtaccatatggagaaaaataagagtatatggtacaaagcctgaaaaaataccccatacccagacgaatgcagtccgtatggggcagatatgtaaaagcttgaatggtaacaagcttagaaaataccccatattccgccgcaaactgttcgtatggggcaaatatgtaaaaacttgaatagcaacaaacttagttattacctcatacttcgctgaaagttgtccgtgtggggtagacaagtaaaagcttgaattatggcaacaagttcagaagggcaccacattcttccattttccacatcaccacctaatcccatccataaaacatttcttaatttccacatccgccacaatcccgccacatcattaccaccttttaccaccaaatatcaagaaaatcccaatatccccataaaacaaggaaaagaacagtgtaaaaccatcaaaaaaggggttgcaataatccctgaaatagtataaaatttccttatgagtggtaaattgatgtcaattagtggtaaaaagtggtaaaaattactgcttttcggaaaaaagtaggtgagttttttgtttacaggagagtacacacaaaaaatggatactaagggaagaacaatcgtccctgcaaagttcagagaagaacttggtacaagcgtagttgtaaccaggggactcgatggctgtctttttgcgtactcaaaagaagcttggcatgctttggaagagaaacttagcagtttaccatttgcagacagaaaagttagagattttaaccgtttctttcttgcaggagcatcagaattagagacagataagttgggacgagtgcttatgccggcagttttaagaaagtttggaaacttagacaaagaagttgtttgggttggtgttggcgacagacttgaaatttggaacagtgataagtggaatgaacagatgatgtcataccttgaaggagacgacgtagaagagaagatagaagaccttgcatcttatatggcagagttgggaatttaaagaccaataaagaataaaaagaagataaacttaaaaatagcattttaaaattgcatttaagataacatttagtcttgaggctgaattagaaatgtaacagcataaaggcgcgagagttaagaataataaaacagaaagaaggtcaaacatggatttcaaacatgtatcagtattattaaacgaaaccattgatggcttaaatataaatcctgatggaatatatgtagacggaacattaggcggtggcggacattcttacgaaatatgtaagagattgtcagacaagggcagattaatcggaatagatcaggacggagaagcattagaagctgccagagaacgcttaaaggaatttgaggacaagatcacattagttagaagtaactattgtgagattgacacaatcctaaaggatttgggaatagagaaagtcgatggaatcgtattagatttaggagtttcttcatatcagttagacaatttggagagaggcttttcatacaagtcagacgctcctcttgatatgagaatggatcagagacagaacaaaacagcagcagatgttgttaataattatagcgaaaacgaactttttagaataataagagattatggcgaggataagtttgcaaagaatatagctaagcacatagttatggcaagaaaagaaaaaccattggagacaacagcagaactaagcgagattataaaggcttcaataccaatgaagtttcaggctaaaggcggacatcctgcaaagaagacttttcaggctatcagaatagaagtaaatcaggaacttacagttttaaaagaatctttggatacaatgattgatcatttgaatccgggtggaagaatctgtgtgataacattccactcattagaggataggattacaaagattaaattcagggagaatgagaatccttgtacatgtccacctgattttccggtttgtgtatgtggaaaagtttcaaaaggaaaagtaataacaagaaaaccaattattccttcagaagaagaaatgatagagaataagagatctaagagttcaaaattaagaatttttgaaaggcgttaaaaaatgaatcaggtaagaagaagtaattacggaagagaatatgtggacggaaataccgtaagaaaacttaatccggatagagatagaagagtatatgttgacggaaaaagagtacaggaaaatgaaagacagataagagcaagagaatacgcaaaaataatgaatgcaccatatgtagcattccttgcaatcgtatcagcagtttgccttataatgtgtgtatgttacttaaatattcagtcagacatatcagaaacaagaacaaacatagcaacattaaaaggtcagattagtacagttcagtcacagaatgatgctttaaattactcaattaacagctacatagacactgacaatatttacaagatggctacaaataagttaggaatgaagcaggctacagatgaccaaatctccaagtacgaattaagtgatggaggttatacagttcagtatggggatatacctaataaataattatgagtgagagaagagttagaagaagaaaaccaaggttaaaatttgataagcaaatgtacaaaaagctaggaatactattttggattgtagtactagctttatttgcattgtgtacaagaatagcttaccttaatgtggcaaagggagataactattcaataaaagttttagaacagcaaagctttacaagcaagaccattccttataaaagaggagacataaaggacagaaacggcaatgtattggcaacaagcgttatggtatacaaccttataatagactctaaagtagtaatgagcaatgaaaaataccttacgccaacagttaatgcattggtaaagtattttgactttaatgaagatgaccttcgaacagcaatcaaagaaagaaaaaataacagctattgggttgcaaagaagaaccttgagtataaggatattcaaaagtttgaaagttatcttaattacgaatatgcagatacaaaagaagaggaaaccacagttcagaataccaaaggtatttggtttgaaaagaaatacaagagaatgtatccgtataatgatctggcatgttcactattaggttttgcaaacagtgataatagtgccacaatcggaattgaaagcagctataacagctttcttcaggggacagatggaagagagtacggttatatggattccgataataatatggaaacagtaattaaggatgcaaaagatggagacaatattgtttcttcgatagatatgaatattcagcgtattgttcagaaatctataaagaaatatatgaaaaaatacagtccaaagagaatttcagttgttattgcaaatcctaacaatggggaaattttggcaatggcagatgatactacttttgatttgaatgatccatataatttagaagattattatacagaagcgcagatttcgtcaatgtcacaaaagaaacagtcagaaaaattaaacagcatatggaataactactgtataacagactcttacgaaccgggttcaactgctaagccttttacagtggcggcagcttttgaggaaggaaaaataaacagaaaatcaacatttacctgtgatggtcaggaaaaagttggtggctttacaattaaatgccataaagttgacggacacggaacaataacagttaaggaagccattgcagaatcatgtaatgactatatgatgcatataggaaaattacttggtgcaaagaaatttgtccaatatcaggaaagatttggctttggtacaaagacaggaattgatcttccaaatgaaacaagaggactggtatatggaacagatatgggttcgtcaacacttgcaactaactcatttggacagaactttacagtaaatatgattcagatggtttcaggattttcatcattaattaatggtggttattactacgaaccaagagtggtaaagcaggttgtaacatcagacgatcagcttgtaaaaaactactcaaagactttggttaagcagacaattacaaaagaaacatctgattatataaaagaatgtttaagatctgttgtaactgatggtacaggttcaacagccgcaataagtggatatacagtcggtggtaaaacaggaactgccgaaaaggttgatacatcgggaaaaggcaaaggaagattaaagaaccaatatattttgtcgttcttaggttgtgtaccttgtgaaaatccacaggtagtatgttatacacttatggatacacctaaaaaagatccacaggcaacagcttataacacggaattgtggaccgacataatgaaacaggttttaccatacttaggtgttgaaaaaactgaaaagatagaaaagaaagctaagaaacagaaccttgaaacagaattttattcagatggaataatagaaggcgatgatggttcattagtgaagaagagcaaagaagattaattaagttaatatatttaaagtgtaattgtgggcagctataaagaataagttataataaatgtctttatagaggcccacaagtgcatacagttaaaacaataaaccgaaaaatgcttatgatatatatggcttttataatttctatttgcattattgtaataggaaagctaatatatttaatggtatacaagtcagaatattacggagctaaggctcttgaaattcaggaaagagaaagaaagattaaagcaccacgtggagagatacttgatagaaacggaaaggttatagcaagtaacaagactgtttgcacaatatccgttatatataatcaggttaaggaaactgaaaaggttattgaaattcttgcaaaagagctggaaatgaccgacaaagaggtgcgtaagaaagtcacaaaaagaagttcaagggaaaaaataaaatccaatgtgcctaaagaaaaaggcgatgccataagaaattataatctttccggtgtaaaggttgacgaagattataaaaggtattatccttattcaagtctggcatctaaagttttgggttttacaggagccgataatcaaggtataattggacttgaaattaaatatgacaaatacttaaagggaacagacggactgattcttacaccaacagattccagaggtgttgaacaggagaaggctttggaacaaagagttgaacctgtaagcggaaacagtctgacaacaagcatagatgtaaatattcaaaagtattcagagcagatagcttacaatgccttaaaagccaagcaggccaattatgtatcaataattgtaatgaatcctaacaatggagagattttggcaatggttaatgctccggaatttgatttgaataatccatataagttaatttatgaaacagataataatatatcggctaaagaaaagcagaagctgttaaataagatgtggagaaatcagtgcatcaatgacacttatgaaccaggttcaacttttaaagttgtaaccgcaacagcagctttggaagaaggagctgtaacgatagactcaaagtttaactgcccgggattcaagatagtagaggacagaaagattagatgccacaaaatcacaggtcatggaagtgaggattttttacatggaacaatgaactcctgtaatccggttttcatagaggttggcttaaaagtaggagcaaagaacttctacaaatatcttggaaaactagggcttttaaatagaacaggaatagatattccgggtgaggcatccacaataatccacaagattcagaatgtgggagaagtggaacttgccacaatgtcttttggacagtcttttcagataacaccaatgcagtatttggttgctgcaagtgcggtggtaaatggaggaacattggtaacacctcattttgccgtaaaggctgaaaatgctgataataaattagttgaaaagtttcaatataaaagtcagagtaatgttatttccaaaaacacatcagaaacaatgaagtttatacttgaaaaagttgtttcagaaggaaccggaagtaaaggtcaggttcccggttttaaggttggtggaaaaacagcaacatcacaaaaattaccaagaggttcaggcagatacatagcttcatatatgagttttgctccggcagataagccgaaagtaatagcaatggctattattgatgaaccaaaaggtatttattatggcggacaggtggcagcgccacttatcagtcagttatacaaaaatatacttccttatttattggaaggagagaaacaaggagaataaaatgagtacaagtacaacaattattatggcaattattatttcatttgcagtaagcgtaatattatgtccgatagtaattccgattttgaaaaaaatgaaatttggacagtatattagagaggtaggaccaaaatctcaccagagcaaaacaggaacacctacaatgggtggaatgattatattggcaggagttattgtaacatctttgatttttatgatagtggaaaagaatactaagatagcacctgttctttttatgacagttggatttggtcttattggttttatagatgattatataaaagtcgtaaaaaagagaaatcttggacttacggaaatacaaaaattttcattgcaggttgttgtaacagcagttttttgtgtatatatgataaaatatattggtacatcaacaataattccgtttacaggcggatatgaaattacaatgccaacatggttatttgtaatattcttatttattgcagttattggaactgttaacggagcaaactttacagacggacttgatggacttgcaacaagcgtaacaattattattgcagtattctttacaatggtttcaattggaaccgggttagaacctatttcagcggcttttgtaggggcgttaatgggatttttcttatataatgtatatccggcaagagtatttatgggagatacaggttcattagcactgggtggatatgttgcagccattgcatttgtattaaaaatgcctatatttattgttattgtggcattcatttatttaattgaagttatttcagttatgatgcaggtaacatggtttaaatatacaaagaaaaaatacggagagggaagaagaatatttaagatggcacctcttcatcatcacttccaggaaagtggttacacagaaacacaggttgttgcagcatttgctgttgtaacagcaatattgtgtttaattggatatttaggattataaaagaaaggtcgaacaagtcatggattggaaaacacaaaaggttttagttgcaggttcaggaaaaagcggaataggagcaactgatttattaaagaaagttggagcagaagttattatttatgatggtaacgataagcttaaagaagaggatgttttaaacaaacttgaaaataaagaagatgtaaaagttattttaggagaacttgaagatagcgttattaatgaaatagatatgatggttttaagcccgggaatagctattgatgcaccttttgttttaagagtaaaagaggcaggagttccaatttggggtgaaattgaacttgcttatgtaattggaaaaggaaagcttgcagcaattacaggaactaacggaaagacaactacaacagctttagttggcgagattatggctaattattatgataaggttgatgttgttggaaacattggaaatccatatacaacaacagcatttgattcaactgatgatacagttacagttgccgaaatcagtagcttccagttagaaacaatacatacatttaagcctgatgtaagtgctgttttaaatattacacctgatcatcttaacagacattatacaatggaatgttatacagatgtaaaaatgagtattgcaaagaatcaggacagcaatcagcctatagttttaaactatgaagatactattttaagagaatatgcaggaaaacttactaacagaattatttggtttagcagtaagcagaaagttaatcctggtgtttatcttgaaggaaagaacataatttatgcagatgaaaaaaaagaaacatttgtaacaacaacagaagatactacacttgttggaattcataatgttgaaaatattatggcagcaattgctatttctattaatatggatgtacctgttgatattataagagaaacaattagaaagtttaaggctgtaccacatagaatagaatatgtggaaacaataaatgatgtaatttattataatgactcaaagggtacaaacacagatgcgtcaattaaggctattgaagctatgtcaagacctacaattcttattgcaggaggatatgacaagaaggtttcatttgatgattgggcagaagcttttggagataaggttaagtgccttgttttactaggtcaaacggcagaacagattgcggatacagttaaaaaacacggatttactaacattatatttactgaatcacttaaagaagcagttgatgaatgtgctaagaatgcaaaaccgggagatgcagtattattgtcacctgcatgtgcaagctggggaatgtttgacaattatgaacagcgtggagatatgttcaaggaatatgtaagagcaatgtgtgaaaaataatgaatttagaagatatcctgacataaaaagaaaggagattttgctgtggcaacaatggaagaattggaaacaacaaaaactgaacctgaaaaaaagccggtaagaagagcaagaggttattttgattatagcctgttgtttgtatggatttttattatgctgttgggatatgttttactttatagcgcaagctcgtatgtggcattaacttcttatggaaactcattttattttctgagaaaacaggtattttccacagccgtaggtttacttccaatgggattttgtacaattatagattacagacgttggaggaactttgcaaaatacgcatatatgggctcattgattacagtatttttggttttgtcacctattggaattgaaaatcatggcgccaaaagatgggtaggtgttggaccgttacagttccagccggcagaagtagtcaaaattggagttattcttatgactgcatatatgctttctaaatgtggtgctcatgctcttagaaatgtgaaaatatgttatcaaatttatgcacctgcaattataggcggtgttttgattgtgggaataacttctaacctaagttctgcaattattatttttggcatcggagctataatgataattattgccggagcagataagaagtttgctttatcccttgtggcacttggaggacttttccttatggttattctgattgcgggagccgcgatgggaaaaggctttagattttcccgtattatggtatggcttaatcctgaagaatatgcagattccggcggatatcaggtaatgcagggcttgtatgccataggttcaggtggactttttggaaagggacttggaaatagtgcacagaagcttggatttgttccagaagcaactaacgatatgattttttcaattatatgtgaagagttaggaatttttggagcaatatgtatcattcttctgtttatatttatgattagaagaatgagagtggtagcgtgtaatgcacctaactttttcggttcaatgattgtaattggggttatggctcagatttcaatgcaggtagttttaaacattgcagttgtaacaaacagtatgcctaacacaggtgtgtcattgccgtttataagttacggaggtacgtcccttgtatttctgatggcagaaatgggattggttttttcggtttcaaaaagtgtaaagaaaatccgataatataaaaaatgtattatcaaaggagaattatatgaaaagaaaaaagaagagaaaactgaaaaaaagtgttaaaaaacttctaatattgattccgattatagcggtgatagctatcgtatgtgtttatggctttgcattaaaagatgtaagctattcttctgatttacaacaatattcggcagaagaagtaaaggcatatcttaatgcaaaaaaaatagataatacacttttgttttggataaaaaacaaaataggaaaaagtgaaaacattgacttgtttgaagaatacaccgtaaaaatgcaaaatccaatgaaagttaaaataatttcttacgaaaagaaactaaaaggatacattaagatatataatagcttctatcaggttgacgaagatggaaaagttctaaagataacagccgtaaaacctaaagacattcccataataacaggtttggatattaagaaagcttcaatgtacaatgtacttgaaactggaaacaaaggtgacataccggcacttactaatatgtttaaggaattagatgcatataagttaaagcctaagaaaatagacattaacaggaactgcgaaataacaatgtatatcaaagaccttaaagttcaattgggaaaaaataacaatcttgataaaaaattgagcgactttaatgatttgtataagaatgcttccaaatataagggaacacttaatatgaaatgggttagtacagatggaagttatacactgaaaaaagagcaggaaactacaaaatctaaaaatactaaaacaaaaaataataaaaaataaaaatttactgttgatatttttctcaaagaattatattatattactatatgtaaataagtaatactatatctcagtatgaaaatatgtaaaataaattaagaaagaatatggacaaaggaggataaaaccttgttagagattactacaaacgaaagtgaagcagttgcaaagattatagttgtaggtgtaggtggagcaggaaataatgccgttaatagaatgatagatgagaatatcggaggagttgaatttatttcagttaactcagatgctcaggtgcttaagagaagtaaagcaccatcaacattacagattggtgaaaagattactaaaggtcttggagcaggagctaagcctgaagttggtgaagctgcagcagaagagaacgtagaagaaatcgcacagttattaaagggtgctgacatggtattcgtaacttgcggtatgggaggcggaacaggaacaggtgcagctcctgtagtagcacgtgttgctaaggaacagggagctcttacagtaggtgttgttactaagcctttcagatttgaagcaaagacacgtatgaacaatgccatttcaggtattgaaagattaaaagaaaacgtagatacacttattgtaattccaaacgataagttacttgaaatcgtagataagagaacaactatgccggaagctttaaagaaggctgatgaagttttacagcagtcagttcagggtattacagacttaattaacgtaccggcattaattaaccttgactttgctgacgttcagacagtaatgagagatgcaggaatcgctcatattggtattggtgaagcaagcggtgacgagaaggcagcagaagcagttcagcaggctgttacatctccacttcttgaaacaacaattaacggagctaagaacgttatcattaacattacaggtgatgtaagcttatttgaagctaatgaagcagcaagctatgtacaggaacttgcaggtgaagatgcaaatattatcttcggtgttagatatgaggatacatatcctgatgaatgttctattacagttatggctacaggtataggtgaacctgctacagaaaagacttcattctcaacaaagatgaagacaagcccatttgcatcaacagtagcaaagcctaaaacatcaacaacaccaatgactgactacacaagaaatgtagcaacagcacctcatggtacagttgaagaaagacctattaagattcctgaatttttacagaaaaagtaataggctgtcgaacaattttgaagtattctaaacatacttcgacggactttttataacagaataactataataaaatccataaggagtaagcaatggaacaagacatttatttagatgtttatttcagctttaatttccttatggatttttttgtgctttttttgacaggaataattataaaaaacaacaaaaaaatatatagaaccattgtatcggccataattggggcaacatatgcaacaatagttatgattacggaaggcatagaaatatatcaaaaaagtataggaatatttcaaaaaggtataggggaagaccttacaaaaccgttaaaaatagttttaacttatgttgtgatagtttatgttatggagctaattgcatatggaaaatacaatgcagttacaatgacaagaaacatgattattatatacataattacctttattttaagcggtgctgtcaatgcatactactgggaaaacagggtagatggtataaatgtaacaaaaactattttgtttgtgttttttatagaaatatttttagttgttttggttaaaagaagtcagaaagatgtatcaattacatctctttatcaggtaacactattggttgatggaaacagaattaatgtaataggtctggcagacactgggaacagtcttacggaacccataacaggaaaaccggtgtcagttatacaggcagaagaattgaaaaagattccggataaaattttgcttgtaccttataattctgttggaaaagagagaggactaatgagggcttttgtggcagacaatatgattgtaaatggcagaacggtggaaaagcccataataggaatccataaaggaagttttggtggaaataaccggtatcagttaatattgcatcctaaaatattaaaaggggagtaaggtatgttaattaatcgtgaaatgaaaacaaatgaaatgaaattttcctttttgcagggaatgattataaaaagggagggtggaatacattatataggaggtaatgatattcttcctgcaccacttagcacggacaaagagggagagtgcataaagaatttaatagaaaacaatgatgaggaagccaagtctatgcttattgaacataatctaagacttgtagtgtacatagcaaagaaattcgataatacaggagttggagtggaagatttaatctccataggtacaataggtttgattaagggaataaacacttttaagccggacaaaaacataaaacttgcaacttatgcttcaagatgtattgaaaatgaaatattaatgtatttacgaaaaaacaacaaaacaaagcttgaagtatcaattgatgagcctttaaatgtggactgggatggcaatgaattactgctttcagatattttgggaacagacgaagatgtgatttctaaagggattgaaagtgaagtggaaaagaaacttttatacaaagccatagaaaagctaaaccatagggaaaaagtcatagttgaaatgcgttatgggttaaacaacaaagatggggaagaaatgacacaaaaagaagttgcagactccctaggtatatctcaatcatatatttcacgacttgaaaagaaaataataaaacgtttgaaaagagaaattttaaaattcgaatagaagtttttgaataaagagccataatttaggcaattataaaagatagatataaatataattattagatttttgaaagtggattatttttaaaaatgaaaataatcgggtttttaataaaaaataaatatctatagatttgtaattgcgggggaatatatggctctttttaaagtagaaatatgcggagtaaatacatcaaaattacctttgttaacagaggacgagaagaaggaattatttaaagaaataaagaaaggaaatgaagttgcgagagaaaaatatataagaggaaatttaagactggttttaagcattttgcaaagattttctaatagcaatgagaatgtggatgacctgtttcagataggctgcataggtttgattaaggcagtagacaattttgacgatacattaaatgtgaaattttctacttatgccgtaccgatgatttcgggcgaattaaaaagatatttaagagataatgcagcaatcagggtaagtcgttccataaaggacattgcctacaaagcaatatattgtaaagaaaatataataaaaactactcacagggagcctactgtggtagaaattgcaaaagagataggagtggaacctgaagatgtggtgtatgcccttgacgcaatccaaagcccggtgtctctatatgatcctgtatacgaccagggtggggataccttatatgtaatggaccagataagtgacaaaaagaataaagaagaaaaatgggtagagaatatagttttaaatgaggcattaaaaggtttaagtgaaagagaacgaaaaataatagatatgagattctttaatggaaaaacacaaatggaaatagcagatgaaattggcataagccaggcacaggttagcagacttgaaaagaacgcactgaaggcaatgaagaaatatatggagtaataaaatcaggaaccaattataagaatctgtatatactaaagaaaagggtgaaattgttcaatcataatgcgtatagaagaattgaaacaaaaagaagttataaatacttgcaactgcaaaatattaggttgtgcagatgacatagagtttgatatttgtacaggctgtattgaggcaataatagttccaggaccgggaaaatggtgtggtcttgtgtgcagtgattttgaatatgtaattccatttaaatgtattgttcaagtgggacctgacataattcttgtaaaagttgatgaaaaagaagtgagaaacaaaataaaagtgtaaatttcttgacctatgtataaaagttccatataatctagtagtaaaaacattttagttagaagaatgtaatagttaaaaagaaaatatgtaaaaacttataagaactaaaaagtacggaggattgaaatgaagtgtccatattgtggagcagatgatacaaaagttatagactcaagaccggcagaagagaacaatgccattagaagaagacgtcagtgcgagaaatgcaacaagcgttttacaacatatgaaaaagtagaaacaatacctttaatagtaataaaaaaagaaaacataagagagccatatgacagaggaaaaatagaggcaggaatacttcgatcatgccataaaagaccggtatcgtatgaccagatagtgcaggctgtggaagatgttgaaaatactatttttaacatggaaaagaaagaaattccaagtcaggttattggcgagattgtaatggagagactaaaacagcttgatcaggtagcctatgtgcgctttgcatctgtatatagggaatttaaggacgtaaatacctttatggatgaattaaaaaaattactaaaataaaacttaaggagacaaaatgctggaaagattttacccaaatgagtatctggattcagtttatgatattgattttgaaatgtattacaaacagggaatcagaggaataatctctgacatagacaacacattggttcctcacggagcacctgccacagaagaaatagtggcattgtttgacaaaatacataaattaggaatagatacatgtcttatatcaaataatcaagagccaagagttgagccatttgcatatgcagtaaagtcaaaatacatatttgatgctcataagccaagcacaaaaaactacaggaaagcaatggaacttatgggaacaacacctaagaatacgctatttttaggcgatcaaatcttcacagacatatggggagccaatagagcaggagtgcaaacagtaatgctcaaaaaaatagacaaaaaagaagaaatacagatagtcttaaaacgaatcccggaaaaatttgttttgtggagatggcgaaagaaacttcaaaaaacacagtaaaaacttggaaatagtatataaaaaagaacaaccaactctaaagaaagcgctctgaagccgtcggtccttagaagatggggcagtgtagctgtcacagattcttagtaccactacgagctgagggcagcgggagcgtgctttcgttaagctggttgttcttttttgaaaaacttttagtaagttttattgcactaatcaaagtactttgctttgatttcttcagtaggcatttccttgcctgtccaaagatagaatgcttctgcaccttggtagagtaacatatataatccgttgaatactgaacagcctttttcttttgccatcttgtatagttttgtttctaaaggattatagattatgtctgaaactattaattcaggtcttaagattgaagaatcctttactaggcatccgtctgtatttggtgccattccgattggtgtggcatttgtaagaatatcgcttgaaaaaactgattctccaattgaatcgtcgttcatttcaattaagtttactttacagtctgtgttgtcgttgatgtcgcttacaagtttttctgctttgctccagaagttatcttttatgcttaaaacatcaatttcacgggcaccgtctaaagctgcctgaacacaaatagatgaagcagcaccgcctgaacctaaaagtgtcatttttttgccaacaatattgtgaccgcaatcctgaagtgaacggatatagcctgttccgtcagtgttgtgaccgacgaatttaccattatcatttacaacagtgttaactgcgccgattatttttgcggcaggtgataattcatcaactaatttgctcattaatgttttgtcaggcatagtgcagttaaaacctgcaacatttaatttcttaagaccttcaaaagcaacctgaagattattttcaggtacatcaaaacataaataaacgtaatcaagacctaaaagtctatatgcctcgttatgcattaaaggagatttgctgtgtgaaacagggcttccgagaagtccggtaagtctagtctgtcctgtaatttctgatatacaacccataattgtatccgcctttcctaatatgtaaaaataaagccgacacgtaaaaaaagtcgacattttgattatacggattgtgtttcgtttttcactttcacaacctactgtaatcatatctgtttaaataatacaacacaaatataatatggtcaaaattttttgaaataataaggaaaaatttctcaataaaacaaattagccaaggtcttaatgttgacttagaacttttgctaatttatactctgtatatgcgaaaaagggaggactttgtaccaatgaagactttagagtgtagaggaatcacattaagtgataagcaaactaagatttgcgttccgataacaggaactgatttagaagaaataaaagaacaggcagagaagattgctaatatgaatcctgacgttgtggaatggagagcagatttctatgatgtaaaggacaatgacgaaactgagtttgaacagtgtcttaaggctatcaatgataatctaaaaaaaatcccaattatttatacatatagaacatcaaatgaaggtggagaaaagagtattgatgttgatgattattgcagactttgcaagtatgtttcagaaatatctgagaaatataatgtggcaatgattgatgtggagttatatgaaaataaagaccagaagaacattggcaagttgcttttagatattaaaagcaccggagttaaggttattggttctaatcatcattttgagggcacaccatcagaaaaagatatattcaatgtattgaaaacaatggaagaagcaggggcagatatttgcaagattgcagtaatgcctaaagaaaaagttgatgttaaaacattaataaatgcttcaaagaaagctaataaagaattaaatgcgccgattataacaatgtcaatgggagagcttggagcggtaacaagaatttgtacaagaatgacaggatcagtcgttacatttggggcaggagttaatgcatctgcaccgggacagccaccatgtgaaatggttagattccttttgaaagcttcagaaagtggaaagatagattgcaacgtggctttaataggttttatgggaacaggaaaaacaacaatatccaatgctttatcaagaataacaggttttaaggaagtagatgtggatcagtatattgttgaaaaagaaggcatggcaataaaagatatttttgcagaaaatggcgagcaatattttagagatttggaaactcaggctttaagagatttacaggaagaaaaagaaacaattatttcctgtggcggaggagctgttttaagagatgaaaatgtggaaatactaaatacgggaagtgttattgtacagcttaaggctacacctgaaacagtatttgaaagagtaaaagaccatacacacagacctattttaaataatgacatgagtgtaagacacattactgaattaatgaatcagagagaaccaagatataattcagttgcggacatacaggttaatgttgataagggagacagggtagaaacttgttattacatacttaaagaacttgaaaaaacaggtcattttagtgtagaataaaaagtggttgaaataaatataaatataatttataatattttttagcgtgacttagtcacagacgaactttaggaggaataattatggtaacagcaggcgatttcaagaatggtattactattgaatatgatggaaagatttgtcagattattgaattccagcatgttaaaccgggaaaaggcgcagcgttcgttagaacaaaattaaaagatatcaagagtggtggtgttgtagaaacaacattcagaccaacagaaaaatttgaaaatgcacatatcgatagaaaggatatgcagtatttatataacgatggtgatttatactactttatggatggtgagacatatgaccagatagcagtaagtgctgaaaaggtaggcgattcacttaagtttgtaaaagagaatgaaacagttaagatttgttcatgtaagggtgatatttttgcaattgaaccacctattacagttgaacttcagattacagaaacagaacctggattcaagggtaacacagcaactaatgctactaagcctgcaattgttgaaacaggagcaacagtatatgttccattgtttgttgaacagggtgaaacaattgttattgatacacgtacaggagaatattcaaagcgtgtttaatgcatagtaagctgataaaaagctgcgctaatgcgcagctttttatataatatagaatctttttacagaaatgcataagtggaaagaaattctttttttatattattttgttaaaaaattaacaaaataaaaggaatataaggaggatggacatatgaatatagttattttagatgccaacacactaacattagataacgacattgatttttcagtgtttaaccagtatggggatgtaacgatatatcagtcaagcactgatgaagaagtaggggaaagaattaaagatgcagaagttgttttgtgtaacaagacagttttgaacgcagacaagttaagcaaggcacctaatttaaaatatatcggattattcgcaacaggatataacaatattgacattgattatacaagagctcatagcataactgtatgtaatgcaggcgattattcaacagaagcagttgcccagcatgtatttgcatttattttgcatgaatataacacagtagacaagtataatacattcgttaagaatgaaggttgggttaatgctgaaacattttctccattctttgccatgagagaattacaggggaagactattggggttatcggttatggatcaatcggaagaaaagttgccgacgtagcaagagtttttggaatgaaggttatggcatatagtagaagtcaggaaaagaaagatcctaactttagaatattagaatatgcatcaattgatgatattcttgctaattcagatattgtaacaatgcactgtcctcttaatgaagattcaaaatatatgtgcaataaagagttctttaagaaaatgaaaaaagatgccttattcattaacacatcacgaggaaacgtagtagatgaagaagctttggcttgggcacttaacaatgacattattgctcatgcagcagtagatgtagtttcaaaagaacctatggaaaaggataatgtattacttaaggctaagaacattattattacaccacacattgcgtgggctccaatcgaggctagaacacgacttattaaaattgtttcaaaaaatttgcaaaaatgggttgcaggaacccctataaatgttatagaatagcattacgaaaggtgtttagaacggattaatgttaatctaatctaaaaaaggggcgggaacagtgattgaaattattatgttctcagcagattaattttttttaaggaggaacagtcatgagaagattgacaaagaagattgcagcatctgctttagcactttctctcgtatttactatgggaacacagtgttttgctgcaaactggggtagctatttcggaggctcagaaggatggtatgaaggagctgaaggaactttaacatctaacacagataaggcttggacagcacagatggcatctatcggatacggtggagtttggggtgctcaggtttataagaacggaatcagtgttaagaagggacagcagtatacaatttcatttgatgcacagtcatcaacatgtgataagtgggtatacgttaaggtttcaacagatgaaacattagctttctcagattgggttcagttaaagaaaggtagcacaactaagtattcaacaacatttacagctaaggctaatgctaaatcagtatacttcggtattggtggagaatttggtgacagacagggcgttgacacagataaggatgcagcaatcagatatggtgtattcacatcaacaaagggtgctctttcacagcttaaagatggtgatccaacattctcaacaacagttaagcttactaatttctatttaggagctgctaagcctgcaaaggttaacttaaagagcgttaaggcagctaaaaagggtaaagttaaagttaaatataagaaagttgccggagctgcaggatatcagattcagtactcattaaagagcaatatgaagtcagctaagagcaaaacaacaaaaaaggctacttacacaatttcaaaacttaaaaaaggtaaaaaatattatgtaagagttagagcttacaacaaaggtaagaaagcttacggcgattggagcaggaagaaagctgttaaggttaaataataaagaataattttgttatccctcatatcctttgatatgaggggtttcttttaatcaatcaaaaaacgtttctaagtagaaagtcgttataagtcgaacgattttttacatatttggtatttttttacatataatagtaatgataaaaaaataataaaccaaagtatggtaaagggggaaatacaatgattgacaaagttattgaaaacaacagagtaagtattataggagagatagtttctgagtttaaattcagtcatgaagtttttggcgaaggtttctacacagttgacgtgtcggtggacagattaagtgaattaacagatgtaattccgttaatggtgtcagaaagacttgttgatgttagtgaagactatcagggaaggcttgttgaagtatcaggtcagttcagatcttataaccgtcatgaaggagcaaaaaacaagttagttctatcgatttttgtaagggaatgggaagaagtagaagaaaaccttgaatcaggcaaaactaatcagatattcttagatggttatatctgcaaagcacctatttatagaaaaacacctcttggaagagagatagcagatttattagttgcagttaatcgaccttatggcaagtcagattacataccttgtattgcatggggacgaaatgcaagatatgcatcaacttttgaagtgggtggtcatattcaaatctggggaagagtacagagtcgcgagtatgtgaaaaaaataaacgaagaggaaagcgaaaagcatgttgcttacgaagtttctgtaagcaaacttgaatatattgatgaataaaatataatactgaagagttaaaaaaaggttgtttttgaattaaatttcgaaaacaacttttttctatgtttgtaaataataaataaaaacgttttgacttttacatatgtatgaagtaatattgtataaaaaggtgatattcaaaaggaggaaatatgaaaaagagtattaaaaaaattatctctttagttattgctatggcactgacaattagtggaattacatattcaactgtagcaaaagctgacgaaagcgaaggctcatggaaaactgacgcagttaaggttcccagtgaaggacaacttgttggagcaggatatattgatgttgaattcgataattcaatggaaggatacacatacactgtatatcttgatggtaagcctgtttattggaatggcaatgatattgtaagagaagaattgggtgagaaaaagacagatgattctgttacaaagacatttacttcaagtgatgaaggaaaaacagaagtttatgcaacaacagtaagtaaacatgaaatcactgtaaaagctaagaaagataatgttgaattaacatctgtaagaaatttttatgtttcaaagaaaggacttgctttaggcggagacatgagcgataagattaagttaagtaagcttaactgttcatggtactataactggtcaacagaagcttttaataaaccgttggatgaaggtgttcagcatattcctatgatgtggggaagcggtgatgataacaaagaagcaatgaagaacttggtaacaacatctaactatattttaggatttaatgaacctgatattggaacacaggctaatattgaattctttgaggcttcaagtgtgtgggatgaatatattaaaccacttaatatgagaaaagtttcgcctgcacctgcagctccgggtggagactcagtttggcttaaaagatttatgaagggcgattatatttgtaagaatccatgggatggaagctggggattgttctatgactacgaagatgaagctacaaaaaaatttgttgaaggagaatcagacagtgttgattctgtagtgttgcactattatagaaacacaattaacttgaaaggattgcttgatgcagtggaaacactttggaattcatatcataaacctatttggataacagaaatgtcattatttggtgtcaaaggaacaagaagtgactttagttatgagctacctgaaaagagagctgaaattcaaaaatatcttgaagatgcaatggaagcattagatgcaaatccacatgtagaaagatattgctggttcccatatgatattgatagtacaaatgacatagattcttttaatggttctggtggaacagcaatgtttgactattcatcaggtgcatatactgaacttggaagaatgtattcatcaaagggaaatccggaagggtataatgcacaaacaatttcagatgatgaaatgtttgtatatgttccggaggaaacaacaacacaggcacctacaactgtggaaacaacaacacaagcaccaacaacacaagcaccaacaacacagacacctacaacaaaaaagcaggaagaaacaacaaaggctgagactttaaagcaggtaaaagtaacaggtgcgaaaaatattaaaaagaaatctgtaaaagttacttggaagaaagttgccaaagcgaaatcttatcagattcagtatgcaatgaacaataagtttacaaagaaagcaaagattaagaaaacaaagaaattaacttatacagttaaaaaattacggaaaaataaaaagtattactttagagtcagagctgtttcgaatggtattaacggaaaatggtcaaagacaaagaaagtaacaattaagaaataaactgattaatatagtgatgaagagagttgattaaaaattggctctctttttttacttaatttatttaacaggataaattaaatgaaagtaattgtaaaatttgatacaaaaagtaagaataatataatatatttacaatattggtgaaaaatacttttaaacagttgtaaaaacaggtaaaactaataaacaatatatctaaaaatgtttcactgtaaaacaaattatgcaatattacacatttcataacgaataaaaacagttttattcgttaaaattaacattaaatggttgagaaataaaaacgtttatgatataatgacgttaattgaaatgagagtgaaagatttcaagtgtaaatttaagttttatttaaaggaggaattgaaaagatgagaaaagttttcaataaggcattagcaggtgtaacatctgcaactttaatcgcaacacttgcattgggagttaatttcacaagcacagttaaagcagatggagcaacaacagtagacacagtatggtcatttacacagggtggacagtataatccagatgaaccaggcaatactggatatattaaatcagtaaatgtaggtaatgatgtattttctaactggggaagagacaagaatgaaaagcagacacagacagcaagcaaagcaacaacaggatttacattggatattgaaaatacaggttgggatgcaggctggaagaataacccggttaatattaacccatgggctgtagaagcatcaaacactattgaagctaaggcaggacatatttacaaagtatcatttaaggctaaagcatcaaagaagaaatatggatatgtagcctttggaacagatattgtaactgatcaagcaacaggtgcaacattaacaccatatgaccaggcaccaattgaaatgagtgatgatgcaacaaatcagattattacattaggaacaacagataaaacatatacatttacatttactaactgggtatcagctaagaaaattaaaacaagtattatgttaggtgcgtttaattcacagtatgattatgccggaaatagtgttagtgacattattactgaaaaagaggtaaactggaatggtacagttgttgtaagtgatttcacaattacagatgaaggattaaataaggaatttgttgtagaaccacctaagccaacacagccatcacagccatcacagccatcacagccatcaaagccagcagttactcctggaaacaataatggtggaaataatcagccagctgtaactaagccagtagctaaaaaacttgcaagagtagctaaagttaaggctaagaataacaaggctaaaacagttaaggttacttggagaaaagtggcaagcgctaagaagtacgaagttaaggttggaaataaaacttatacagcaaagaaagctactttaacagttaagaagttaaagaagggcaagacatacaagattaaagttcgtgctaaagcaacaggattcaaaacaggtgcatggagcaagactgtaaaagttaaaattaaaaaataatacataaaatttataaactattaggttacccaatgcgtatgcattgggtaactgtaacaataagaagagtttatgttagtcgggaggacttaaagtgagaaagagtattttaaagaaagctacagcagtagcaatgtcattaacaatggttgttggaatgacaggagttgtttcagcagcacatgcttctaatggagcagatgttgcaacaaatgctaaggttagttcattttctatcttaacagaagaagatggtggagtttggaagaaagcattagaaaatatcagatcagacaaatatcctaatggacaggttgccggaaaagatttcgtaacagaaggatggcttacagatcagaatggtaaaatatcaacatccaatatggaaatgtttgttaagaacacaggatgggatggagagtacaacaagttcacaaacgctttagttggagataatccatggggattaacaatgacagttagtgacattccggttgaattaggtcgtaattatacaatttctttcaagattaaaagtacattaaagggtactgttacaaacgaagaaacaaaggaagaaaagacagtagattcaaaacatatcttattcaaagcatatgatcagaaatctaaaggtgaaccaagtgtaaacttcacatcaatttcaggtgctactagtggtggttatatcacagtaaagaatggtgatgattataagacagtaacagctacagttaagattcctgatacaagaaaggcatatggcggagatgttatgggacttaagttcgctttaggtgcattcatcaaaacattcccagaagaagttaacatgaagggaacagtttatgttaaggatttaaaggttattgcaggtaatcagtatacagttaagtttactaacggaagccagtcacaggctaagtatgttaatgcaggaagccaggttacaccagcaagcttttcaaagaaaggctacacattagcaggattcaagaacaaagctacaggtgctatgtacaactttggttcagcagttaacagtgatttagaacttgttgctgtatttaataagacagctaagcctggaaaaccatcaattaaggttaaaggtgctaagaagaaagcaacagttagatataagaaggttaagaatgcagcaggttaccagattaagtattctgcaaagaaaaacatgaagggtgctaagactaagacaactactaaggttaagtatactattaagaaacttaaatcaagaaagttcacatatgttcaggttagagcttttgcaaaagattctacaggacagaaggtatacggtaagttctcagctaagaagaaagtattcataaagtaattaatttttagataacataatattaatcttagagcaggtgaaagggtgaaaagatattgtatggtgtatacagtatttttcgcccttttattttcttttaaaaagaaaataataaaattaaaaacaaacaatttattatcaaatataaattgtaaaattaatataataaagagggtaccttttataggaaggagattacaatatgaaaggatttaaaagaatcacttcaattgttttggcattagctatggttgtgacaagtattacgataagtggacctgttactgtaaaggctgacaatgcaacagacaattggaaagctaatggtattgtaagtcctaaacaggacaagttaattggcgcaggatacattgatgttaaatgggataacacattaacagacgtatcacagtataaagtttatgttgatggtgatttaagagcaacagtatcaccttcatcagacaagactatgagtacagagttctatacaacacaggtaagtgaacataatgtatatgtagttgcaacattaaagaacggttcaaacgttcagacagctaacagacgtttttatgtaacaaagaaaggtgtttgtgtaaacactaaagatatgggtacagcagtagatccagcctcaatgaatgttggttggtattacaactgggattggaaatcatttaaagatatgaacttttcaaacaagaagtttgatgatttggaatttgtaccaatgatttggggcgacagcatgacagaaacaagcgagatttttgataatgttaagagcaaaggttataagtatttattagcttacaatgaacctgatttaaaatgggaatcaaatgtaagacctgatgttatgcagtatagatggaatgactgtgtaaataacaaaggtaatgtaagacttggttcaccggcagtttcagttttccctacatggtcaaacgattggtggacaccattctggaactcaatggcagcagacaagaagaatgctatgtcatttatagcggttcattcataccagaagagctatgatggagctaagtcagcacttcagtaccttcaggcaattgatgaatgctgggaaacttatcataagccaatctggattacagaatttgctttctggaaattcagcattaacgatgtagcaggatgtgcaaaagtacaggaatttatgaagatcgttattaaaggtcttaatgaaagaagctatgttgaaagatattcatggttctgtccaaatatagaagaagatgcagcaagctcatcaagtatctttaattacaagactggtgaattaacaacattaggaaagatttatgcacagattggaaatccttcaggatataatgcaaaaacgtatggtgtaagttcttacatttcaactaatacatcaccagcagcttgtgcagtagccatgccaacaacattatatagtgcaaaagctaaaaagaaagctttcaggtatcagattaaagctgtttcaagagcagcaggataccaggtacagtatggtgttaagaagaacatgaaaggctcaaagagcaaatatgttaagaaattaaacggaacaattaagattaagttcacaaagaaacagaaaaaacagattaagaagaaaaagcttaagagaattacatattatgtacgtgtaagagcatataagactcttgatggaaagagattatattgcgcttggagcagcaaagataaagttaaagttaagactagatagaagaggacataaatatgaaggtattaaaaaaaataacaactttagttttggtaatagctatggcattttcagtgaatgtaacaggtacattcactgaaagcgtcaaggcagctacagaatttcagataataagtccaagtgataatggtcttgttgcagcaggatacattgacattaaatggaataatccgataggtggaactgcgtcaaagtataacgtttatgtagatggtaattatgttaattcaactacatcaacaacatatgaatattacacaacaagtgttgcatatcatacagcatggattgaagcagaactttctaatggagcaaaggaatataccaagacagtaaaattcggagtatctaaaaaaggtttagcagttaatgataatatgggtagaagacttgatcctgtagcaatgaatatgggctggtattatacttggggaacgaccccgttcttatatacaacatatggttcagtggaatttgtacctatgatttggggaacaggttcagaaaatgcaatttcaagaatagcaagcagtggctataaatacttgttggcatataatgaaccggatatgccaatgtatgatgctaatggaaactttgtaggtggaagtaatgtagacgttaatacagcgattagtcattggtataagtttgcaggtaaaagttatcatttaggcgcaccggcaccggctctttgtccggcatgggatagcggaacgtggtttagaacatttatgaatagtgatttggttgacaagagtactattgattttattccattacattgctattacggaacatatggtggtgcagcaggagcaaatacattccttaaagaagtggtagacgcgacttataatatgtatcacaaacctatttggattactgagtttgcagtaagtggttggggatatagcaatgcttcaaatagaaaacaggttgaagcattcctaaaaacagctattgaaggtttaaataagagaagttatgttgaaagatattcatggttctcatttaacactacagacaatagtaacggtgcatcagcattatggactaattcaacaggtaagcttacagatttaggcaatatttatgtaaataacggtaacccaacagagcttgcagctcagggaagtgcagttaataagtatcagccttcatcagacaatggctcaaacaatagtagcaataacaataccaataaccagccacaggttaaaaaacctgcaagagcaaagatttctaaacttaaaaatgtaaaaggcagaaaagtaaaagtatctattaagaaaatcaagaatgttaagggatatcagattaaatattctgacaacaagaagtttaacggatactggcagaagaattcaaaaaagaagacatatacagttaagaaattagataagaagactaaatattactttaaagtaagagcttatgtaataaatggaaacaagaagttatatggttcttacagcaaagtaaaatcaattacagttaaaaagtaattagattaagtagcctaaaatggcagcatattaaaagaaggggttttaatagcctcttctttttgatattatttacgtatgtgacattaaaataaaaatttgaaattgtgtcattagcaaatgtagagaggatagattatgacttctaaaaataaaagaatatcattaaaaggaatatttcaaattatattaatattgattttgggagccactgttcttgcagcgtgtattgttgcagtaataaagcatcaaaatgcagagtctgcaaaaagagagcagaaagccagaatctctgcagcagagaagattgtaaaagaaaaggataagtggaaaagtgatgctttcattacaccaacatcaggttcacttaaagcagcaggatatataacaattgaatggaaatcagccaagaatatgggaaaggttgaaggctataagttatatatagataatgaaaaagtggcagaaacagattcaaagactacatcttttgaatattacacaacgaagatacaatcccatgaaatatatgtggaagctgatatgcagtatggatcagttgtttattctgatatttacactttctttgtaaataagaaaggcttttgtcttaataaagatatgtctatgaatgtaacagcaacagattggggtacatcttggtattataattgggacatgacaccttttagttatgactcatttcaggagatggaatttgtacctatgatgtggtcgtcattcccgggagataaagaccaaattgcagtatttccaaagatggggtataagtcagtgttagctttcaacgagcctgacagagaggatcaggcaaacttggatgttgatacggcagttgagggaatgaaagcttttcagaacaaaggaatacgtgttggagcacctgcaacatctttgtgtccgccatggtcagacaattggtttgtgccttttatgaagaagatggaagaacagaacatggatgtggattttataccaatacatcattattggaactggtatgcagatgaaggggcacaggcatttctcgaccttgttgatgaaacatggaaaatgtaccataagcctatttggattactgaatttgccattagtggagatccgggtaaaactaaattccagagaaaagtagtaatgcgatatatgaaaaaagttattgccggacttgataaaagagattatgtggaacgttacgcgtggttctcgtttagtccaacggattacaaaaacggcggttcaggtttgcttaatcattatgaaggcaaaatcactgatttaggatatttatatcagaaattaggaatgcctaaaggatatgatagaaacaatcctgttaaggctaaagctaatccgaaggaagatgtaataaagaagtattatattacggtaaaataatcagacatattagatgttaaataagaaaattattacaaataatcaggcattgattaacttagttaaaatattaatatatagtatcatttatggcatttcagaataaaatatataaaggcgtgttgacactaaagcctatgaatgatattattactttagttaaataatagtagaggttgcgctacctattagtacattataagatgccccggaggcagatgattatgttggaaaggatgtagcgccgaaggagaatccaccggaagatttatcctgggcatacggttaagaaccgtatgactgtcatcatttgatggagagccattatcgacaatcacattgatggagagctacttataagcattcggtgcggtacttataaggagctatgaaagctccttttgttttgtaaaaagttacaaaatatgctccggttaatggaaattcaaaataccacacaggcttaaaatagcatactaaagtttaatgaaatacatataatttaggaggttttgtaaatgtcaatttttacaggcgcaggtgtagcaattattacaccatttaatgaagatggatcaattaactttgaagaatttggaaagattattgaagatcagattgcaggacatacagatgcaattatcgtatgtggtacaacaggtgaatcatcaactatggatgatgatgaacatcttgcaactatcaaatattgtgtagaaaaggtagcaggaagaattcctgttattgcaggaacaggttctaactgtacaagagaatcgattaatttatctaagaaagcagaagaaatcggtgttgacggattactttgtgtaacaccttattataataaagcaactcaggcaggtttatacgaatattacaaggctatttctgatgctgtaaatattcctattattatgtacaatgttccttcaagaacaggtacaaacatccttcctgaaacagctgttaagattgcaaaggaagttaagaacgtagttgcaattaaggaagcatcaggtaatatttcacaggttgctaagttagcagctttagctgacggatgcattgatatttattcaggaaatgatgatcaggtattacctatcttatcattaggtggtaagggtgttatttcagtatggtctaacgttgcaccaaagcaggttcatgacacagttcagtcatttatggatggagatgttgcaaaggcaacaaagatgcagttagaagcaattgatttaattggtgcattatttagcgaagttaacccaattcctgttaaggctgcaatgagcattttaggctataaggcaggtcctatgagagcacctttaacagaatgttcagatgaacataaagaaggtcttaagaaagctatgaaagaatacggaattttataaattacagtgtgaaaaagtcatatcccaccggtgcatgcacaatggtgggataatggctttaggacacgctgtgtaataaagacttacggaggttaaaatggtaaatgtaataatgcatggttgcaatggacatatgggaagagttgtaacagaacttattgaaaaagatgagaatgttcagatagtagcaggtattgatgcttacacaggcgttcagaatgagtatcctgtatttccatcaattaaggaatgcacagttaaggctgatgttattatagattttgcagtggcacaggcagttgacggattacttgaatatgctgtagaaacaggtacacctgttgttctttgtacaacgggacttagtgcagaacagcttgaaaaagttaatcaggcaagcaaaaaggtagcaattcttaagtcagctaatatgtcacttggaattaacactttaatgaagcttcttagaacagcagcagatattcttgctaacagaggttttgatattgaaatagttgaaaaacatcataatcagaagcttgatgctccaagtggaacagctttggctcttgcagattgtatgaatcaggtattagataatgaatatgattatacttatgacagaagtacagtaagacagaagagaaaacataatgaaatcggtatttcagcagttcgtggtggtacaattgttggtgaacatgatgttatctttgcaggaacagatgaagtaatccagatttcacatacagcatactcaaaggcaatttttgctaagggtgctattgatgctgcaaaatacattgcaggaaaagaagccggaatgtacaatatggcagatgtaatcggataagattaatatagaaagtttttttagaattttatatggaaattattttaaatttgaaacttttttatgcacagaaaatgctttttgtattctctgtgcattttcttttttgaggaaaaattttaaaaatgtatattttttttgaaagtgcaaaaaataatcctataccgaacaaaattttaaattaagttggaggatttatagtatgaacactttaagaaattacttacttgtatttactatggcattaatgtcagtttgttttgtggcttgtggaaataataccacaacagacaacgaaacaactacagcaacaaatcaggagtcatcttctgaaaatactacgaagggtggaaattcaggaaaagttgacaacaaaaatgatggtgttataggagatattggtgacgatatagaagagggtgtagatgatattgttggggatggcaatgatgaaaatacaactgatacaacaaataatcagaatcagacaaagaacaacaataagacaactacaacaaagaagtagattatatagtttcaaacgaaaacagccgtaattggtactatttttagacttttagcatatcatattatgataatgataatcgtaggttgttatggcttataaaataattttagatccgggacacggcggatcagacccaggagcgacttttaatggaagacaggagaaggatgaagccctgggtcttgctatgtctgtgggaaaacttttggaaaacgcaggctttgatgttgcatatacaagaactgcagatgtttataatacaccttttgaaaaagcaacaattgccaacaatatggggggagatttatttgtttcattccatagaaattctgcacctaacgcagacatgtacaacggagtgcaaacactggtgtacaatgaccagggattaaaggctgaacttgccagaaatattaacgagaaccttgtggcacttggttttgctgacaaaggagtagtggaaagacctaatcttgtagttttaaaaagaacaaaaatgcccgctgttttgattgaggcaggttttattaattcggctgtggataatgaaatcttcaataataaacaaaacgaaattgcccaggctattgccgatgcaataattgatactttatatgacagaggcattcatgcaaatgactgtaaacctaacaatagtcagagctattcggttcaggtgggggcttttagaaacagacaattggctgaaagccttaacctgcagcttagaagacagggattcccgtcaagagttgtaatggaagacaatctatttaaagtaagagttggagatttcaggacactggataatgcggtggcaatggaattgaaactaaggttacttggatataatacttttgtggtaagttgaagcttgaatcataattaagagtactctgttgctggaatattttgtagttgaaatgttttattattgaaaaatatattagggataaaaatacagaaaaagatagtgtaactttcggatggttgaaaaccgataattacactatcttttattttatgaaaaaatttaactatgaaggtggaaatgatttaacaaagttgatacaataagaagatgtaatattttaatatagaataaatttagaatataagttgaaaagtaaagatacatatgagatagaaatatgctaatgtgtacaaaatagggcataacagtatatataaaatcggaaaggattaaagataaaatgaacaatggattcgtaaaggttgctgcggcaacaccaaaaataaaagtaggtgactgtggttataacggagcacagatttgcaagattatagatgaagtgtatgataatggagctcagcttgtggtttttcctgagttgtgcattacagggtacacttgtagtgatttattttggcagaaatcaatgcttgatatggcaaaaactcatttgcagtttattgcagagcattgcgaagataaggagattgtggcaattgttggattgccaatgatttatagaagtaagctttataacgtggcagcagttatttatgatggagagattttaggtcttgtgccaaagacttatatacctaattattctgaattttatgaggcacgtcattttacaagtggcaaaaataaagacggatatgtaatgattggcgaagaagaagtaccttttggaacagagattttgtttaattgtgttaattttgaaaactttagttttgcaatcgaaatttgcgaggatttgtgggttcctaatccaccaagtacaagccatgctcttgcaggagccacagttattgcaaacctttcagcaagtgacgaaacaacaggaaaagatatttacagaaccggtttggtaagcggtcagtcagcaagaactcttagcgcatatatttatgcagatgcaggagagggtgaatctacaacggacttggtttttgcggggcacaatattatagctgaaaacggtaatattttgtcacagtctaagagatttgaaaatcagactatttacgcagatattgaccttgacagattagcagcagagagagcaaaaatgactacttttattcctgatgaagaattgtcttatgaggaagttgaagtggaattggagccaatagattttgaagtggaaagagtgatagataatgcacctttcgtcccatcaaatactaatgaaagagagaaaagatgcgaggaaattctttcaattcagacaatgggacttaagaaaagattggagcatactaattgcaaaaacgcagttgtgggaatttcaggaggccttgattcaacattggcattgttggttacagcaagagcttttgataagttaaatcttgacagaaagggaattattgcagttacaatgcccggttttggaacaactgacagaacatatactaacgcagtttcaatgattgaaaagttgggatgtacttttaaggaagtaaacattagtgaagcaacagttcttcatatgaaccagattgaacatgatattaacattcacgatgtaacatacgaaaacgcacaggcaaggcagagaacatatttgttaatggattttgcaaatgaacacaatggaatggtaattggtacaggagatatgtcagaacttgcacttggatgggcaacatataatggcgatcatatgtcaatgtacggtgttaatgcaggcgttccaaaaacacttgtaagacaccttgtaaaatatttttcagatacatgtgaagacaaggaactttcagatgttttaaatgatgttttggatacacctgtaagccctgaattattgccacctaaagacggcaagattgctcagaaaacagaagatttagttggcccttatgagctacacgatttcttcctttactatattttgagatttggatacacaccaacaaaaatatattttcttgcaaaaatggcatttaaaggaatataccacaaagaaacaatattaaagtggttaaaaacattctacagaagatttttctcacagcagtttaaacgaagctgccttcctgacggaccaaaagtaggaacagtagcagtttcaccaagaggagacttgcgaatgccaagcgatggctgtgtaagagaatggatgaaccagttggaaaacatagagtagttgaagaattatggtggagataattgttatgattttgtcatacatcagatagaagaaattgccccataggagagaaattgaaatattatggggcaattcagtagcatatacgattacgtgtcatacgaaaaataattcatatgacacgtaattctagataaaaattcaaaatatactatcttaggactggacattatcctaaaaaacaatgtgaaaagaataattcactcaaaaattctttctattccccaactttccctttctcaattgtatcttgtatagcattatataatattgtatatgtatatttgctattgtcatcaaacttaatgttttcaagtgattggtttgtaactatttgatttgctatatcgttgaaagcaggttctactaaaggatacattgttgtgattgtgttgctaacattgtcaaccgttatggagttaatgtgattatcatcaagtgttacttttacatccatgggattgccgttaagtgtgacacatgatgtgtaaactccaggttcgtatactccggtattttcctctttttcctgcttgtttcctctattataaaacattattacaagtgatataatcaggattataccaaggagtatgaagactaaggtataaataagctcccttagatgaaataccataaattttggactttttgccatacaaactccttcaaaaattttatttcttatattctaatttattattagagattaaaaaatatgaaagaaaaatatatgggacatttttgccctatgaatattgatattatattagtaaagttgatatactagtagcattggtaaagagttagcatgataatagtaaataagatttaagaaaagagttagcaggataatagtaaataagatttaagaaaagaggcataaatggcagtacaatttattgttggcagagcgggagccggaaagtcccattatttatatgaaaagttaatagagaagtctttgaaatatagaaataagaattttattgcaattgtaccggagcagttttctatggaaacacagaagcagattcttacaatgcatcctaataggggaagttttaatattgaagttacaagcatgacaagacttgcctatacggtttttgaggagcaggggtttaatgaatacaaagttatggatgacttaggcaaaactcttattatgagaaaggttatggaacagtgtaaggataaacttacaatctataagtctaagacatcaatgcccggatttgctgagaagatgaagactattgtatcggaatttaagcagtacggaattactgatgacgttttaaatgatatgaaggcagaatgcgattctaagcccctgctcagacataagcttaatgatgtggaaattataagtgatgcttttaatgagtatattaaagagaaggttataacaacagaggacgttttaactattttttgcaaatatatttctagttctgattttataaaaaatacttatttttacatagatggatttacaggatttacacctattcagtatcaggttcttgaacttttgattaaacattgcgcaggggtaaagattgcaattacattgccggaagatgaatttcagtcattgagaaatgcgtatagcaaaggaaataatgcaattagcaaatatgaattatttaatctaagcaaggatactttatggaagcttaaagatataatcaacagaaacaatattgagcaacaggaaactgtaattgttggagaaggacaggctccatatagaattagagataataaagagttaacttttttggaaaagaatctgtttagaaataattcatctaaatatagagagaactgtaaagcgttggaagttcacagtatgtccaatccaagagaagaggcagcttatgttgcaggcagaatttcggagcttattgtggacaaaggatatagatataatgatattgctgtaattacaggtgatatggacggttattacagatatattgaggaagagttttccaagaataatatacctgcatttattgaccacaagcataatattgcttcaaatccttttgttgacggaataaaggtggcaattgagattgttgaaaaggatttttcttatgaaacagtattccatcttatcagattaggttttcttccaattgacagggaggctgtagacataatggagaattatgttttgcagtcaggaagacgtggtttcaaaagttatggcagactttgggagaaggcttacaagggaatgactgctgaagaacttgatatggttaatcaggcaagggagaagctagttgagattatcagacctttaagagaagaattaaaaaagaaaaaggctactgtaagagagtatactaaggcggtatatcagtttgtacaggctaataatatgcaaagacagattgacgattatagaattgaatttcagaatcagggtgagattagcagagccaaagagtatgagcaggtttatgtgacaatcataactcttttagacagaatagttgaattaatgggagatgaagttttaacaattaaggaatataagcagattcttcaggcaggttttgaaagtgtgaaagtgggaattatacctccgggacttgatacagttatggtaggtgatattgaaagaacaagattgaaagatactaagagaattattttctttatgggagttaatgacggaattattccaaaagcaggtcaggcaggtggaataattacggatacagatagagagtttttagaaaagaataattatattctggctcctacggcaacggacaatgtttttaaacagaaattttatttgtacacaatatttgccaagcctacggagaagatgtgcattactttcagtaagtcgggttcagacggggcaacaagaagaaagtcttatataataagtattttaatgaatctttttgaaaatcttaagattatagatgaggatgaaagtgaaataactttaaaccaggttactacaagaagtaaagctttggattacctttctcagaatatatatgaatattcgaaggaaggtgacagtggaatctttaaagagttgatggcaacagttatgaagaataaggaatatagcaaggtaataaacttaatgtttgacggagctttttattcagcaaagaatccaattttggatgaaaatgttgcaagacagttgtacggaaataaagaaaatattggaattacaagattggaacgttttgcagcctgtgcatattctcagtttttaaataatggcttgaaattaggagagcgaaagaaatttgaacttgccgcatttgacataggtaatttatatcattcagcaattaaggacttttttgatacaattaatacgaataatattaaatgggcagacttggatgacaaaaaaagtgaaaatattataaatgacagcattgaaaaagtaatggagcaatatgaaaatgatgctttaaatgatattgcaaggtctgcatttataaagaagcaggttaaagatacatcaacagaaactgtaaatgcattggttaaacatatcagatcaggaaatttcctgccaagagaatacgagctgcgaattgcccacggaagagtagacagagtggacacttttgaagatggcaacaatatatatgttaaggtaattgactataaatcaggaaacaaagtttttaatgttacggaaactttcttgggattgcagatgcagttaatggtttatttaaaggatactgtggattacattaagaaaaataatccggataagaatgtttatccggcagcaggtttgtattttcatgtttatgatccatatgtttcggaaattgactgtgagaaagctgtgagtgattttagaaaaaagaatccggacagtgagttaagtgatgaagaattgaaaaagatggctatagaaaaggagcgttttaaggcatatagaatgtcaggtcttgtggcaaaagagattgaaattgtaaatgcaatggaccataacaccattacaaaaacaggttcttcagcaatattgccggttaatattacaaaaagcggtgttgatgcaagaagtacagccattgaaacaaaaacttattctaaatttattaatcatgtttcaaatatggcaggagaaatgcaggacaagattataaaaggagacattagcattaatccggtagaaggtgcatgtgattattgtccttttggtggaatatgtaattttgacagaaaacttggaagcagataccgtcaggttgaaaaagtatcactaagtgatattgaggagaagtgtaatgaagtggacagataaacagcaaaaagttattgatacaagagatagaaacatacttgtttcagcagcagcaggttcaggcaaaacagcagttttagtagaacgaataataaagatgataacagatgaagaaaatcctaatgatgttaatcagcttttggttgttacatttacaagggcagccgcttctgaaatgaaggagaggattcgcgaagcattggagaagatggaagaggataatccaaatgacttaaatgttcagaagcagttatccttaattcataatgccaatatttctacaattgacagtttttgtgcaagagttgtaaaggataattttgataagatagacttagatcctaattttagaattgccgacgagaacgaaatagaaatgcttcaatctgatattgtggaagaaatgttggaagagtattatttggcggctgatgatgagtttatggaattggccgaaaaatattcaacaggaaagaccagcgacagtataggggaactgattcttagaatgtataagtttgcctcaggtcagattgagcctgagaaatggattaaagaagccataagtgtatatgatgtttcatctaaagaagaaatggagcagtccaagtggatgcagggatatttggaattgcagaaaaacaggttagagggaatattaagccagcttaacatagctcttacaatatctgaaagcgaggatggaccaaagtgcgccaaggctcttacgcctattattgacaagttacaggagataactgaaagcagaacttatagcgcaatgcaaagtgaacttcagaatattccatcaacaagagtgtccggtaagaaggattgtaatgagagaaagaaggagcaggttaaggcaataaaaaacgatgccacaaaggcaataaaagatttaacaactaaacagtttaatctaacgttgaatcaggtttttgaaagcatatgtgaaacaaaatcaagtgttgaatatattggaaaattaacccttgaatttatgaagcgacttaaggagcagaaagaagaaaagggcataatggattttaacgaccaggtgttttttgctttacatattttaaatgactatgacaaggatggaaatcttgtaccatctgaaacagcaaaaaatatggcaactcagtttaaggaaataatgattgacgaatatcaggacagtaatattattcaggaagctattttgtcagccataactaaaggttttggcataaataatatgtttatggtaggtgatgtaaagcagagcatttacagattccgtaatgcagaacctaaacttttccttgaaaaatataatagtttttcagatgatcctagtgcagacagtgtgaagattgttcttgacaagaattttagaagccgtagggaagtaattgaaagtgtaaactttttatttgactttgtaatgcatgaagaagtaggaggcattgattacaaaaacggcaatggccttgtacttggagcagattatgatgagccacctgcaggacaggataattcaacagaatttgtaatggttgaaggtggagataaaagtgatgaggcagcttatgttgcaagaaaaataaaagagattactaatcctgaaaccgggttaaagataactgaaaaaggtaaagacatgcgacctgtaagatatggagatatagttattcttttaagaagtatgaaggataatagtgatatttacagagagcagttggagaataatggaatacctgtttttgcagaatcaaagacaggatattataaaacaatggaagttatgactattacaaatatgttgtcaattatagataatccaagacaggacatacctttggcagcagtacttacctctccaatgtttggttttgattcaaatcagttagcaattataaaaacagaaaatgtttgtgaaagtttttatgattgtgtagaacaatattctttatcaggaagtgatgtggaacttagaacaagactgacagagtttttgaatacacttacaaaatttagaaatatggttccgtatacaactgtatatgatttaattaatacattgttagatgaaacaggttatgctttttatataagatcaatgcccggtggaaagaaacgtcttttaaatattcaggcattaaaagagaaagctgtggcatatgatgagacaagttacaagggtctgtttaacttcttaagatatattgagaagattcagtatcttgcaaaagatgacggtgaggcatcaacagttaatgagaatgacaatatagtaagaataatgtccattcataaaagtaaaggattacagttccctgtagtattcttgtgcaatactaatggaacaagcaagaatgaggcaaatcagcttgtgtcaggggcagatggaaacataggaatagactgcattaataataaattaaagactaaacagacacctcttctaaaaacatatatcagaatgtctaataaggaagaggatgtggcagaaacattgagaattctttatgttgcattaacaagagcaaaagagaaattatatattacagggcttgttaagaatgctgaaaagcagattggagaatttgaaagtcagatatatgataatagtgaattaatgctttataatgatgttattggtgcaaaaaccataatggagctaattggaaaaacaattggcagaaataaggcttttgactgtgtaagaacagataaagatgcaactgaatgtggtaatcctttatatgataaggatagttttattaaagtgaaagtggaagaacagccggatgttatattaggacttgcagcagaagatataacagacagtattaaaaaagaaactatgcttatggaaatgaagcagttggcaaacaaagaaaatgcatcaattgaaaaacttttccaaaggtttcagtttcagtatccatatattgaagatattactctacattcaaaggcaagcgttacggaaattaagaagcaaagccaaggtatggagcaggaagaagaacaggatgcatttcaggcttttggagaagaagtggaattaccggaaattatacctgattttgaaaaagaagatattgatgagccacaatatcttacaggtgcaatgagaggtacagcgtaccacagaatttttgaacttctcgatatggaacttgaagaatataatcaagaaacagtgaagaagatgattgaaggttttgttgatgcaggtttaatagacagaatgggtgcagcatctgttatgcgaaaggatataattgattttacaaagtctgatttgtttagaagaatgaagaaggcatatgctaataatcagctatatagggaacagcatttcttaatgggagttccggcctgtgaaattaacagcaataccacatcaaaagaaacaatgattattcaggggataattgatttatgctttgtagaaaatgataaatatgttattgtagactataagacagacaaagttgacacaatggaggaacttgttgaaagatatcatgttcagttagaatgctacaaacttgcaattgagcagatacttggcagtgagccgggagttaataaggtttctgaaatgattatttattcagttcatcttggtcagcagataactataaaataatggagagtacaatatgatttttcctaaatacattaaaaaaggtgataccattggagttactgcaacttcaagcggtattgtaaatgaattaaaacaaaaaagaataaagaatgcaattaagaattttgaaaacagaggatacaatgttaaggttactgacaatgtatatacgtctgactggagaggttgtagctcgacaggaaaagaaagaggagagcagtttaatgaacttgtaaaaaataaagatgtttcctgtatattttcagtagcaggtggggattatttaatggagatgcttgaatatgtggattttgaaagtattaagaataatcctaaatggtttcagggattttcagataacacaacattgatttatccaattgttacaaaatgtgacatggcagcagtttatggttgtcatataagtgattttggaatgaaaccatggcagaaacctgttgaaaatgcgttaggtgttctggaaggaactgtaaagaaacaggaatcttttgatttttatgaatcagacagacacgaatatgtaacaggttttgaaggatattgtaatgatgagaaagtcaactgggttaatggcagaggtgaggaaaaaattgaaatttcaggaagacttgttggaggctgtcttgatgtattggctttcttaattggaacaaaatatgacggaacagaacagtttattgaaaagtataaagatgacggaattgtatgggttcttgaaagttttaacatggaagacgtggttcttataactcatttatggcaaatgaaggaaaaaggttactttaaaaatgcaacagggtttgtttttggtcgcccattaatgtataatacatggatagagcaaccatataaggatgcagttatgtctgtacttggggatttaaacgtgcctattatttttgatagtgatataggacacaaaggacctcagttttctgttataatgggagctaaggctaaagttacaagcaaaaatggaaaaggagttttagaatatgcttgagttaaaagatgttagatttagcgtgactgatgaaaagggacagctaaagaatataattaatggcataaatcttaaaatagatgaaggaaaatttgttgcaataacaggaccaaacggttcaggtaagtccacacttgcaaaattaattgttggtataataaaaccaacatcaggccagattttatataatgggcaggatattacggaaatgtcaattacagacagagcaaagcttggaataagttttgcatttcagcagcctgtacgttttaagggaattaaagtgttagaccttttaagaattgcagcaggaaagcagcttactattagtgaagcctgtgaatatttgtcagaggttggactttgtgcaagagattacattaacagagaagtggatgcaagtctttcaggcggagaactaaaacgaattgaaatagcaactattattgcaaggggaacagagctttctgtatttgatgaaccggaagcgggaattgacctttggagttttaatagtttgattaaagtgtttgaaaagatgcaacttgaaaataataattctattcttattatttcacatcaggaaagaatattaaacatagcagatgacattgttttgttggcagatgggttgattaaggctcacggtaacaaggaagagattcttccaatggtacttggtactaatagcgatggcatatgtaagaaattaaaagcatagatggaatagtgtaaggagaattgttatggataaaatacagatggaattatttgagcaacttacaggattacatgagattcctgccggtgcttataatatcagggcaaatagcaaaaaggatagcagaaatacaactgcaaatatagatattgtaactaaagaagacaaagacggcattgatatttatgttaagccgggaacaaaaaatgaaagtgtgcacatccctgttgtaatcagcaagacaggtttggaggaatgtgtatataatgattttcatattggtgaaggtgcagatgtgcttatagtagcaggatgcggaattcacaatagtggggacaagctttccagacacgatggaattcatacattttacattggtaagaatgccagagtaaagtatgttgaaaagcattatggcaaaggcgatgggaatggtgaaaatgttatgaaccctacaactattgtaaatatagaagagggtggatatatggaaatggaaactgttcagattaagggaatagattccactaaccgagttacaaagggaaaacttgacaaggatgccaagattgtaattactgagagaattatgactcacggaaaccagacagcaacaacacgttttgaagttgacatggatggtgacggttcaagtgccaatgttatttcccgttctgtggcaagggataattcaaaacaggttttttattctgtaattaacggtaatgcaagatgtaatggtcattcagagtgtgatgccattattatggataatgcaaagattagtgccataccggaaattacagctaatgatttagatgcttcacttattcatgaggcagctataggaaaaatcgcaggggaacagcttattaagttacaaactttaggtctgacagaagcggaagccgaagaacaaattgttaacggtttcttaaaataaggagaatgtaatttatgcttcacagcttttgataatggaattacacattttgatttggcgaacttaacgacatagcactttaatttcaaagaataatatttaaagaccttaaatatatttcagtgatagagattatttaattaaatttaataagtattgcaaaaagcaattggagttagattaagtttagttaaagattttggaaagaaatatgtttgaggtcttttttatgaatgaaaaaatagataatacattaaatattgcattgaatctgccggaagaagatttggaaaagtctcaggaattatctgtgggaatagaaaatgatatttgggagttaattataagatatcaggggaatttggatgaactaaggagattgactaatgttaacgtaagagaattatctaatggatatgcagttataacaacacctaaaaacttaattgatgcaattagcaatttagagcaaattatttttattgaaaaacctaagagattagaatataacgtactaaatggaaagagagagtcttgtattaatcaggtgcaacaggacaatttttttaataatggaatgggtttgtttggagaaggcgttattgttggcattgctgacagtggaattgattacaccaattcggtttttagaaatcaggacggaagtacgagaattttaagattgtgggatcaggtaacggatacggtttatagtgaatcggatattaatcaggctttgatgcttgaaaattcttatacgaaagttaattcaagggatttaacaggacatggaactcatgttgccggaattgctgctggaaattttgcagacaataaaaataataatcttggaattgcaacaaaaagcaaattggtaattgtaaaaatggcaacagcaacagaaaattcttttccaagaacaacgaggctaatggaggcaatagactttattgtaaaaacagcaaacgaatataaaatgccattatcacttaacattagttttggcaacacatatggctctcatgatggaacaacattagtatcttcatatattaattcggttatagacggaaaccgaatttcagtacagattggaacgggaaatgagggagacggcattggacatacatcaggttatgctttttctaatgaggatgtggaactacaggtttcggcatatcagaaatccataagcatacagttgtggaaagattatgtggatacatttgcaattcagattgaggcacctacaggagagagaacaccggtgataagggagaacaatagagaaagtaataggctaaataatggaataagtgatgaaacaagtaatgaaataggaagaagtatatcagataatgtagaaaatagaatgggtaattcaattagcagttacacattaggaaatactaatgttttcatattgtacggctcaccgaaaccatatactaggtatcaggaaatttatatggatttaatacctgtcaatcaatacatagattcaggaatatggattataagaattattcctgaagtaagtgttgtgggaaggtatgatatgtggttgccgggaaatcagtcgattaatacttttacgggatttttaaaacctgatccggaaattactttgacaataccatcggcaactgacaaggcaattagtgtaggagcctatgatacaagtacagacaaggtggcaagtttctcaggaagaggttttacaagagagaacaaccagataaaacctgacatagttgcaccgggggtaaacataaggtcggcggctacaggtggtggaacaacagttttaagcggaacatcaatggcaacaccttttgtaacaggcagtgctgctttaatgatggaatggggaatagtaagaggcaatgatccctatctttatggagaaaaaataaaagcgtatctgatacgtggtgcaaagcatctgccgggatatgagcagtggcctaataaacaggcagggtggggagcactgtgtttaagggatggtttggtgtgaaaaaatatatttaacgactgacgcgagattttttctcacaacatattgagtaaaggagaaaaaatgtgttatataatatagtaagaataaattgagagagttcaaactatgatatatgaatttagtttaaaaaattttagatcttataaatcaaatgcctggattgattttacagctaaaccaataggggagtttaaggaaacacttattaatcaagtatgtgataagactgaattattaccgtaaaatcaaagaaacgtagtgaacaaattaaaattgcaaaaaaatgaagcttatttacaataagaaagaagtgaacaaaatggacaattatttacagaaacttaacattaacgaaaaactaaaaaaagaaataaattcatacagggagagttatcctgttagtcatgagttattgtacagaatccctaagccagataatctttattacggagatgaaatttggaatcaggcggttacggcattactttgcggggagaatattttgcttgtggggcataaggctacaggaaaaaatatttttgcggaaaatctggcagcagcctttggaagacctaagtgggatatttcttttcacgtaaatatggatgcagcatctttaataggtatggatacttttagaaatggagaggtaactttcagaccgggacctgtttacagtgcagctaagtcaggcggttttgccattcttgatgaaataaacatggcgaaaagtgaagcaatggcggtactacatgcaactcttgattttagaagaactattgatgttccaggatatgacagaatagatttgcatccggcaacaaggtttattgcaactatgaactatggatattcaggaacaaaagaattaaatgaagcgttggtttcaagatttgcagttataaaaatgccaatgatttctaaagataatcttataaaacttatacaggacaaatttgaaacgataagtgagcaggcggcagaagaatttgccaatgtttttcttgatttacagaagaagtgtgaaaattcagagatatcatctaaggcattggatattagaggattgcttgattccatagcattaatggaaaaaggacttgaagttcatacagcacttgatatgggaataactaataagtcttttgatatgtacgaacagacacttataaaggacactataggggcaagaatttcaaagaagattaaaacagaggatttgtttaaaaagtaaattataaaaaaaatttattaaaagaataattaactgaaatctatttaaaagtagatttattaaaaaaataagtttattaaagaaagtttacttagagagaagatttgaacaaaaatggaagcagatataagagaaataaaacgtgcaaaaaacttcatatgggcatcggcagaagattatgaacttaatccgttatatttggctttttcacctgatggcaaggcggatacatatttaaatatcataattgggttaagctataaatggtacgatggcgctcaattagaagaatttttcaatatgcttggtggaaaggacaaggagctttttgagggtttattttggattggacttgaaaaggtactgtttaagaaagaaaaagactatcgtatggcattaacagatttgcgtgttgaatatgcaaaagaaactgttaggcgatttaagaaatatactgataattcactaattgaaaaaataagatacggttattgcagacaggttttaggaaaagaatccaatttgtcggctgaagaggaagagttgttaagtgaatttgatttttcaaacgatatgacaacagagcagataataggtaaaactaaaaagatattgtctgagaaattctcttatacaccgtcactaaagaaaaataaggaaggagtatattttcttcaaaaagtgttgtcaccatttcggtcatttggaaaagtaagtgccacatatgtaagaacaaagaagtacgatgacccaaccggctttaacgaaggaaaaacaggagttctgaaaaaagggaaaaactatcttttacagttttcattaaatggaaatcctaaatatgccttggaatatgttcagtcaacttttggtaaaaatatgtataatgattttgaaaatcaaagaattgaagaaaaattatgtacaggaaagcacaaagaaagccatctcttgtttacaaagggcgaaaaatataatttaaaagaacaaagcagagaattgcctaaaaaagaaataaaagaaattttggaatttagaagagaatgcaagaatcagtacgaaaagaacaaagaatattttgaaaaaaacagacctgtatataagaatagcattaatagactttcagaaaaattaaggataactttagacagcgaaagagagatttttccttcaatgtctaatcacggaaagattaacggtggcaaaatttggcaggcattgtatgttgataatccaagagtttttgagaaaaaagagcaagaggataagtcaggtttttccgttgatataatgattgacggttcatcatcaagaaagaatagtcaggaatttattgccgcacaggtttacgttcttgcaaaaagtcttgaaagatgcaatataccttgtcagatatattcttattgtagtattagaggctatactgtgctaagaattttcaaagattatagtgaacagaaagcaggcaaggaaatatttaagtatgttgccgcaggaaataacagagatggtttggctttaaagggagcaggtcatttaatggaacattcacctaaggaaaaaagaatacttgtagttcttacggacgcaagcccccaggatgaccaaagtgcaacggaaggtgctttttacaagaacaatgaatacacagatgaattggcaataaaggacacggaaaaggaaattcataatctaaaaagtaataacattcaggttataggaatttttatgggaagtgagagggggacaattgcagccaaagaaatttttggaaaagattttgtgaaaattgagaccattcatcagttttcagatacagttggaagaatattgcaggaaaaaataagaaatataaattagattattaattatgttgttcattaaatgtttacaattagaataaattatcataatatgtaatcactaaaataattaggtcagtagtgtgttgcaagttaaagacagaaaaggataagacaaatgagtaagttttgtgttaaaaagccatttttcgtattagtggctgtaatcgtagttttaataataggtggagtcagcttaagcaaaatgcagacagaccttttgccggatatggaagtaccatatttgattgttgttacaacagaacccggtgcgtcacctgaaaaagtagaaacagatgtaactaagccaatggaaaatgctcttggtgtaattagtggcgtaaagaatgtaacaagtacatcatcagagaattatggtattgtaatgcttgaatttgcagacgatacagatatggattcagctcttgtaaaagtatcaaatgcacttgacagtgtagattttcctgacggatgtggaaaacctaacaccatggaattaagtatggatatgatggcaacaatgtatgccagcgtaaattacgacggaaagaatattaaagaccttactacattttcaaaagaggttgtagaaccatatattgaaagacaggacggagttgccagtgtttcagtagttggtggagttgaggatacagttgaagtaagacttaatcagaataaaatagacaagattaataacaagattcttgaaaagactaacagcaaattagcagatgcagacaagaagattagttctgccaagtctaaattaaataaggcagaaagtgaacttgctgaccagaagaaagctttaaaagataagcagtcaagcactaacaaacagcttgctgaggccgattctaagttaacagatgcaaaggcaacaaagattgcatatgaatcatctcttaacagtatgaaagcaagtcagagtgccttagaagccgaaaagaaaatatatgaagataacaaaatagaaaagaattataaagagattaacaacacacttgccaatcttaacaagcagtatggaagtgtagcaaagactatgaatgttacaattccaaaaagcgttaaggatgcaattgataatcctgatgaattggaaggctttaagaaatggcttacaaatatgggacagaaagataaagctgaacttattacattggataacttaaaacagatttacaacattgttgaagttagaatacctcagattgatacagaacttgccaatcttaaaactaaaattttagcagcagaaaagatggtagagactatcaatagtaagatgaaggacattgacaagaattatgttagtgttaaggaaggaagtcttgaagctgcagcaggatttggctcaggtgatgcccagatggaagcaggacagtcaaagattgattctgcaaaagaagaacttgaaaaatcagaacaggatttagaaaattcaagaaaggcagcaattgaaaattcaaatattgattcacttttaacacttgatacattatcacagttaattactgcacagaatttctcaatgcctgcaggttatattgatgataaggaagacgatcagtggcttgtaaaagtaggtgaaaattataccaatgcaaaacagcttaaaaagatggttcttacaagggtaaaaggcattggaaaaatcaaattaagtgatgttgcggacattgttacaattgataatgaaggcgagtcatatgctaagttaaatggtgaggacgctttattgttatcagcatttaaggcaagtacagcaagcacaagtactgtttcaactaatttgaaaagctcatttaaagagttagaaaaacagtatgatggacttacaattactccattaatggatcagggtgaatacatagacattatagttaagagtattttatcaagtattcttttgggagcaattcttgcaattatagttcttgcattattcttaaaagatgttaagcctacattggtagttgctttcagtattccttttagtgtactttttgcaattatcataatgtattttacaaatataacattaaatgtaatgtcattggcaggactttgtcttggcataggtatgttggtagataactccattgttgttatagagaacgtttatagacttagaaacaggggaatttcagcacctagagcagcagttcagggagctaaacaggttgcaggagcaattattgcatcaacgcttacaacaatctgtgtattccttccaatggtttatacatcaggaacagttagccagttaatgataccttttgcatttactatctcatatgcacttattgcatcattaatagtagcacttacagttgtaccgacaatttcatctgtattacttagaaagaccaaggagcagaatcacagattctttgataaggttaaagagaagtatgaagtggcattggaattttgcttaaatcacaagatagtgccgattggaatttcaattgtattgttggcaatctgtgttgcaaaagtgtttagtacaggacttgtattaatggatgatatggaaagtaatcagatttccgcaacattaacttttgacaagacaattgataaagatacagcttatgatactgcaagtcaggttatggaaaaaatccaaaaagtagacggagtatcaaaagtaggtgcaatggatggaaacacaggggcggcagtaatgtccatgggaagttcatctaataactacacaaacttcacattcagtgttttaacagatgatagtattaaaacaactaagcagtttagaaagattataaaagagattgaaactaatactaaagacataaagtgcaaggaatttaaggtaagttcttctgcaatgggggatatgtcaagtatgctatcaggtggtcttgcagtaaatatttatggaaaagaccaggacaaattaatttccattagtgaagacgtaatggatatggttaagagcattaagggagcaaaagaagttactaacggtattgacgagaaggataagcagatacatcttcagattgacaagaacagggcagcagccaagggacttacagttgcacagatatatcagcaacttgtagcacgtacaacaactgacgaagattccataacacttaatgtaggcgatgatgatgtggcagtaaaagtagttgatgaaacagataagcttacttacgaaaatcttatgaagtcaaagattacagcaacaacttatgatgataccggaaaagaagtaaagaagaattacaagttatctgattttgcaactatgaatattgaagacagtgtaaatacaatcaagagaaaaaatcttacacagtatttatcagtaactgcagaagttgaggatggatataatgcaacattaatgtccagagaacttgaaaagaaaataaatgaatacaatatacctgacggttacacaattgaaatcggaggtgaatcagatcaggttatggatatgatttggcagatgctacaggctatacttttaggagctattttagtttaccttattatggttgcacagttccaaagcttattgtcaccgtttattatattctttacaattcctttggcatttacaggaggaatgataggattaataatctttggccggactatttcagccatggcattaatgggatttatgattcttatgggaactgtagtaaacaacggtattgtattcgttgactacactaataagcttcgtatccagggacttgataagagaacagcacttattgtaacaggaaaaacaagaatgcgtccaattcttatgacagcattaacaacaattctttcaatgagtgttatggtattttcacaggatgcgggaaatgcaatgcagaagagtatggcaatagttgtagccttcggtcttctatatgcaacacttatgacattgttcatagttcctgtaatgtatgacattctctacagaaaacaaccaaaggaaattgatgtaggaagtgacttagatgaaattcctgatgaaactttagaatacttagagagtaaagaaaatgctaaggattcagaaatagaagataatcagtaataaatcagaaataaaggttgaaatgtagaatacaatatgttagcatagtcacaagatattagggagtagttcacaacttaagcagttgttatacttttcgtcatcacgtttaacaaccgggaagtatattgaaataggaacgagacttttatcgcattattttggtgcgaaaaaagtctcgttctttttttgcttatcaaaaaagtgaaaagcatttgagataattatacgatattaaaaatcgtgtaaaaatagcaccaaagaaaaaataggttcaaaatgaaaaatggaggtgccaaaatgattgaaagttggaaagttgattctaacaaacttatgaaaaaaatgaacgttacagagaaaggattaagcgatgagcaggttttacaaataagagaaaaggttggagaaaacttattagaggaagcaaagaagaaaagtgtgctacaggtatttttaagccagttctgtgatttacttgttattattcttattattgcggctgttatatctgcattttctgaaaaccctgaaagtacaattgtaataattgcagtgcttataatgaatagcattcttggaacagtacagcatattaaagctgagaagtctttagaaagtcttaaacaactatcttctccaagtgcaaagataatgagaaatggtattaaaattcaaataccttctaaggaagttgtgccgggtgacattttagtgttggaagcaggagatttaatagttgcagatggaagaataatcaataattattctttgcaggttaatgaaagctcacttacaggggaatcaacaaatgtggagaaaacagacaaagcattagaaggtgatattccactggcagacagaattaacatggtttattcaggaagtcttgtagtttatggcagggcggaagttcttgttacggaaacaggaatgaatacagaaataggaaaaatagccggcttaatgaataaagctaaagaaagaaaaacaccgcttcaaaaaagccttgatcagtttagcggaagactggcaattggaattatgattatttctgcggtagtttttgttttatgcttaattagaaatgttagccttatagattcattaatgtttgcagtggcacttgcagttgctgcaataccggaggcattaggctcaatagtaacaatagtgcaggctataggaacaggtaggatggcttctgaaaatgccataataaaggacctgaaagcagttgaaagtctgggttgtgtatctgttatttgctcggataaaacaggtacattaacacagaacaaaatgacagttgaaaaggtttatgtggacggagatattataagtcctaaccagcttgatttgaaaaatcaattacacagagaccttgtatataatgcaatattaagtaatgattcatcaatagtggatggaaaaggaataggtgatcctacagaatatgctttacttgaaatgttcagaaatataaaagtcgaaaattttagaattgaaaatggtggatgtaagaaatttgaagatagtacagttgaaaataatgattttaacgaaaaaatgttaaatgaagaagatgtaagaagagcaattccaagattgcaggagataccttttgactcagatagaaaattaatgagtgtaaaatgtaaattacacgacaaggaaacagttcttacaaaaggtgctttggatgttttgcttaatagatgcattaaaataagaaaaaacaatcaggttagagaaatttctcaaagtgacatagaagaaatcttaaaagttaatgagaaattttcaaatcagggattaagagttctttcttttgcttacaaagaagcagatgaggatttgacaattgaaaatgagaaagattttattttcttaggcttaattgcgatgattgatccaccaagagaggagtcagttgaagctgtacaaaaggcaaaagaagcaggtataaaaacagttatgataacaggcgaccacaaaatcacagccatagcaatagcaaagaaaataggaatttataatgatggagatttggcagtaacaggtttggaacttgatgaaatgtcaaatgaggaattatatgaaaaaattaatagaatatcagtttatgccagagtctctcctgaaaataaaatacgaatagttgaagcctggcagaaacacggcaatgtagtttcaatgacgggagacggcgtaaacgatgcaccggcactaaagaaagcagacataggtgtggcaatgggtataaccggaacggaagtttcaaaagacgcctcatcaatgatattagcagatgataattttgcaacaataataaaagcagtggcaaacggaagaaatgtatatagaaacataaaaaatgccataatgtttttattatcaggaaatatggcaggaatattgtgtgttttatatgcatcaattgtaggactgtcaatgccgtttacagcaatacaccttttgtttataaatcttctaacagactcacttccggcgatagcaataggaatggagccttcagatgattcgttattaaaagaaaaaccacgtaatccaaaagaaggaatcctaacaaaatactttataataaaaataatgttgcagggagcactgataggaatagcgacaatgtcagcatactacattggattgaaaacaaatacagcccttgctaccacaatggcatttgcaacactaaccatagccagactattccacggatttaactgcagaggaaaagaaagcataagaaaattaaaactgaaaacaaatccatatcaaataatggcatttgtggcaggaatagcattcatatcaatagtattatttgtaccacaattacacgggttatttgaaatagcagactttacggcagtaaacatattggaaatactggggcttgcgtttgtgccgacactgataatccaaatagtgaaggaaatttaggtttttggcagagttgtacttcccaccccacggctgaaaattctaacgaaagcacgctcccgctgccttcagctcgtagcggtactaagggctattggcagagttgaatttcccacccctcggctgaaaattctaacgaaagcacgctcccgctgccttcagctcgtagcggtactaagaagctatggcagcttcgctaccctaccttctaaggaccgacggcttcagagcactttctattagaaataaaacaaaaa

SEQ ID NO: 12740 - DNA, 137 bp, Unknown
  gut microbiota DNA sequence
tgtatgacacgtaattgaactttaaatttaatgaatttttcttagaattacgtgtcacattagacttttattgtatgacacgtaattgaactttaaatttaatgaatttttcttagaattacgtgtcacattagact

SEQ ID NO: 12741 - DNA, 3823 bp, Unknown
  gut microbiota DNA sequence
ttttgcgagtatagtgtaaagcgataaacctactgtttgagccgtaggcgagtttaggttttcgctttgcaatagacgacggagcaaaatgagatgaatcaacgtgtttgcaacaaaagtttttccgcaagtaggaaggcatgatttgaaaggaggtcattttatggcagtattacatttaacaaaagaaaactttgaaagcgaagttttaaaatctgataaaaaagttttggttgatttttgggcaacttggtgtggaccatgtcagatggtttctcctattattgaagagttaggagaggaattaactgatgttaaggtttgcaaggttgatgtagacaaggaacctgaaatttctattcagtataatattatgtctattccaacattaattgtttttgaaaatggtgagatagcaaacaagactattggtgcctgcacaaaggatgaaattttagatttattaaaataatttgataacgatttagtaaggaaggatttcattatgcttatgtacgatattgtaattataggagcaggtacagccggaatgtcagcagcgatttacggtgtgcgttcaggcaagaaggttttgcttttggaagagaagaattatggtggtcagattgtgaacactcctgaagttgagaattatccgggaataattaagacatcaggttttgagtttgccacaaatctttttaatcaggcaaaaagtcttggtgccgaaattaagtatgaaaaagctgtggaaattaaaaataatggagttttgaaagaagttattacaaataaagaaacttacgaaacaaaagctataattattgccacaggtgcaaaaaacagatcattaaaacttgataaagaaaaagaacttattggttcaggtgtttcatattgtgcaacttgcgatggtatgttttttagaggcagagatgttgcagtagtaggtggtgggaatacagcattggaagatgcaatgtttctctcaaactattgcaagaaggtatatattattcacagaaggaacaagcttcgtggtgaagaaaaaattgcaaaagcaatatctgaaaaagataatattgaaatggtttggaacagcaatgttgtaaaattaataggcgacgataaggttgaaggaatcactgtaaaaaattcagttgatggtttagaaaaagatattcaggtttcaggtctttttattgcagtaggtcaggaacctgacaattatgattttgaagaagttgtggaacttgacgacaaaggctatgttgttgcaggtgaggattgcaaaacagaatcaagaggaatttttacggcgggtgattgtagaacaaagaacgtccgtcagcttacaacggcagccagcgatggagcagttgcagcaataggtgcctgtgaatatattgatagtgaattaggcactaaaaatactaaataataattagtgaaaaaatggaattagattcataaaaataacagtttacgggcaactgaaaaagtagtatcattattcttcgggtaaaaaataattttgaaaggtacggaagaatgatatcagtaaaagaagcaacaaaaaactacattaatggcggaaaaggaaaaacaacaatgccacttggaagaatgtttgtattagcatttttggcaggtatgtttattgctttagccggaacagcagcaacaatagcttcatcaacggtcactaattcatcagttgcaaaagttataacatcattagtattcccggcaggacttgccatggtaattattaatggaacagaattatttacaggaaataacttattgattatgtctgtattgtctaagaacattacagtaggacagatgttaaagaactggatagtcgtttacattggaaactttgtaggttcaatttttgttacaggatttttcacattaggaaacatttattcaatgtttaatagcagtgttgcaaaaagcgtaatttcaattgcaacaacaaagtgtaatttaagtattcaggaaatgttttttagggcgattttgtgtaacatccttgtatgcgttgcagtaatgatggcagcaacatccaagacagtaggaggaaagattataggtctattccttccaattatggtattcgtaatctgcggatttgagcatagtgtagccaatatgagttacatttcaggtggtcttttttcaaagatggcatatggaaaccttggcttggaaacagcaggacttacatggtttaattttattgtaaagaaccttttagttgtaacaatcggtaatattatcggtggttgcgcaacaggtattgcatattggttctcatactatcgtaagcaggactaataacttataaacagcggaaaatcaggctgataaagtgtaaaaataataaataaagcaaagataatatcccatatcagaaatccaagttttggagtaaggtatgggatattataattttcaattaaatgtggtgttataaaaaaggcaacacaaacactaataataaaagataaaatatcaagaaaaagaatcggcttgccggtaaacacagtataagtgtaaaaccacattggaataagaatcatgcctgaaagaatgccaataactgcagaaggaatgtaagttttgaattttttcccaaaaataaaatacccaataagaatccaaacagacatagggaaaaacaataacttcaaatgctcccatacactttcgttaatgggagaaaaaatcccaacaaacagactttcccctgaccattcataaacaaagtgcaacagagtgcctgtaataatagtgaaaacagcaccaataataagaaaaatatttaaacgcctgtacataaaaactccaatctaatcatataatatttttaatcttcttaataatcatatgcagaaaatggaaaaatatgcaggaaagaggaatgtatttaaataataggaagatatatatgtgaaaaagaattatgttataaataataatgcacaatatggctggagaaaaatatgttataaaaaagtatgatatttaaattagaatagttaaaatagtttacgaataggacttgacataaggagaaagatacttcataattataaagataataaacaattattatataaataatccagtaagggctagtactggtttcgacaggggcttggaatctggtgaagctatccgcagggagatgcgttaaatcacaacttaaaattaaacgctgaagataatttagcttacgctgcctaattaaaggcagctgtcaatcccggaaggcctacggtccggacattggcatcgactttagtagggaaccctaaatattaagctttgcgtatttaggagtactatgaagctaccaagagttataggatgttagttttcgataacttgagggaaattcaaacaactgactatgatagtagaagaacaggggaaaggtttttggacacgggttcgactcccgtctagtccactcttagtcataaggagggacccgctcgaagagtgggaggataccttatgacacgaaaaagacacttgtaaacgaaagtttgtaaggtgtcttttgagataaaagcaacggcattgtatgttattagagtgatatacagtgtcgttatttttatggtataatgcggatatgaatttaaaaaatcgaagtttgtgatggtagataatatggaatggtttaatgtttttgggctgatttttattgcagtcattatgatacccaatgttgtatctgcgattaagtgcaaagatggatttgataataagtggaacaataaatatgttgaggtcacagaacaag

SEQ ID NO: 12742 - DNA, 909 bp, Unknown
  gut microbiota DNA sequence
attgaggtcacagaacaagtagggagattgggttgtttcggattcatgataatcaatattccgggaacttggttcgggtggtggtctgacgaagcatttgcactatatctgattgtagataccatattggtaatgctttattgtgctatttggattatatgttttaagaaaaacagcgttttcagagcattagcactttctattattccttcaatgttgttcttatttagtgggattatgagtaggtcagtgctattgattattgcatcagtattatttgcaccaagtcatattatgatttcatataaaaatgtaaaatgatatttacaaattcaagtttatctacgcgatgcattcgcatttcgctttgcttcatgctcatgtcgcgctgtcgcgctatgcatcaacacttgaatgtgtctgactgtgagcaagctcccgtcagccaattcagtgtagctgcgcatcgcttgtagaaattcgcaaattccaatttggagaattgaaaaaaacggaatttacctattaagacatataaactcttgacaataaagctcctatatagtatgttttaaataaactactatataggagcttttgtatggaaatgaatggaggatttcttgtcacaaaaataaaacagcttggagaccggattttcaagaagattctcagtgaaaagaatattgatgcgtttaatggagcccagggacgtattctttatgtgctgtggcagaaggatggtatctcaatcaggtcactctcgactaaatgcggattagcgataacatctcttactacgatgctggaaagaatggaaaatcaagggctgataagccgtgttcagtctgaaacggacaaaaggaaaacgctcctgtttctgactgagaaagcacatgccttaaaggg

SEQ ID NO: 12743 - DNA, 187 bp, Unknown
  gut microbiota DNA sequence
taatatggaatggtttaatgtttttgggctgatttttattgcagtcattatgatacccaatgttgtatttgcgattaagtgcaaagatggatttgataataagtggaacaataaatatgttgaggtcacagaacaagtagggagattgggttgtttcggattcatgataatcaatattccgggaact

SEQ ID NO: 12744 - DNA, 213 bp, Unknown
  gut microbiota DNA sequence
cgccttcgccactggtgttcctcctaatatctacgcatttcaccgctacactaggaattccgcttacccctccggcactcaagtatgacagtttccaatgcagtccacaggttgagcccatgcctttcacatcagacttgccacaccgtctacgctccctttacacccagtaaatccggataacgcttgccccctacgtattaccgcggctgc

SEQ ID NO: 12745 - DNA, 16713 bp, Unknown
  gut microbiota DNA sequence
ttctaacaattccaaatcatatgattttaaaatcttagttataaccttttcattaaaatcattcaaaaaaagaattcctatctcacttctcattttggctacatcttcaataatctcatatgtttgtgtttcccttaagctgaaatcatattcatcctgaccaatttttttattaaatcaacaaaagcgttaaccgcaaatgaatagtgctgtgttgaaacgcaaaatttcttcttgccaccattgtcgctcttatatttatcctctaaaatagcagcctgctctaacacctgtcttgcatatcccaagaaatcttccccttcctttgaaatgctgattcccttgttagttctgttgaatattataatattcatctccttctccaattcatgtatagcattggtaaggcttggctgagaaatgtacagcttactggttgcctctgttatagttcctgtttctgctaatgttattgtatattttaattgttgtaatgtcatatttaatttcctctatttgcatacaattatttgtacggtaacattttttgtaatacatataaatatgttttttaactgatttgttttcataatatgtatctgttataatactcatcagttaaattatattagtcacttaagcttttcactaaaaacttaatattaaattaaaaacttaaacttgtacaaaaatcttaaaatatacaaacttttacagaaatcttaaaatatataaacttttacagaaatcttaaaatatataaatttttacaaaaaatttaataatatatttaaagtttaaatttatactaaatacttaaaggaggactttttcaatgtctttattaattactgttctggtaactttttttgctggtatgggggcaggtcttggtaccggatttgccggtatgagtgcagcagctgttattagccctatgcttattacttttcttgatatggatccctatatggctgtgggtattgcactttcttcagatgttcttgccagcgccatttccgcttatacatatggaaaaaataagaatcttgatattaagaacggaatcattatgatgattagtgttcttgcatttacagttgttggaagctatgtttcaagtcttgtaccttcaactacaatggggggattttcagtttttatgactttcattcttggaattaagtttattgtaagacctgttatgactactaaagaagctatggctggtgtttctgccaaaaagcgtgcactacagtcagttatatgtggtgtcttaattggatttatatgtggcttcattggtgccggtggtggcatgatgatgttacttattcttacatcagttcttggatatgaattaaaaactgcagttggtacaagtgtatttattatggccttcactgcatttaccggtgctgcatctcattttgccattggtggaattcctgatgtaaaggtttggattctgtgtattttattcacattaatctgggcaagaattgccgctgtctttgcaaacaaggccactccgaaaacactaaatcgtgcaacaggtattatacttgttgtgcttggaattgtagtaatgggattctctttttttagttaagttctaatattatttcatgcccccgtatttatcgggggcataccttatactcctgaaatttcatttgggtaggatttttttaattcataaaaataactaatgccccaaaacgcaacaaagcggctgcattaataacaatgattatttttgcagccgccttttttatatttagtttttcatactttgtatttccactctcataaactatggttctctctattttatactataaactgtataaactatcttacaatccgcctttggatttttttcacccgaatttaatccatccgaatccaagtctgaaatttttccaatcttaggtgttacctttattttctttgtttctttagttttgtctttataggttactgtacagctaatctcaacgttcttgtataactgttcatatactgctttttcatcttccaaatttccattaaaagcatctagttttgctattatagccttttgttcctttgatagatatttagaatcgtaagctattccaatgtatgtttgtgcatctttctgtttatcataatcaaccgtaagcgatgtgtactgagatttagtgtaatcttcttcctttgtatttttatcatcacaacctgctattgaaccaggcacattaagaagttttgatgttttctttccttcctttacaatactatttccttcaggatttgttatttgaaaaaccgcatcttttatgtcataagtaattttgtcaatgttcttacccttacatgttaccggaaattctatgctataactaacctgaccattttcttcgctgccacacattgctccggaaaatccgtttgtgtcatctattgatgaatcaccttttgtcaatgtttgtgcgtttaccctaatagaaaaaccatactggctatttgttgtagcctgattatttccaagctggctaataccaacaacaagtgccatgcatgctgcaacagcaactgccggtttaataaaattaatttttcttctcatattattttttctgaataactgcttcatctcttcctttttattctgttcaagatgaattttgtccagtgcacttttataatcgctattcatattcaacctccattatctcttttaatttttttcgagctcttgtaagttttgaattaattgtgttttgtttttgttttaggatttttgcaatttcctttattttatatccttcataataatacaaataaaggacatttcgctcatcctcctttagcaattgaagctcttcgagaatttctccttctttttgttcaaaaggaatttccatattctcaattggtaccgtgctcttctttgttaaagatttcttatagtccagacattgattaatagttactctgatcagccaggatttaatatgctcttcatctttaaaaataactcttttagtcaatagctttacaaaaacctcctgcacaatatcttcagcgtcatatttattaaacaaatattgatatgctattctaaaaatcatgtcagaatagttttctactatctcgttatatcgttgttctgtttgaatgtttagcatcttaactcctttcattaactaacacgatttagaatagtattttagtgcatttaagttttaatttttttctttttgtattttcaagatatttccggggaggctaagcatgatttctacctcatagtagtgctattctcataataatctcattctattaatctatatattccctcttcatctgacataattgctgtttcatagaatttctttacagattttatcatatactctgtatcctttacccctgcagtttcataaggtgaatgcattgcaagctgtgcaagtcctatatctaccgtgttaagtgaaacatgactgtttgaaatattaccaagtgttgagccacccggaatatctgaacggttaacatatgactgaacttctactcctgctttcttgcatatttctttaaatattgatgccgatattgcatctgttgtgtatttttgatttgcattatattttataacaattcctttgttcatatatggtcggttagtagggtctgctttttccttataattaggatgaactgcatgagcattgtctgctgaaagcataaatgatgatgcgcacgctcttataaaatcctcactgtcttttcccatacacattgaaattcttgaaagtacatcataaagaaatgacgaatctgctccctgctttgttgtacttcctacctcttcattgtcaaaaatagcacatacattaacacttttgctattttccttattatctgttaaagctttaatacaactaaaagcacacattacatcatccagtcttggagctgacataaattcattatctgcaccccaaattttgcctacttctctgttatataaaaacaaatctgcactaacaatagaatccgcatccgtgcctgcttccattgcaattattttctcaaacttatcttttgaagtaatctcaccaaatagcggaatcatatctttctgtgggttatatttaattccattattaacatccctattcatatgaattgcaagattaggtattacacacaagtccctgtccacatttacaagaacaggtttaagaccactatcctctcttacaataacacgtcctgctacagacaacggtctgtcaaaccaaggtgccataagcattccgccatacttttctacatttaatgttacgtaattattgtcttcaaccatttcaggattttcttttattttaaatgcaggcgaatcgctatgtgctgctgctatttgaaaattgtaaaaatccatattatcaggcacttgaaaagcaattattgatgaatcatttcttgtaacataatactttccaccctgttcaatcttccatttatttctctcgtttaattttataaatcctgccttctccagcattgttgaaaaattcttaacaacgtgaaaagctgtaggactttccttaataaaatccattaattcttttgatatatctatttgattatccaacaacataatccctcctaaactgattttaaaaacttcctataaaaaatataccctactccacttgttattgcttccgtcactggaaatgttagccagaatacatttaatccaaatcagcttcattgtagtattacatttttttaatgtcaacgaaaaaaaggcaactccaaaattaatttgaaattgcctaattttataatgtttaattaacttaaatatcttatataaatttttgaatcttgcttattaacacatcaagaaaacctgttgactgtaagaacagaatcaccattattacaggcataatataacgaatcataacattgtacaatttcttacgtgaaaacttcttgccatttagttccatttcttctacaatccatgaaggcttgattatccaaccaataagaattgctgacaacaatgaaataaaaggcataaggaagctgttactaatgtaatccataatatccaaaagctgacctgtgcttccgtttggaagttttacttccacatagaaaatactgtaacctaaagctataactgctgttgcaattaaataaataatagataaaacgcctgttgttttctttctctctgtatggaaaagttccatacagttagcagcaattgattccagtactgaaatacaggaagttaatgctgcaaaacctgccaataagaagaacaataaacctactattctacctgccattcccattctgaaaaatacatttggaagtgacacaaacataagtcccggacctgctgacattccatcaagtcctgagaaaacaaatacggcaggaataatcatcataccggctaagaaagccactcctgtatccataatttcaatctgtgatactgctttattaagattaacatccttttttacataagaaccatatgtaatcataattcccattgaaacgcttaatgagaagaataactgactcattgcatctaatgaaacctgaaggaatttctgaactgtaattcctgacatatcaggtgtcaaataaactttcaatccctgaagacctgttctaactgttccgtcatctaatgttgtctttagagttaatgagaaaatagcaattccaactaccataaccaaaagaaccggcatgataaactttgaaactctctctattcccttttctacgccgttatatacaataattgctgttaaaagcataaatacaataccgtaccaaactgatgaaggtgatgtaataaagttagtaaagcaattgtctgcaactgcttcctttcctgaacctaaaatataaatagtaatatattttaaaatccaaccacctattaccgcataataagtcataataataaccggcacaataaaagtaatcacacctaaaaacttccatttttttctcattgattcatatgcataaatggcactttttcctgtttttcgtccaatggcaatatctgttgttaacaatgtaaaacctactgttaaaacaagtaccagatagataataaggaaaagtccgcctccatcctttgctgcaagatatgggaatctccaaagatttcctacacctacggcacttcctgctgcagcaagaacgaatcctatctgcccgctaaatccacttttttgtttcataatttttctacctcttaaattttttattttctacttttttatatttaaaatattaagccagtgaagttaaattgtaccatatttaaggccttttaacaacattacataaagtttaatatttgttaatttttttaataaagaaaaaaatcctgacaagttttctttttcacagcttaacctgtcaggatatttttaataaatttatttattttttatttaatttttttatttgacataatatactctgttttcttttctcggtgctgcctttggttcatcaccttcaacataacctaatgcgcaatgaccgataccaacatattcttcttcaatgcctaatgatttaagaagttctttgccccattctgtttcaaattcttcttttgcacggtgaatccaacaacttccaattcctaaatcgtgagctgccaacataagatttcccattacaagacttccatcataaattcctgtaggccaatccttctttgccaaaactattagcattgcaggtgctccatagaacggatcaaaaccttcttcccaaccacctattttgcaattcatttcagagattttgtcacgtaattccttatttgtaacctgaataattatagtgttttgagtcccttttccacttgcagcataaagaccggcttcgattattttgtcaataatctcctgtggcaccatatctgccttatacttacgaatacttcttctttcttccattgcctttaaaacatcgctcattctttgttcctcctttaaatttgattccatatttctcattttagcacatatttttcaagaaaaatttcaaaatcaacatctgaattagatttcatatggtcaggatttctgtttttggaagtgaaatttctccaagctgtaatgtgtatctaatgcaaaactgtggaactgaaacaacaatagcttttaattttttgtaacttttttatgttttgtcttaatttttgtaacttatctttttatttttaatgttcttaaatattctttttgctctggtgtaattctatagctttctattgatttttgaattgccttattgtgtgtccacacatcaagttttttctcttcaatgaaaggaataatgctgtcatattgctttgccaaagctgttgcaaaataccatgcgcgcatcatattaacgtaatattcttctgactgaactcctgcaactttattagcatattcaattttaaaattgtcatccaaatagtgtttcataagcatactaattccaaaacggattgtgtatggctggtctgattttatgtatttgttaatttttccaaggaagtcttccaaattcttctctacaattcgaagtgacagcaaatcacacgtagcccagttgtctatatgtggaagaaacttctccaactctattattaattcatcataatctttaatctgttcaagcaacattccatggagattattttcttcataatatttgtggggaagcacctttatgaactcctttgcttcttctgtttttccaaactgctttgcgtaacttctaagtgccggagttctgacacctataaccttctctttgtctatcgttggcattaatttggcgtgaaaatctctatatttcaagtcctgtaattcaaaaagctgtttttgtactttaactgctatatcttctttcataatctgctcctaatactttttatcttacaaatattatagcattgtttttttgtgtggtatattattttcaatgttttgtttgaaatgtaatgaatatatttgaagatttctcttcactttttctgtaattcttaaaaagaagcttctctaggcagaacagcccacaccaaagctttcgctttagcgtgggctgttcctttatcattatttacagatagccaatttatttcttcacctttacagtcttgactgccgaccattttccataaacatactttccgtttacaattctgtaagctctaatttttacgtatgcttttttctttttaatgttggtaatcttctttgttgtgtatgttgtttttgttgtctttactgttactgcctgctgttttttctttttcttgtttttcaattttttgttgtttccatatttaatccggaagcctgtaactccggcagtctttgttaatgtaagtttgattttcttaccctttgcattttttgctgttttaatttttacagtacctacaggtggattttgtggtgacttaatagcattctttaatgctgttgctgcactgtttactgttgcctgtgaaggattatactgtgatgcaactgttgctgcctgactatatgcagcatttacattaggatatactgtccaatagtctttgttgctatttacatcacctgctactctaagtaattctgtcttgtctgccaaattgatttttgaaacacctgttgcctggtaagtatcaattcctacatcagcaccataaccaaataaagtaaacattactctgattacatcaccattctttactgttactttatctcctgactggtagatgtttcttactgttgggtttgtgctgtccttgccgtcttctctgttaaatgtcttaccactatatactgcactgttatttacagtaaatacccaacctgacattctccagtaatcaccttctccaagagctgtatctgaattaccaagattcttgtttgtatttggtgcactaatgccttttccttcgtgaagtaatccatcatcctgaccaatatatgaataagtatatacatcctgcatattggcaatttcattaggtatgtttgccactctgctattgtctgcaccaagaattgatgttaaataccaaccacttgttgttgaataataatagtttaatgtattatcattcatatatctgtcgattactgttttaaccgtgtctccattgttaattgtcacctgaacaggttcagtataaagtccctgacctattgataatttttcgacagtaagtgtaactttacctgttgaagctgcttttgtttccttaggcattacaacaattgatgttgccataagagctacacttaatactactgataatgcttttttcatttcaaacttttctccttacatttttgactaatcctaactttatttttcaataaaattagctttgtaaatattttattttaaaacctatatatgtatatagtcatttatttaactttcctacattttaactttcttaatttttgaataagctccataaacattagtttcttcatctaacttataagctcgaattttaaaactatatttatttcccttctttaagctaataacagcttttactttttttgctttcttaactgtctttacggctttgaatttaccggaattagttttcatatatactacataacctgctgcatctgaaatcttcttccatttaagtgtaaccttctttccctttttctttgctgacttaatttttacttttgcaggcttagttactacaggtttagatacatttacagtacatgttgcaactaccttaccatctgctgaaactgcggatatataagttgttccggctacatcagctgcaacatttcctgactggtcaactgtggcaattgattcattagctgaaatccatttaatgtttttattacttgcatttgaaggatttactgttgcatctaacttaaaagttccacccggattaagatttatttcattactattaagtgtaatgtttgtaacaggagtttccacttcgatgaaaaattctgtttttaatctattatgagttgttgctgttataattgtacttccactattctttgatgttacaacaccatttgaatctactgtggctactgaattattactgcttgtccactgaacattcttatttgttgtatcacttggagtaattttaacctgtaattgacgagtctggtttagccccatagttactgttttatctccaactctttcaatacctcttgcatcgattccatcgacacgaacagtacatttagcttcaaaaccaccttcttcagttgtgataactatatctgcatttccttcggaaacacctgttacaacaccatttgcatctactgtggctactttttcatttaaactcttaaaagtaacattagtatttgttgcattgcctggaagtacagaatatctaatctttccacttccacctacaaacaaacccatatgcttatagtcatttgccacttcaatacctgtaacaggttcaggtattattaccgcttctgactcttcgcttatagaattactgtaaagatttgcatttgcatcatttttatctactactgctgttactgtataaacatatttacctgaaagcaaatctttgtcttcgaactctgtatctgaaccttcgtatactttgccaacaaatcctgttattttgttatatcttgataatatgtatgatgacgcatgggctactctgctccaattaactctaatattattatcacttttaactgctgttaccgttgacttgtcaagttctcttgaaacatttactatacattccttattaacattaggattatcctttgacgcaattgttataattgctgttccaactgattttcctgtaactacaccatttttaacttctgccactgcttcattagatgaactccatacaatatctgtctgacttgtgttaaaaggtgaaagcttgtactcaagctcaactttgttgtcttcttccttatctaaattaagctttttgctggtgtaatttaaattaatactctctacaggaacattagtctggtcatatacctgtatctcataaatttcaaaacagtatgcaccaaaagtaataccctgtaatcttaaatgtgatgttgttactgcttcttttaatcgaatatttctatattctgatgctataccactggttacttcgtacatgtctgtccatgtttcaccgtcatctgaagtctgtaatttgtaacctttcatatagccaccgccccatttaacttttactgtatcaaaagtctgtgggctgttccaacttaaagttatgttttcatcagctttttcttcatcagttactgttggatcctgaatgtactctgttctccacatagtgccttcatcgccgtcaattgctttttctgcactgttttcaccatcatcacttgatgctactgctgtggcattttttgcaagattaggcatttctttttcttcaacgcttcctactgtaaaaatctgccattcgtacatacaataaccgtatatttccattgttctttcttctaattcgatttttacatatcttgcattagttggtgcaaaatcatatttaaatcttcctttttctcctgcttcttctgatgcaacttccatccaatctgttttgttttcagaaacataaattttatatttctttgctgctgcattttcccaatatagtacaatcttatcaatttcataacttcttcctaaatctatactccaggtttgagggtcttcataaggattgtctttattcgaacttacacatgctgtctggtatcctctttcaagatttccatctgttaaaaagtctggtttattatactcattggtattgaaagaattagaaacattaaccgttctgttataagctacatttctacctaatggttgaccttcgtaagcaaacgcaggagtatataatgtggcaaccattgtggcaacacttaataaacacgctactaattttttcatttttcctccttttccaggcactataatttattaaaggctgtctctttgcagaacataagagttacctcctatgcccaccctcaaaaagacagcctttatacctgcttattttttgatgcaataaattactatattaagctattttattaccttctgattatttaatcttaagttttttcttaaataccttaacagcttttttgttacctttaagtttagtcttcttagacttaatattgctcttaaccttcttgctgaatgcgttcttctttacagtcttaagctttttgcccttgaatgtaatctttttaatcttgttgtcctttgtgaatgccttagccttaatagtcttaactgacttgccgattactactgtcttaatctttgtacatttcttgaatgcattctttccaatagtagttaccttgctgccaattgtaagctttttaagtgccttacatcctgcaaaagcattatttccgattgttgttacattcttgaaattaatcttgtttaacttcttacaattactaaatgcagccttaccaataaccttaacattggcaccaaatgtaactttcttaagcttcctcattgccttaaatgcattgtcacctacttctgttacatttaatccatatcccttaaagttagctgtgtttggaactgtaaccttagttagtttgctcttcttagctgctactacaccgataagttttgttctacctgatgtaattgaatcaattgctgttactctgtaaatgaaatcacctactgtatattccattccaacgtaaacaccatactgcgtacgaacctgatcatctaatgatgtctggtcaccctttggtgtttcaggataactagtttttgaagctgcctgaatcttattccattcatctgtgcaattcttgattttttcgtcaaaatacttatcgtcagtatcatctgaacctaaagtctttgaattatcaactgtaggctgttcttttacgatagtcttatcagctattgcatcatcacttggctgtttaacattttcatccttattagccacaattaaaccagtacttggatctgttggatatgcatcctttccatctcctccgtcctttgaatagtcatagctatcaggtaatgatactgatgttttgttacggtagcataataatctctggatagcataaccaccctttttacctgatactgtctgtgaagtttcacctgttgtaataccacaacctgtaccattaataattctgttaatacctacctttggtccgctaccgttggcgatttctacaatacatgcattttcaattaatacatcatctgcattaggaacttcaatggcattatctaagaaaatttctgctccgttagtgttaatgaatacatcgtaaacaccaagacctattgcgtagtggtgtttaacatcatttgctactttgtatgctgaatatcccttaactgtattattatgtgacatccattctttctgatcctgtggatcataacatttttcattctgtaagaagaatgtcttaccatattcacctctccagataacatcgtatttctggaaatgttcaataaataaaccataagctgttacgttatcgccatttacaacaagaccgtgatctgctgtattttcataccaacctgtgttatcaccgtggtctgctctccaaatccatgtttcatcaataatagtattgttactgttaacaactatacatgaacctgttgttccaaggtcgcctgttccacctaccctacagataacatcctgtaatacacaagggttgtttgaatggtcaacatttgctccttcatatcctacttctaataatgtgtttgtatgttttccggcatctaaaattacgcctgcgatttcaacaccaccgatatcgtaattttcttctacctttgtataatcactattccacttcttaccagctactctgataaatgtatcagtattcttatcagatgaagtaaatgtagccataccaagaccaagaactattgtattttcatgtgttacttcaatagctttgtctaatttgtaaataccaggctgaagaagaaggttataaccttttcctaaagctgcattaattgtgtctgctgtatctacatcagggttagcaatatagaaactgtctaatcctaacgatttgcctttacccatatcattttctgaccatgaaacgcctgtcgtatcttttcttactgcaggtacaaataccttgtagctatctgtatcttcatcgaagtataagaatggtttttctcttgttgcatctgtcttgtctaatactgttgtacatccattagttgcccagtttgaaataccattattctgtaataagcttccacctgcgttaaagtagttaccactgttatcctttaatgttgttccatcaacattcttacatccctgaacaacctggttccagttaataccatatatagagccattttctgtctgctttgttgtaaattcacagtttctgtagtaatactgctgctgacaccatgaacctactgaatcatggaactttgtatcagaaatatatccgccgctggcccaagcattgtctccccatgtccactgaagtaatgtctgtctttctacattaagtcttcttgcaggagctgcctgtgatactgcccacttaaatgaatcttcccaatagttaggattttctgttgtctgtgcaatagtaaagttttcaacgtcaacccagaagttacatgttacgttaccattagctaaagctgctggtgttttaatattctttaatcttacatcgtaaggtgtttttcctaaaccaataacctgtgtgtagtaacctacatcatacgcatctgctactgtttctgtataatcaccaggtttaaaagcgaatgcgtaacggttcttaccaaactgatcataatgctgatatccaaagatttcatttaccttatcagaaattgcatccttgtcatctgcatcgttaaatacgtatacattcttaccaaacttagaaatttccaatgaatatggttctgattcttctccattaacattaccgttaactgcctgaactttataatagttcttgtattttgatgttgtgtttggatttgtatctgtataacttgtttttgctccgtctattgaatcaattaatttgtattctgcataacggccttctgccctgtaaatattatatgacttagcatttgctgccttattccatataatagtctgagcgcctgtcttgtcatttctcgtaacatctgttatttcagctttagccggtttagtctgagataatgttgttgtaaatgcaatttcactatctgcatatgcactgtatgaacctgcttccttagtattagtaattgttctaatcttaaagaagtattgcttttctgataaaagattatttacagtcatcttattctttattgttaaacctgctgatctgtaatttccattttctgaagttgaatacataacttcaaatgctgaataaatatgttcctttggtgttgtccatgaaacctgaacgctatcacctgaaacatcagataatgttacttttcttgctttctttggttcatcacctgtatacataatgaacttttcttcattgccaaccttgtctcctaagtgatactttgaacttaccgcaagctttgtatgttctgttccttcttcatctttgtactttcctaatgtgaatattttttcatctgcactgctaccaaaagaaactgttccatcatcattgtgctggattcttactgattcccatcctgttggtgcgtaatcatttgctactgttctagcgtcctgataaataatatcatcagcatttgctgcccaaactgtatttcttgacttagtagcgaagttaactacttcgttagccttgtcatcaattccattattcttgtatgttccataatatgtagtgaattttccatcgtcacttacattgttgatagatgtaaatttcttatctaccaagattggatcattctttacaccactaacagtaattatgtttccgtttgccacattaacaaagaaaacttctgcgtggattgttgtctcttcggcaccgtcaattgcatctgtgcttgttgctgctgatgctgccattacagtcatattaaatgtctgtgatgtaaataacattgcaactgccaaaacaattgacaataaagatttatacatctttttcatcttcatttttcttcctcctaaataaattcaaacaataaaaacactattctcttttttgtgtaaggttgacattaaaacgtttttattttcttatattttagcacttattgatatattttttcaaattcgaaaatgtttttaagcactctacacaaatagtctctttgttttttttgcactttgcatatatattttattgttttttttattgtttttcttgttttttattaatttgcattttttgtcgcaaaaacgtttttattggtttttgtttaaaaacgtcttttctttttactaataatcctgttttattttactaataatggtattttctttcactaaactctctctttttcgccacttttaagcaaaaaagaacagccggatttaattcaaaaatcaatctgact

SEQ ID NO: 12746 - DNA, 664 bp, Unknown
  gut microbiota DNA sequence
taatgctaatattccatttgtggcaattacttcttaaatttaacttttcggttagaccacttaccataataaacttctccatttactactttgtaagccctgaccctgataaagtacttcttgttagcctttaatttcttaattgtaaatttggctttcttatagttctttacctttgcttttttaaatttctttgatgttgatatcattacctgatatccttttacaccctttgctgtttttaatgtaacttttaatttcttagcacttctcttcttagttgcctttttaattttaacctttggtacctttacggtttgtgcagtttttgtagttacaatttctgttgtggaaactgtaggtgtttcctttgttgtttcagttttagttgtcgttcctgtttctgacggagcaattgttgtaggtgtctgtgttgttggcgctactgttgtagccttttctgttggtgcctgtgttgttggcactactgtcgtagctttttctgttggtgctactgttgttggtgcctgtgttgttggcactgctgttgtagctttttctgtcggtgctactgttgttggtgcctgtgttgttggcactgctgttgtagctttttctgttggtgctactgttgttggtgtctgtgtcgttggcactgctgttg

SEQ ID NO: 12747 - DNA, 2548 bp, Unknown
  gut microbiota DNA sequence
agcagatgaggataaacaatatgttaaaacgaggcatgaatatggaggaaattcaaaaagcgttgaagtcctattcgtaaataactatatcaatccttccgggcagccttagggctgcccctgtttttctctggtcaccttatcacttccacgattagtcagagttcctgccagtaccaccgttcctggcaccagcaccatgatatatatgattccaagcccaaatctgaggaacttgccaaggcttcggcttatttcttctattatatatgggcaccctgtatttatccaccagtacaaaggaattaatgcaaaaataccgataaacaaccttagcttttgcgaaattctgtcaaaatctaattgtcttttttccagtatcctgcagatgacaaaggatgcaataaatccgactccttcatatgcatctccccgcattttagcaggatcaaccagaagtgatccatccggcagataatcaagtggatatggtttgtattcatagtacagcacagcagcaatacagatcaaaagccctgccacaagaatcatgaggtctctttttttgtctttttcactccacaattccaaccacccggtcagatacatcataactgctgttgatataaatcccaccagaacatcctgcggagtatgcactcccagataatttcgtgaaaacatagtcagaaataccagcacaaacaacagacctgcaacgacactgtgctttttttccatgaaccaaagtccacttccaccgaacatagccgttgcccgcgttgtatgcccacttggaaatgaatatccggtagctgctgttttagaatcaccatagggtaaaatccgtgtatcccgtatccatgggcgatagacacagaaagtaagctttaaaaatccgttgataaacagaccgcccccaagtcctgccaggatttttcgtcccgccttccggtcaaatgcccagtaaatcatacacatcattgcaataggtaaaaatcctgcggacagctttgttactgcattcataagcggtgtcagaatactgccaaccgtttcgcgaaattgttgcaggtacaataaatactcaatatccatagctttcctctttctgctgttctttcaagcgaaaataaagctgtgactgtgttaaatactgatatggtccggcaaagaatatattaaccaacccgaatgttataattcccagaaggctccatcctataaaagacagatctaatacaaatgcagcccacttatttcccttcatcatctgacggctcttttcaaaagcttcttttcgattcatctgtggattctctgccaacaaaaacggaatcatcatatactcatactgttttataattcccggaattataaacaaaagactccataagcttacaaacaatgtccgcaaaaacataatccagccaacattctttccatctctcctgttgatcaccgaccagatacatctcgtctccgctgttccgtattcacattgaataaacagctttttacatcccacctccagaggattccaaatcaaaatcgtcataataaagttaacaagcaacgcaactgccacaattccaagtgcaattcctaaaacaaggccaaaatcatcagtttctactgcgcctatcacttcatcaaaacttccggaagaagacctttctactaccgagaccactcctgaacctccaatcagggataatataactcctgccagaactgctttccaataatttatctttaaaagctgtttggcacactctttcaattctctccttgtccacatatacaattccctcctcttcaaactacccatatgcaaatatctcatatctgaaatatgtcatccggctttcataatctattacaatgcattatccccagtcagttcaggcagagtctctgtagcctgaacgcctattccccctgtttttccataatcattcgcaacttctccagagcacgtttctgtatcatccttacatttcccggtgataaattcatctgcctgccaagctctgtggaacttttctgataataaaatcttcccagaagaatttcccgttctctgtcagaaagctgctccagactttttcttaatgtctcttctctcataatctttgccacaatctcttccggcattttttcccggggaattgtctgctgcttcaggatttccagagaataatgagtctttttatccctataatagtttttcaggcggtttgctgtgattgcatacaaccaggtagctatactacctttttcttcatcataactgtccatatttctgtaaaaagacagaaatacatctccagtcagttcttccgcttcatacagatcaggaactcttttatgtataaatgtcaaaattttcagataatattcctgataaatacgctcaaactcctcatacttcatcctccgcctcttcataagactcaatctctgcatagagatgtgtgtcttctttcacatcttcctctggctcgtacagttctttacactccttatctgtatacataatgtaata

SEQ ID NO: 12748 - DNA, 1220 bp, Unknown
  gut microbiota DNA sequence
agagacctcgtaagctgatttttgcaaaggttcctagaaatcctactggaaagattgaaaagccaaagcttcgtgagaagtatggtgcagcacatctggtcgcagcgcagaatcaggtagagattaaataataaagagtgatttactagaaatataaaagttcagggagggtttgactcggtacaagtcaaaccctccctattttggaattgtctattttccagcagttatatactgcaagtgatttatttgtgttctttttgatattccagagatgcttcaataaatccacggaacaatgggtgtggtctgtttggacgggattttaattctggatgagcctgggtcgcgatgaaccaaggatgatctggaatctctaccatctctacaatacgtccatccggagaaagtccggataatagcataccattttgagtcagtacatcgcggtaatcattatttacctcataacgatgacggtggcgttcctgaatttcttcagatccgtacagcttatatgctttggagtctttatttaaaacacatgggtaagagccaagtcttaatgttccaccgatattttctacatcaatttgttctggcatgatatgaatgaccggatgtgtagtatctggatctaattcagcgctgtgagcatcattgtatccaatgacgtctcttgcaaattcaacgatggataactgcattccaaggcagagccccaggaatggaatattgtgtgtgcgagcatatttgatcgcttcaagcataccgtcaattccacgattgccaaaaccacctggaacaagaataccactgacatcgccaagaatttcatcaacattatctgtagttaccagttcagaatctacccacttgatattgacagtagcgcggctgaaaattccaccatgtttgagtgcttctacaacactgatataagcatcatgaagctgtgtgtattttccgacaagtgcgacggttacttctgtgtttggatttcgcagatagttcaccatttctttccagtcttttaaatctggttccggacaatttaagtgcaagcattcgcatactacctgggccagatgttcttcttccattgcaagtggagcttcatataaatattcaacgtccagattctgcaatacgtgatttgcaggaacattacaaaacagagcaagtttatctttaattcctgttccaagtggatattcaga

SEQ ID NO: 12749 - DNA, 450 bp, Unknown
  gut microbiota DNA sequence
aaacatcgaagactaattaaaagaatccatacataacggaaagagccgataaaatgagattgtattaatctcattttatcggctctgcgtctttgcgtctggctctgtaatcacagttactttgaactgctttatttcaattaaattttcttgtctgcatttcggacaatagagggggaatttttttaattcagtatcttcccttatctttaatcgtgttttatttccacatacaggacacaatatccacttgtagtttataataactatctcctcctttacactttaattcaaatctttattaaaaaatatttcatcttatttaacaagaaaccatatttatataacaacataaaatacactaagttattttattgaacatatatcgtactttatctatccgactatttggacgacggggctggcaaacaggttcaccggtagtaacat

SEQ ID NO: 12750 - DNA, 323 bp, Unknown
  gut microbiota DNA sequence
actcggctgttaaccgaggggttgtaggttcgagccctactcggggagcttttttgcattaaaaaacaggtgcgaaagacgggaaagaggaaagaaaaaacaggaaaaaaacgaacaaggacagaaataagaaacaaggctccatggtcaagcggttaagacaccgccctttcacggcggtaacaggggttcaaatccccttggagtcatcttgcgagcgagaaaacaaggttttcgagcggcacgcaatcagatttcatacgccgatgtggctcaattggcagagcagctgatttgtaatcagcaggttaacggttcgagtc

SEQ ID NO: 12751 - DNA, 676 bp, Unknown
  gut microbiota DNA sequence
aggcatttattggagcagatgtggatatgaaccgggcaaatgaagtgcgtccggtgttccgaaaactgggaatgattgcagagaaaaccggatgtgccattgtgctgatcggacatctgaataaatcttctgggacgcagagcacgtatcgaggacttggttctattgatattatggcagcagtgcgaagcttgattttcatcgggaaagtaagaaaagatccaaccacaagggtattgattcatgaaaaaagctcgctagcgccaccaggggagacaatggcgtttaaactgggagacgaagatggttttcgatgggtgggagcctatgagatttccgcagatgaattgttagatgggaaagaaggaaaagcaacagaaacaaagctggagagaggggcaaagctgatcagggaactgcttgctgataaaaaagaaatttcaatcagggaattagatgaaaaagcaaaggaacagggaatttctgggaggaccatgcgtgatgtaagaagccggatgaagaatgagttggagtaccaagtaaatgaaaagcaggagaatagtattcgattaaaagaatgatgggtggcagagtcatcgaagcaaatacagatttttatagataccctatctgccacctgccgtctgccggtgcatgaatactttcaagtatcagg

SEQ ID NO: 12752 - DNA, 337 bp, Unknown
  gut microbiota DNA sequence
agcggagaaattccaatcgaacccggagatagctggttctcctcgaaatagctttagggctagcctcaatttagtcttgcggaggtagagcactgaatatcctagggggcgtcaaagcttaccgaagattatcaaactccgaatgccgtaaagatgatgattgggagtcagactgcacgagataagttgggtagtcaaaagggaaacagcccagacctccagctaaggtcccaaagtgagtgttaagtggaaaaggatgtgggatttcgaagacaactaggatgttggctcagaagcagccattcattcaaagagtgcgtaatagctcactagtcga

SEQ ID NO: 12753 - DNA, 4078 bp, Unknown
  gut microbiota DNA sequence
cgatgtccttaaatcatcgcaaaatatttcagggcagccttgatagcatcttctttctctttcgggcattgtggaactcttgcattttctgattttggaagattatagttttctcccacttcaattccacatttgcgttttacctgagaaatatataaacttgaaaccttcaagccaaattctttcagcacataatctttgatttcctgataggttgctttcaactcggcactggtggcatccagctcgcccaggtctaagtcgatctctatcgtgtcatctggtttttgttgggacaaaagaacaaccgtctccacatgcactgttccagggaacatatccactgcgcatactttttcaaccttatacccctgttcctgaagcatttccaaatctcttgcaagacttgttggcttgcaacttatatacaccattctgtccacgccaaaatttattatcttctgtaatgctttaggatttattccatcacggggagggtctaaaactattaaatccggcttgtcatgaagttcatcgattaccttcaatacgtctcctgcgataaaagtacaattatccaggttgtttaagcttgcattaacctttgcagcttcaacagcttcctctataatttcaaccccaactactttttttgcaacaggcgcaagaatctgggcgattgtgcctgttccgctgtatagatcgaatattaacttgtcctttgtttctccaatatattctcttgcttttgaatacaaaacttccgctccaagtgaattagtctggaaaaatgaaaatactgaaatcttgaactttaagcctaaaagttcttcgtaaacatattcctgtccgtagagaactcttgtctcatcgctttgcacaacatctgccaaaccatcattaataatatgaataactccgcacagcttagctgacaaatcaagtgcctttatttcttccactaaccccataaagtcagcttttttctccatttctgcatctgatgttgtaacaagggcaaccaaaagttcttttgtcttagttgttcttctgactaacaagtgtcttacataaccttcatgacgtaatttatgataaaaaggtaactctttttttgcacagtaatccaaaacacatcttaaaataatattgtaatccctgtctacaatcttgcagttatccactgttacaatgtcgtggaaactgtttttcttatgcattccaagtgccaaaggtccatccttaaactggtcaccaaaagaaaattccatcttatttctgtagccccactgcacaggactgccaagtattccctcaaactggtagtctcctttgattgcattgtcaagaatccccttaaccatgtcttccttaagtttcaactgattctcataactcattgtctggtaagaacagccaccgcaatcaccgaaatgtgggcaattaggttcaacatcttccattggtgatttttcaattatttcctttaatcttccctgagccttgcctgaacgcttttttgaaacaacaaacttaaccttctgtcccggcaatgtgccttttactgatgctattccgtcttcaccacaatccacttcccctttattaggaaaagtaacctttgtaactactcctgtatattcaacaccttttttcatctttgctccttttttacatgcttctttatatataaatgttaataataaaccttaattaaaaaatttcatatactctaaaaacaactttgacccaaacaaagcagtcgccggattctaccaactactactcagcttgggccactttttgttgtttgctttttaatttttattcttcttcaaaatcgtcttcatcttcgtcttcaaagagatcttcgaaatcatcttcaaagtcatcataataatctctgttaacgaatctgtagattgcatatgcggcacctgctactgctgctactgctgcaattactgccaaaacgattgcaacaatcttctttgtttctttcttctcatcgtcttttgttaagatttttccaatctttacgcccttaattaaatcgtccatttctgtcacctcgttttctatctgattgataatagattcaaaatttatacttattggtattataccaaaaatcaaatatatttactacaattttttaagttttgcaaaagatgccatcataactttttgacctgctgtgtcaaactcaactgtaacctgataatctcttggtccatcttcaactccaagaacagttccatcaccgaatttaatatgatgaactctgtcgccaacgccataatcaatgtctgcctttgttacaacaaactgctttccaaagcccggcttagttgacggattgccatatgcaggcttctttgccattgttctataagcgtttttgtgttcatttgcagcaaaatttcttgagccgccgtaagatgaacccatatagcctgagccaccatgatttaacgagccttcatagccgccgaaaccactaaaagatggtttcttttcaaaacctgctgcaactctatccgttacatttttgctgtttacaaggctcattgggatctcttttacaaatcttgaaataatattgtactgagtctcccctcttaccattctacgctttgcgtagcttattgttagatgcttcattgctcttgttattgcaacatagcagagtcttctttcctcttccagttcttccggatcatctgacataatgctcatatatcccgggaataatccgtcttccatcccgcaaagaaaaacattaggaaattcaagtccctttgcactgtgaactgtcattaaaacaacataactgctgtcttcatctaagttatcaatttctgaaaccaaagcaacttcttccaaaaattctgcaagacttggattgtctgtattctcctcgtattcagttacttttgttattaattcatcaatgttttcgattctgccattggcttcatctgtgttttctgctgcaagttctgccacatatcctgtctcgtttaacacttcgttaactaactcttttaaagacatactctgttgctggtctttgaaattctcaattaaatcagtgaattttcttacctttgttgctgctctttcaagccccggaatgttttcaacttcaagcaatgactcatacaaattaaaaccgtaagctcttgcaaaatccttagccttagtaactgtagtcgcaccaatgcctctctttggcacgtttataattctttctacagctatgtcatctgttgcattgcagataattctaaggtatgccaaaacgtctttgatttcttttctctgatagaagttctgtccgccaatgattttgtaaggaatatttctaagcaataatttttcttccaatgctctggattgggcatttgttctgtacaaaatcgcgtaatcactataatctgcccttccaaaatccacattttccttaattgttgaggctaccatatctgcctctgcgtaagcgtcttcagcctgatacaaatctattttttcaccctgttcattgtcactccaaagtgtcttgtcttttctacctttattgttgtgaataacttcatttgccgcatcaagaatagtctttgttgaacggtaattctgctccagcttaactacccttgcattgttaaagtttttctcaaactgaagaatattggaaatatccgcacctctaaatttgtaaattgactggtcatcatcacctactacgcaaaggttctgatacttagaagccagcaatttaataaaagcaaactgagctccgttagtatcctgatactcgtcaaccataatatactttaatctttcctgatagctttccaagacttccggacactgtttaaaaagctgaaccgtcttcattataagatcatcaaaatcaagcgcgttattcttctttaaagcttcctgataattgttgtatatttttgaaatattaagcaatttaaaatctgactgtgccatctgggcaacctcgcctgttgttacaagcttgtttttgaaatcagatatttttccaagaactgcattctccttatac

SEQ ID NO: 12754 - DNA, 6164 bp, Unknown
  gut microbiota DNA sequence
attacgtcctttaaaagtttcttctggtcttctgtatcgtaaatagtaaaatcgttactatatcctattctgtcaatatatcgtcttaaaattcttacgcaggctgagtgaaaagtacttacccaaacctgttccgcaccaaaaccaacaatcttatttacacgctcacgcatttcacctgccgctttgtttgtgaaagttattgccataatattgtatggctgaacgtgtttttcttctattaaatatgcaattctatgagtcagcaccctggtctttccggaccctgcacctgccaatataagcaatggtccttccgtatgataaactgccaactgctgcatatcatttaatgtttcgtatatattattcataaattccatccttaccggtaattataattgtttaatttgttattatgattacgttgattgtaacctgtttccaattttcataatcatttacactgctaaaatattttaacatattccattctaagaataaagacacctttaattttgttttttattatatttgcttgtttcaattttatattccaattcccatattccatgattttatatagatttttttattaatattttatcttgtggtttttattactacgtgttatccttgtagtatcagataataaattatttatggagtaagacaatgcaatcagaagatttaattaaccaggttttagaagaaatagaatcatttaacattgatgatattcctaacatagatttatatatggatcaggtaacaacatatcttaatggaaagtttaatacttccaaaagacatgacgatgacaagcttttgacaaagaccatgattaacaactatgcaaaaagccgcctgttgcctcctcctgaaaaaaagaagtattcaaaagatcacatgattatcttaatcttaatctttttctttaagaatgttatatctataaacgatatccagactattgtaactccacttctaaaggattattacaataatgatgacattcctaattcattagaagatgtaactaacgctttcttaaatcatgttcagaaaagcgaccttattgagcctttgattaaagaatttaaaaattctcagaacatctttggtgacttagaaagctctgaccgtgaatcaattgaaacaattgggctaattgccacattaagctacgatatgtatattagaaaaagacttattgagaagcttattgattctttgcctagttcaaagggtgatactggcaaagataagaaataaattgtagtgttccacgtactttttctgcaccgtacccagacatattcaaatcttctgtttttggggtacgattttattttatgtaaactgattatatcacttattcttgctttaaatacgtttttgtcacatattgatctttattctatgtattatattaaccaatatgtcacttatactatattttcttcaatatttgtaccccgaaaattacacttcctttaattttcggggtacactctattaaaattataattttctccgtgttatgttaaccaaacatattcagaatattcaaattaactgtatgtatttcaaaaaaataaatcatacgcagttaacatgctacttataacaaaatgttgtggttatttcataatccgctattccgatttcctgtagattagtaaacacttcacattctatcttatatgttaatccttcaatcatattataattagtaagacttactcctattcgcactttacttcctggtgctaaacttatcggtggtctcctagaattaagaatttcttttttgcttacataccctttcttctcaccattcttgacaattaaatagtatggatatgccacaaaaatacattggtctgacttattatttaattcaagctttacataatctttattaccttctacaaccttgactgtaacattcttattagtagctttttttaatttctttttcacctgcacatttatagtctttctcttaccatattgatcctttaatgttatctttgccttgccaatctttttagctttaactaatccttttttattaacagttgctactttcttattagtgcttttccattttatttttttcattgacaaattgcataattttgcacttttacccttttcaataacaacagttttaaatcggtttgtatcaatttttacggtttctgcattaacaatatttccctgactgcaaataaataacataatcaccattactatcacaacgcttatttttgtgttcatactccctcctaataaaaagcatatctccagttattataaatatctccatttcctggattataataaaatttatatcccgtatttccatttaattctgaaggaaaaatatgattgactacatatacattttctccattcattggcatattagaatccatataaacataataatatcgctgcaagtctgttctataatagcatccacacaaagctactgcatgagcataattttttgcactgttttcttcattatgtaagaaactacaaaaaaccggtttatggctttccattaaatacaaaacatctgtaaaagataatttatgttcaacatatttcatagatattgcataatactcccacattctcttttcccactgaatatttccaactggatccgcattgtattttttctttaaatcataatacactttccttgcattacatttaaccgttccgccacgtttataattaataatgctagcccctgttgccgcccaacatattccctgattgttaatttctccattagcaatcaaatctaattttgtcgtgtataacattaacgtattttttgtattctttatagtttcatactttttcttatgcgttcctatatatgaaaaatctgttgtatattcactatcatttatacttgctgtctctatttcatattcatctgaatttaattttacattttttgatatatctgaaaactttcgtttttttaattttctatctgaattattctttcttattgtttttcctgcattttcacctgttactactttcgtttcttttttgctatgtaaacttaatccattgccatttgattcaacgctaattctctcttctcctatatcattaaaaaaattttcactatataaaaatgacgttaatttttttccttcgtattctgtaacatttattgctcctatctcttcatctgctactttcacaaaaaatatagaacttttgttttttgaattttccacattaaaagactgacttatttctactttatcattcttttgacagtccactcctgataaataacctcctaactcctcaatcgcaacacttttatcattcttctgaacttgtccagcatttacgtttttcatatttgccattagcaaaacgcttaatatagcaaacataataaattttttcttactttttttcatatctttcctcctactctctttcttttccatattggatttctcattttcattatagcatacttaatttttaaaaaagtggaatattctcttatttagtggaatattattgaaattttgcctaaagaaaaaggtacgaaatctctatctcgtacctttactttttattcatctttctttaatactctttcaagtaccatatcatacccgtcatttccataattaagtgaacggttgactctgcttattgtcgctgttgatgcacctgtggcattagatatgtcaagataagtctttccttctcttaacatcttggctacttcatatctctgtgaaatagaaagcaactcgtttactgtacaaacatcttcaaaaaatgtatagcactcttccttattctctaatgttaatattgcatcaaaaagatgatcaacttctgtatttctaatttttttactcatttcaacctcctgagagatacctttacttactttaagattttatcactctaaagtttgaaagtctagtatttttttcttaatgtttttaattcttcaacactaaacttgtatgttgtgttacagaaatcacattttacttcgattgccttgccatcattaattatttcgtctaattctttgttgcttaatcctgcaagtgcctttacaattttttccttgctacatgtacacttaaactgtgtatcgattttgtctgtaaactcaacatccatgtcgcccattacttctttaagaatatcttcaggtgtcatacctttttcaagcatatctgtaactgatgtaattttgctgattctatcctctaatgcctgaattgtttcttcgtctgcaaaaggcattaactgtactataaatccgcctgcctgttttactgtattgtcttttgacataagcaccccaaggcctactgctgaaggaacctgctctgatgttgcaaaataataagtcaaatcttctgcaacttcacttgttccaagtggaacctggcttgaataaggctctttaagtcccatatccttaataactgttaatgttccgtaaccgattgccgcgcctacatctaacttgcctgcatagttggcaggaataagcacgttaggatttccaacatatccctttacgtttccgtgtgaatctgctgtaactgttactccgttaataggtccgtcgcccttcatcataattgtcaaaatatccttgtcgcccttcatcataacgcccatcattgctccacctgtaagcaaacgacctaaagctgctgttgctacaggacttgtattatgatgctgtcttgctgtttcaaccatctctcttgatgtaattgcaaatgctctaatctgactatttgctgctgttgctcttactatatagtccacttattttttcctcctgatttttaatctatatctttttcagtttttatttcgaaacttgatttttctgacattctcttgccacaacatatattctttcgctttcgctattaggttcatttcttgtaaatgcatcataaacagttacgaactcaagtcctgcaagattcaaagcttctttgatttcttcaactgtataagctctctgataatgctcctcactaaatttatcatatctattgtcatcacctttaacaaaaatagaaagcatatattcatttatacaatcttcctcatcaaaataattgtcccaaataaaactgcagtcttctctgtcctcggcaattactgattcgccaatacttctgtataactctattgtttttaaatcaaaaacaaaaattccacctggatcaagataattgttaaccaacttaaaagttgtaactaaatcttcgaattccgtaatataattaatggaatcacaaaggcttaccactgccgctaccgttccatacaaatctagttcacgcatatcctggcacaaatacaatataccgttgttttttcttttttcaattgccatattaagcatttcctgggagtaatccacgccaatcatatcgtagcccttgtctgccaacagttccgtaatattgcccgttccacagcccaaatctaacacaataccataattgacaccatattcttttaaaatgctaaccaaatattcgcaccatttatcatattcaatattgtccataaacttatcataaacctgtgcaaaacccgtatatgcttccatagtattcctccataatccttaccattctatcagcaaaactttataaacgcaaccattagacttgccaaaaatctcacactacattatactgactatgacaattttaaatatgttaaaattataaaataaaaaacaggtatgaaaggtaaatataacaggtaactttttatgataaatattactggtgaaatccgtaatttatccgccaaaaggctaatcattccaacgataacttttattcttatgattttatcgttaatgatttttcctttttttaaagtgtttaatcccgaacccatatcaaatatatataatgtaagactttctgacaaatacgtaaaagtaactgccaaaaccctacattactcaggttacaatcttataaaatttggcaataagaaatacggatattattatgcactaaatgacaatcaatgtgtttttgtgattcttcctgtaggtagcacacctaaaaaaacattaacaaattacagtttta

SEQ ID NO: 12755 - DNA, 26339 bp, Unknown
  gut microbiota DNA sequence
ccgcaggtccacttattgtgattattcatgattgcaatgacatcaggaggatgaaaccaacaaggttgagagaaatcctgatgaaaacaaatccagcacagcccgtgaggacgggagaaaacaaaccgaaagaatgggatcttagctcagctgggagagcatctgccttacaagcagggggtcacaggttcgagccctgtaggtcccacttgtacaattaaacagtacaatgccggcgtggcggaactggcagacgcgcaggacttaaaatcctgttgtggcaacacagtaccggttcgattccggtcgccggcattaagaaagcatctctaaaagaggtgcttaagtgcgtgtagctcagttggatagagcgtctggctacggaccagaaggtcgtgggttcgaatcctgtcacgcacacttgcccctgattaatatcaggggttatttttttattaataatattaagcttatactagctataagatcttattttctattaaaaataagatttaatttttaaaagaagatttcatttttgttaacaataagatttaattatttttaaatgaataattttgattttattttgcataatacttatgtgacaaataattaatcaggaggcaaatatgtcaaacaattattcaaaatcaaaaaactatgagtcagattattcaaagtcaaagaattgcaaggatagtgcttatgatgaaagtcatttaaaaaacagtaattctaaaacaggtcaggcaaagaataaatcttcagaaaacagttattcaaagaatagttgcaaaaatggctataagaatagttacaaaaatgaagattcagatgaataaaaaaatcatttggttttcgaagaaatttagaaaaattgtatacagttaaataagagggttgtggcatttgcttagttttttatttatttaagaaaacataacaatgctacagctctttttcttacaaaatttgatttgaaaatatttttcagatttataataatatgtataagtataatctttatgatttgtgactttaatctttatgattcgtgactttaatttttatgatttgtgattttaatttttatgatttgtggttttaatttttacgatttggaactttaatctttatgattttaagactttaatatttataatttttattgttaataggaacaatatttttattaataacatatgtaataataaataaaaaattttaataataagtagtaagtataatttaaaaaagtaagtaaaatatgtggtatatatagtgagaattgtgtggaggaaagatgaaaaaatttgatatgatatctcttgaagaggcaggaaaaatggcaattgaagaagattgtattgttgtggatttaaggggacgaaaagattatgatgtttctcatattgaaaatgcaattaatttgccgaatgcatcattaaaagagattgaagagtttgacaagaaagacaaaatatggattttatattgcaagagaggtagtttaagttttaagttagctaatgagatgaacaaagtaggatataaagttaaggcagtagtgggaggttttaaaaaaatatgatataagattaaataaaagtatgatacaagtataaagttgacattgtttttagttactattatcatatctagtatgaatatagatgaaagggatgcagtaatgcatatttaataaataatggataaatttaaaatagttacaccatgtcattttggtgttgaatcagttttgaaaagagagattacagatttaggatatgatattgttcaagttgaagacggaagagttactttcgagggagatgcattggcagtttgtagggcaaatgtttttcttagaacggcagaaagagtaatgattcaagttggaagagttaaggcaactacatatgatcagctttttgaggctgttaaggcattggattggcagaagtttatacctgttgatggaaagttttgggtaaaaaaagcagggacagttaagagtaagcttttcagcccttctgacattcagagaatagttaagaaagctattgttgaaaaattaaaaatggaatatcacgaaagctggtttgctgaggacggagcagagtatcccataagagtatttttctataaagatgaggctattatagcactggatacgtctggagaatcacttcataaaagaggatacagaaagaatacgtctaaagcacccatttctgagactttggcggcggctttaataatgcttactccatggaataaggacagaatacttgttgatcctttctgtggatgtggaacttttcctattgaggcggctatgattgcagcaaatattgcaccgggaatgaatagagaatttaccgctgaaaattggaccaattttattgataaaaaactttggtacaaggctgtaaatgaagcttatgacataatgaatgaagatgttgacactgatattcagggatatgatattgaccctgaaatggttgaatttgcaagaaaaaatgcacagcttgcaggagttgatcatttgattcattttcaggcaagaccagttagcaaattaagtcatagtaaaaagtatggatttattataacaaatcctccatatggcgaaagactagaagaaaagaaggctttagtgcctttgtatactgaaattggaaagagatataaggcgttagacagttggtctgcgtttattattacatcttacgaagatgctgaaagagatatgggaattaaggcaacgaagaaccgtaagatttataacggaatgattaaaacatatttctatcagtttatgggtccaaaaccaccgaaaaagggaaaagtaaatgaaaaataaaaaaatggttattttatgcatcccaataattgttgtggttcttattttggcaggctttactatgatattttcaaaggaaaatattcaaaaaaatgttgacggggtaaaatttgacaaaaaatggaaccgcataatggcaagggaaattaacaaaaataaaataaatttaaaagtagacggaagaactattgaatgcaatgaggaaactccatacatgactaataagatggagcttatgattccgattagcgttataagtgatgcatttaattgtgctaaaaacgtttataacgggaaagaaattcttattgaaaaaggtagtaacaaagctactttatatttgggtaagcagaatattaaatttaatgaaaataattacaaaataagtaatggagcgaagaagataaacgattccatttatgtttcagcaaaggtttttagcaaatatttgaattatagttataagtggaacagcaaaagtaatacggcaagttttacgaatacagcaacgggaaattcatatttgccgaagagatatagttatgttgaaaataataagattggaaaaataaaaaaccagggaaaatacggaacatgttgggcttttgctacacttacggcactggaaacatcacttatgccggaacagaaatttgatttttctgaggacaatatgatttataataatgccctttctgatgatattcaggatggtggcgagtacatacgtgctatggcatatttgatgtcatggaaaggtcctgtgttggagaaagatgatccatatggagatggaaaaacaaataaaaatcttaagtctgtgaaacatgttcaggaagcagagattgttccatataaagattatgaacaaataaaggaaatggtctttaaatatggtggagtcgaaagctcaatgtatatgtcaatgagtgatgcagacggcagttcaatgtattataataaaaaatataatgcttattgctacaagggagataataagcctaatcatgatgttgtaattgttggttgggatgacgatttctcaaaggactattttaacgacaaaactattaaaggcaatggagcttttatttgtgtaaacagttggggagaaagttttggagataagggaattttctatatttcatattatgatgacagaatcggaagcaacaatgtgtgctatacaaaggtagaagacattaataattacgataatatttatcaaagcgatttgtgtggctttaccggaagtatggggtttgaaggcagttcaagtgtttattttgccaatgtttatcagggcaaaaataatgaaaaacttgacgctgtaggattctatgcaacaagtacagatttggaatatgaagtttttatttgtgaaaattttgaaagtcaggagtcattaaataatagaaatcatatggcagcatcaggcacaataaaaaatcagggatattatacaattaatcttgataaggagtataatatctcaaaggaaaagaaatttgccgttatagtgaaggtaagtaaggataaaagtgaaaagttttacaagcttataccagtggaaatggaaagcaaagaaatggccgtaaaaatagacttatcagatggagaagggtattttagctctcaaggatatagctggcagtcggccgagaaacagcaatgtaatatttgtcttaaggcatatactaagaataaataatatgaaagaggtacacaatgaaaaaaataatatttgcaacaactaatcagggaaaagttagagaagtaaaaatgatgatggaagatttcggagttgattttgtaacaatgaaggatgccggaattgatattgatatagtggaagatggaaaaacttttgaagaaaatgccattattaaggcaaaaacaataatggaagctacaggtgaaatagctttggcagatgattcagggttagaagttgattatttggatggcgcacctggaatttattctgcaagatttttaggggaagatacaccttatgatgaaaagaataaatatattatcgaaaaattaaaagatgcaaaaggcaaagaaagaagcgcaagatttgtttgtgctatggcagttgcttttcctaatggtgaaattgaaacatgtaggggaacaattgaaggattaatcggatatgaacaaaaaggaaagaacggatttggatatgatcctatagtttatgtacctgaatacgagatgacaacaggtgaaatggctcctgagttaaaaaacagcattagccatagaggaaaagcgttagagcagatgaaagaaattttgaagagaaaattggatttaaattaagattgggcttttgaaagtacattaaagaaaaaaagactagtgtagttggagactacccaatgaaagagaggggagataacatgagaatattagtaataagcgattcacatggacaacttggaaatttaaatgaaatattaaaagaagcaggcaaggtggatagagttattcatttgggcgatgcagttggacaggatgaggagattcgtgaaatgtgcggttgtcctgttacaattgtaagaggaaattgcgatttttattcaaagaatgagttggttgaaatagttgaagaagaaaatgtaaagatttttgcaactcatggacacagatttaatgttgagtatagtgcaaatgatttgtgtaatgctgcaagagaagaagggtgcagtgttgcgttatacggacatactcatgtgccggatgtttcatattgcaaggatgtacttgttatgaatccgggaagtatttcacgaccaagacaggcttcaggcagaccaacatatggaattgtaacaataggaagcaatggagaagccagagctgacacctatagtctttaaggctttttagccttaaagaaaggctgaaaaagaaaaaataaaaagtttgtaaaaagttgttgacaaaagtacttaacctatggtaaagtaaacaagctgtcgggtgacagtaaagaacttctaaaaaagtaataagacttttgaaaaaagttcaaaaaagaattaaaaagttgttgacaaacaacacagaatagagtatactaattcttgtgctgttacgagagaaataacacagacaacgcaaatacggggtgtggctcagcttggctagagcgcctgatttgggatcaggaggtcgcaggttcgaatcctgtcaccccgacgcatgcgggtgtagttcagtggtagaacaccagccttccaagctggatatgtgggttcgattcccatcacccgcttaacttatgcaattcgcataaggttgtgtgtccgtagctcagctggatagagcaacggccttctaagccgtgggtcgggggttcgaatcccttcgggcacattctggattttaccagagcaagcatggcatggtggctatagcgcagttggttagcgcgccagattgtggctctggaggccgagggttcgaatccctctagccaccttacacaatgggctatcgccaagcggtaaggcacaggactttgactcctgcattcgctggttcgaatccagctagcccagctagggttagcaaataaataactcatataattatgggccactagctcagatggtagagcacttgacttttaatcaagttgtctggggttcgattccccagtggctcactgaaagatgtaagatttttcttacatctttttttttcgtctaaatatggtataatttacgtaagatatttggacgaggagggcacgattatgaaacaaattataatttctgtaggtagagaattcggcagcggaggacatattgtggctcagaaaatagcagagcattatgacattccaatttttaacaaggaattattggaggagatggcaagaaaggaaggatatagtgagaaggcgttggagaaatacgatgaaaagcctgtaaactttggatttatgccattgccatatgcaggcggaaatattccaatagagcaggagattgcaatgaagcagtttgagtttattaagaacaaggctgatgcaggagagtcttttgtaattgttggaagatgtgcagatgagattctagcttacaatcctaatcttgtaagtgtttttataacaggtgaccgtgaaagtaaaatagcaagagttatggacagggaaggcttagacagaaagcaggcaataaacaagatgaagcgaatggacaaaattagaaagacatatcataatttttattgcagaaataaatggggcgattcacgtggatatgacatttgtattaatacaggaaagacagattttgatacagcaaaaaatatggttgtggagtgcgtggataagttgaaagagagaagtgagtaaagagccgggaaaagacgtaaaggtaattgccctatggaagtgagattaaacttctgtggggcagtttttatgtagagagttgttgaaatgaacaaattagattatagagaaaataggaaggcttttagaatggcagggggatggcttgtgattaggtgaaattatataaggctgtgccatgggagagaaaaatacaacaaaaaagccgaatccttaacaagattcgactttttaaaaactactgcgggtgacaggacttgaacctgcacgtcggggacactagaacctaaatctagcgcgtctgccaattccgccacacccgcgtgggcgtctcgaaaacgctaccgtcatatattaccaaaagaccaatataaaatcaagtacttttttaggctattaaaagttcgtttaacttttaatagcctttattgattttgcataataatttactttccaaggcagcagtcaatctggcttagataactgttatgaaaacgtccgtcatgtgtaacatcttttccaaaccattcaggcggattaaagctattggcttcatcaattgaggaaaactcaacttccacaagagtcatatttgtaaacttaccttcgaaaatgtcaagttcagcggtaaggccattgtgaattggaatataatatcgtgtttttgtaatgatgtttccgtcagcttttgttaaaagatgattgtaacttttttcgtttaatggcaaattgtattcttcccgtgccatcattcccccacctttgtatgtgagaaagtattcattatcttgcttcctgattcgaacgacaggagcggtgttaaggtatgcctgttcaatcttgtgatgcttgtactgggcaaggttttcaggcagagtctttggaatgtattttctttcaatttccataagataatcagtcctttcttaaatagcagataatagtttttattatctaaaaagtttattcagttactataataatcattttagagtggttttactgtgattgcaacatacaacttataaataaataaaaaaatttttacaacttggacataatatggacctatgttataattatcattagttttgtaattgtataaggaggcaaaaaatgaagacagtttatgcgtttcttgcagatggaatggaagaagtggaagctttaatggtaattgaccttttaagaagaactaagaagctgaatgtggttacagtttcaattaaggatgagttactggtgaaaagttcacataatattaaattgtatgctgacaaaaatattaatgaaatagactttagtagtggagattgcattttccttccaggtgggatgcctggaactactaatttaggagcatgtgaaaagcttgctgatgagatagtagaatataacaatcagggaaaattacttgcagctatttgtgcggcacctacagtttttagtaatttaggtttgcttaaagataagaatgctacaagctatccttcttttgaggatcagatggaatgtaataactatggcggtggagtagtaagagatggcaatttcataacaggtaaaggacttggcgttgcccttgaaatgggacttgaaattattagttatttagttgatgaagaaacagcaggtgaagtcgcaaaggctatacaatatgatggagtgaaatagttttaagaaaaatagtgacaatataaattattcgtgttataattatttactgcgtcataggggggtactatgccctgacgtacaaagcagagtgaattaaatgggcttaactcagacccgtttgtatattaaggaggaaatattagaatgagtttacaggtagaaaagttagaaaataacacagcaaagcttacaattgaagtaccagctgaagaattagataaggctattcagaaagcttaccagaagaacaagaacaaatttaatgttcctggattcagaaaaggtaaagttccttatgctatgatcgaaaagatgtatggtgcaggcgtattttacgaagaagcagcaaatgacttaattccggaagcttatgctaatgcagcagctgaaagtgaattagaaatcgttgctcgtcctgaaatcagtgttacacagattgaaaaaggcaaaccatttgtttttgaagcagaagtaacattaaagcctgaagttaagcttggcgaatataaaggaatcaaggttgaaaaggcagatacaaaagtaacagctaaagaagttaacgcagaacttgataagattaaagaacagaatgcaagacttgtagcagcagatgataaggctattgaagaaggtgatcaggcaactatcgatttcgaaggtttcgtagatggtgttgcatttgaaggtggaaagggagaagattatccattaacaattggatcacattcatttattgatacatttgaagaccagcttgttggtaagaaggttggagaagaagttgaagttaacgttacattccctgaagaatatcaggcaaaagaacttgcaggaaagccagcaatgttcaaagtaacaattaaggaaatcaaagttaaggaatatccaaaggtagatgatgaatttgctcaggaagtttcagaatttgatacattagctgaatacaaggctgacattaagaaagatcttgtagctaagaagaaggaagctgcagcagcagaaaaagaaagcaaagtaatcgaagaaatcgttaagaattcagaaatggacattcctgaaaagatgatcgaagcacaggctcagcagatggttgaagaatttgctcagaacattgctatgcagggtatttcatttgaccagtatatgcagtttacaggttcaactgtagaacagttattagaacaggttaagccacaggctaaggctagaatcgaatcaagcttagttcttgaagaagtagttaaggctgaaaagattgaagctacagatgaagaattcgaaaaagaattagaagatatggctacaagatatcagatggaaaaagaaaaggttgcagagttattgtcagacgatgataagaagaaccttagaaatgacatttgcttaaaaaaggctgctaagtttgtaacttctaaagcaaaatagttttaagttatattaggaggtattgaatatggcattagtaccttatgtcattgaacagaattcaagaggagaacgttcatacgacatttattcaagattattaaaagacagaattatatttttaggtgaagagattaatgatgcagttgcaagtacagttgtagcacagttgttattccttgaatctgaggatccaggaaaggatatacatatgtatatcaacagccctggaggatcagttacagcaggtatggcaatttatgatacaatgaactatgtaaagtgtgatgtgtcaacaacttgtatcggaatggctgccagcatgggtgcattccttttatcaagcggtgcaaaaggaaaaagatacgcattacctaatgcagaagttatgattcatcagccattaggtggcgctcagggacaggcaactgaaattcagattgcagcagagcacatcttaaagacaaagaagaaattaaatcagattcttgcagataatgcaggaaaaccggttgaggaagtagaaaaagacactgacagagataactggttatcagcagatgaagcaaaggaatatggattaattgacgaagtaattaaggacagataaaataattttccggaagataaggcaccgcatttgtggtgtcttattgtccttttatttaataaaaatcaaagaaatgttttttattaaataattttatataaaaagttaaggggtaattatggcaaatattaataaagaaaagtttagctgttctttttgtggaaagacagaagaccaggtaagaagactgattgccggtcctgatggagcttttatttgtgatgagtgtgttgaaatatgcgcaggaattattgaagaagaagtttatggcgacagaaacaatgtagcagaagaagagattaatttacttaagccaaaggaaattaaagagtttttggatcagtatgttattggtcaggatgctgcaaagaaggtactttcggtagcagtgtataatcattataagagagttttggcaggaaaagatttagatgttgaattacagaaatctaatattttgttattaggacctacaggttcaggcaagacttatcttgcacagacattggcaaaaatcttaaatgtaccttttgcaattgcggatgctacaacattaacagaggcaggatatgtaggtgaagacgttgaaaacattttgttaaaacttattcaggctgctgactatgacattgaaagagcgcagcatggaattatttatattgatgaaattgacaagattactaagaaatctgagaatgtgtctattacaagagacgtttcaggtgaaggcgtacagcaggcattacttaaaatattagaaggaacagaagcaagtgttccacctcagggaggaagaaaacatcctcagcaggaacttattcctattgatacaactaatattttgtttatatgcggtggtgcttttgatggtcttggaaagattattgaacgtagattggataagggttcaattggatttaattctcagattatagagaaaacagacaagagtgaagatgaattatttaaacaggttatgcctgaggatcttactaagtttggtttgattcctgaatttataggtagagttcctgtaactgtttcacttgatttccttgatgaaaaagcattggaaagaattttaacagagccaaagaatgcattaattaaacagtacaagaagttgtttgaattagatggtgtggaacttaagtttacagacgaggcaattaatactattgcaaagaaagcagtagaaagaaaaacaggtgccagaggtcttagagccatacttgaaaatgcagttatggatattatgtacgaaacaccttcagatgaaacaattaaggaatgtattgttaatgaagatgttattaacggacttgcagatcctgaattagtatataattcagtaattggcaagaagaaagctaagaaaaataaagacaagacagcataattaaggagtatacatgtcagaaaatatattaaaacttcctgtaataccacttcgtggattgacagtattaccgggaactaccgttcattttgacattagcagaaagtcatcaattaaggcagctgaaactgccatgttggctggaaagaacttatttgttgttacacaaaaaaacccggtggaagaaacaccgggttttgacggcatatataatattggtacagttgttgtaattaagcagttaaataagcttccggacaatattgtaagagtaatggtagaagccaaatcaaaaggtcagattttggcatttaattttgaagagggctattttcagggaaaaattaatttacttgaagagaaagaaaacaacttgtcagaaatcgaagaagaggcctttgtcagagaacttaaggacacaataagagattataatgatataactcacgaattaagtgcaaatgcactaagaagtttaatgcatatgagcagtcttaagaacttaatgagacagcttcttatgagagttagagtaaagtaccagcttaagcagacatttttggaagaagatgatgttgtaagccagtttggaacgattatttctttccttaaggaagaaaacgagattgctcttattagaacaggaattattgataaggttaaacagcgacttgacaagaaccagcgtgaacatattttgagagaacagatgcaggttatcatagaggaacttggtgacgattttatgtcagaagccgaggagcttgaagagaaaatacataggttaaatgctgacaaagaagtaaaggaacagcttttaaaggaactttcaagatataaaggcacaatgggaaatgcggcagaagctaatgtgttaagaacttacattgacacaatgcttgaaatgccttggaacaatacaactgaggaaaatccggacttgcagaatgctcaggatattcttgacagagaccattatggacttaaaaaggttaaggatagaattttggaatttttggcagttagggttttgacaggtgcaaagggtgacagtccgattatttgtttaatcggacctccgggtacaggtaaaacatctattgcaaaatcagttgcagaggcgttaaataagaaatatgtaagaataagtcttggtggggtggatgatgaatcagaaatcagaggtcacagaaagacttatgttggtgccatgccgggaagaattgcaacaggtcttaagcaggcaggaacaaataatcctttaatgttatttgatgaaatagataagcttggaagaggcgttcacggtgatccttcttcagcattgcttgaagtaatggattctgagcagaattacaagtttagggataattacatagaagtaccaattgatttgtcaaaggttctttttattgctacggcaaatgatattaatacaattccgggacctttgcttgacagaatggaaattattccaattgagggatatactgaaaacgagaaattccatattgcaaaggaacatttaatagctaaggaatatgcgaaaaacggtcttaagaaaagtcagttaaatataactgatgaagcaattaagacagtaattcagaattatacaagagaagccggagtaagacaacttgaaagagagatttcagagatttgtcgtaaggcagcaagaaatatagttcagaaagaaaagaaacatttaaaggttacatcaaagaatattgaaaaataccttggtcgtaaaaagtatgaagctgatatggcaaatgagaaggacgatattggaatcgtaagaggtttggcatggactgcagttggcggaacaactcttcagattgaagttaatacaatgccgggtaaaggtgttcttaagttaacaggtcagttaggtgacgtaatgaaggaatcggcccatattgcattaagctttgtaagaagtattgttgcagactacggtgtagacaagaaattttttgaagaaaatgatattcatatccatgtacctgaaggagcggtaccaaaggatggaccatcggcgggcattactatggcaacggcaattctttcagctgtggcaaagatacctgtaaaatgctcagtggcaatgacaggtgaaattaatcttcgtggtaatgttatgccgattggaggattaaaagagaaacttttggcagctaagaatgcaggcataaagatggttttggtccctaaaaagaataagcctgatgtggaagaaatatcaaaagagattactgatggattagaaatagtttttgtagaaaaaatggaacaggtgcttgaaaatgcactggtagaacaggagcaaaaatgataataaaaaatgtagaacttgaaacagtctgtggtattacaagtaaattaccggataatcaactatgtgaaatagcttttgcaggaaaatctaatgttggaaagtcatcattaattaacggattagtgaacagaaaggcattggcaagaacgtcatcacagccgggaaagactcagactataaatttttataatgtaaataaagaattatattttgtggatttgccgggatacggatacgcaaatgtgtctttaaaagttaaggaacagtggggaaaaatgattgaaagatatcttcacgaatctcaggttttgaaagctgttttcttactaattgacattagacacgagccatcagctaacgatgtaaatatgtatcagtggattttggcaaatggttatgaacctattattattgccacaaaagctgacaagattaagagaagccagttgcagaagcacataaaaatgattaagacggaattaaatgttgtaccgggaactaaagtacttacattttcagcattgactaaacagggaaaagatgaaatactagatcttatagaagaaatagtggaggaataaaaatggcacttgaagctgaaacattatacaaattaataattatgcatatgttaaataaagttgaatttccacttactaactctcagatttcacagtttttcttagaaaacgaatacactaattactttactgttcaaaaatcgttaagtgagttaatagaggatggatttgttttcttaaatgttaatagaaatacttcatattatcatttaacttcagaaggaagagaaagtcttaaattcttcgagaacaagattcctaatccaatagtggatgacgtggatatgttccttatgaataataagtacgagcttagaaatgaagtgggaacagtgtcggattattacagagcatctaacggcgactatgtggttcactgtcaggttaaagaaggggacagcacccttattgaagtaaacgtagcaacacctgacaaagaaacagcatcaaagatgtgcgccacatgggaggacaaggactgtagtcaggaaatttatcagtatgtaattgataagttaactaattaaaaagaatacgtgatatataaaaagaactgtgcaaaacaataattctaaatataggaaaaattgttaaagcacagttctttttatatagtgctttggataggggagaaagttttgagattttttgctatgagtaaaaaatatgggagcgttcatgctttgggtcaggtatactctttgcttcgggcaaaggtgcttcgggggtgagtataattgtttattttgtaatgattacggaatgtgggaatgaaaaagttgtacgttccgtaattcatagaagaaaaagtgtgatttcgtgtgtgattacggaatatgggaatgaaaaagttgcacgttccgtaattcgtagtagaaaagttgttattttatgtgtgattacggaatatgggaataaaaatattgcacgttccgtaattcatagaataaagctggttattttggaagatattacggattctggagagtgaaatactgtataatccgtaatggcttcaagaagttacgtgtgagatagcgtttcggttatacgacacgtaaattcagccgaaagtacaagataagtttcaataaattacgtgtggtatagcgtttcggttatacgacacgtaatcggtagcgaaaatagaagaataattcaaaaaattacgtgtgagatagcatttcggctatatgacacgtaatcggtagcgaaaatagaagaataattcaaaaaattacgtgtgagatagtattttggcgatatgacacgtaatgactaccggaacagcaataagaataaaaaactgtgcgaaacaataattccaaatatgggaaatatcgccaaagcacagttttttttatacataaattctaagtttaatagaaactgaatattattgaatagtattaacttaattactcggattgctacgtgcttcgcactcccacaatctgacactttaatctcacttgatgttatcttttacagccttgcttacaacatctgcaacatcagggttgaatgcttcaggaaggatattgtcttcgttaagttcgctgtcaggaactaaagaagcaattgcgtgtgcagcggcaagtttcatttcttctgtaatctgttttgcacgaccttctaatgcacctttgaagattccggggaaggctactacgttgttaacctggttaggaaaatcagaacgtcctgtaccaacaactcttgcaccggctttcttagcaaggtcaggcataatttcaggagttggattagccatggcgaaaaggattgcatctttgttcattgaagcaaccatttcttctgaaacaatgttaggagcagaaacaccaatgaaaatatcagcacttttcattgcgtcagccaaaacaccgttttgacctgaaaggtttgtaacttcagccatttccttctgtgcccagttaaggtctttaatatcttttgaaaggattccgtaaagaccacaaatagtaacatctttaaatccatatttaagaagtaattttgtaatggcaatgccggcagaaccgtcaccattaactacaaccttacaattttctttttctttgccaacaactttaagagcgttaatgattcctgcaagaacaacgattgcagtaccatgctggtcatcgtggaatacaggaatgtcaagaatctctttaagtctgttttcaatttcgaaacatcttggagcagaaatatcttcaagattaattccgccaaatccgggagatattcttacaacagtatcaactatttcatcagaatcctgagtatccaaacaaataggaacagcgttaacgtttccaaattctttaaaaagaacagctttaccttccataacaggcattgcagcttttgccccaatatttccaagaccgagaacggcgcttccgtctgaaacaactgcaactgtattgcctttccatgtgtacttgtaaacatcttcaggattgtttgcaatttcaacacaaggttttgcaacaccgggagtatatgctaatgataaatcttcacgggttttaacgtggtattttgcttctgtgcttaattttccttttaaatcagcatgcaactttaatgctttttcgtctgttgtcataataaacctccaaatactatatgtctgcgtacaatactaattagcaatatataaagtgcaatgccaattagtacaatatgtctacgtataagcataacatattttgaaaattaacactatccttttttttgtaagtgtgttaagatataagaactgattcgaaagggaattctccctaaaaatcccagaatattgatgatataaataagttatacaacaaagaattacagaaactacaagattttataacaatagtgaaacaatattatttaatatttaagatatagatgacgaaatggcttatgtttaaaaattgaaaggaaaattatgagagaaaaattaagtgcgttacctgtaagtgaattaagggaaatagcaaaagcaaacggaattaaaagtgtaactacacttagaaagcaacagttaattgatatgattattgaaactgctgaacgaaaagatgcagaatctaatagcgtggaaaaatccggtgaagaagcaataaaagtatctaaaaaagaaatttcaaaagatgaaacagttgagaaaacacgtcgtacaagaagaaagactgtaagaacaaaggaaacaagtatagtcggagatacaattaaagaaagcacagagtatgaaaaagacggttcagagcgttcgaaagaaagtacagataatgcaaaagaaagaattgaggacgcaagagaaagaacagaatatacagaaagagaaaatcaggatttcagatatgaaagagaagaatcagaaggtggaagaagagaacatagacgtgtaagggagcacaagcagattgttcctgacgaaaacggtcctgttaagacgggtattcttgaagtaatgcctgacggttttggttttattagatgtgacaattaccttccgggagatgatgatgtttatgttgcaccatcacagattaaaagatttcacttgaaaacaggtgattttgtaacgggtcaggtaagggaaaaaagagaaactgaaaagtttggtgctttgtattatttgcagcaggttaatggtgagtctcttgacaaagtaatgagccgacctaattttgaggacttaacaccaatattccctaatgaaagattacatcttgagacagacggacatagcacagcaatgagagtagttgatttggtaagccccattggaaagggacagcgtggaatgattgtttcaccaccaaaagcaggtaaaactactttgttaaaggagactgcaagagcggttcttaagaataatcctgaaatggaaatgattattcttttaatagatgaaagacctgaagaagtaacagatattaaagaggcaataacaggagataatgtggaagtcatttattcaacatttgatgagttgcctgaacatcataagcgtgtatctgaaatggtaattgagagagctaagagattagttgaacacggaaaagacgttattatccttcttgacagtattacaagacttgcaagagcttacaatatgacagttccaccaagtgggagaactttgtcaggtggtcttgatccggcagcacttcacatgcctaagagatttttcggcgctgcaagaaatatgcgtgaaggcggaagtcttacaattcttgccacagcacttgttgaaacaggaagcaagatggacgatgttgtatatgaagaatttaagggaacaggtaatatggaacttgttttagacagaaaattatctgaaaaacgtattttccctgcaattgacattacaaagtcaggtacaagaagagaagatttacttcttgattcagatgaaatgggtgcagcttatattataagaaaagaaattaacggtttaagaaaagatgatgcagttgaacaggtgcttaatctttttgcaagaacaaaagacaataaagaatttataagcaaaattgccagaataaggtcagctcattcaagatagcagtaagcttatttgaatgataacagaaatttgttaagaagatttaaaaaattgtgttataaaataaatatcgaataagtgtgttttattaaatgcataaataaatagcataaaaataactttcatattattgacatactaatatgactatgttataatagcaaagctattgagttgttgaaccaagttcgggagattcgacagcagaatcaaaagcaaacggattggcgttgccaattagcaaaattttagaagaggtgaatgtaatgagaaaaggaatccatccagattaccagcaggcaaccgttacatgtaactgtggtaacacattcgtaacaggttcaacaaagccagaacttcatgttgaaatttgttcagcatgtcatccattctacacaggacagcagaaagctatttcagctcgtggtagaattgataagttcaacaagaaatatggtatcaaataattttaaggataacaggttgagaagaaattctcaacctattttcttatcttcataaagggtttttcttttaagaaaaataaggtatatatatggaaaataaagaaagattaggctcatcaggcataggcggtcaggccgtaatagaaggcattatgatgcgtaataaggataaatatgcagttgccgtaagaaaaccggataagtccatagatgtagatattcaggaatgtgggggcatagctaagaagtacaagattacaacacttccttttataagaggaatttttagtttcatagattcaatggttatcggaattaagactcttacttattcagcaagtttttttgaagatgaagatgagcaggaagaggaaccgggcaagtttgaaaagtggctacttaataagtttggagaaaaagccgaaaaaatagttatgggatttacagtgtgtctttcaattgttattgcagttgcactttttatgattttaccattatttattgccgatgttattgaaaaatatgttccgggagttacccaaagtcacgttccggtaattgaaggaattgttaagattattatttttattggatatcttttgttaatatcacttatgaaggatatacagagaacatttatgtaccacggagcagagcacaagtgcattaattgtattgaaaccggcaaggtacttacagttgaaaatgttgcttcaagctcaagatttcataagagatgtggaacaagttttcttctcattgtaatggtgataagtataattttttttgtacttatcagaacagatattgtttggttaagatatgttatcagactgcttttggtgccagttatagcaggaatttcttatgagttcattagattggccggaaagtctgaaaacaaatttattaaccttttaagcaagccgggattgtggatgcagaagattactacaaaagagcctacagatgatatgattgaagttgcaattaaagctgttgaggcggtttttgattggaaagaatacttaaaagagagtggcattgaggtggagaagaaggaagaaacatctttgccaaaggagtataaacaggtaatagaaggttcaggatacaattggaagtattagtaagagatataataaaaaaggctgaagaaaaactaaaagaggcaggagtagttgactttgcagttgacagttggcttcttgcagagtttgtttttaaaataaacagaacggatttttatatggatcctatgatgacagtgtcaaaagagagggctgacaaatatatggaattggttggaattagggcatcaaaaatccctttgcaacacataactggaagtcaggagtttatgggacttgattttaaggttaacgaagatgtgcttataccaaggcaggatacggaattacttgtggagaatgctattacatatattaagtcggttaaaggcaatgttgatgttcttgatatgtgtactggttcaggatgcatagcaatttcaattgacaggttgtgcgagaatgcaaaagtaacggcagttgatttttccgagaaagctctagttgtggcaaaggaaaacaatactttaaataaagcagatgttactttttttcagtcagatttatttgaaaatgtagaaaagcaatatgatgttatagtgtcaaatccaccttatattaagaccgaagaaattgagagtttaatggatgaggtaagaatccacgagcctatgatggctttggacggagactgtgacggattgaaattttataaaaaaattgccaaggaaggtagacaataccttagaagtaatggcataatattctttgaaataggatatgaccagggacaaacggttcctgcaatattagaagaaaatggatacaaggatataaaggtttataaagacctgtccggaaatgacagggttgtgacagccggaaaggaatagaaatgtttgataaattagatggaatacttgagagatatgacgaaataatggaacagttaaatgatcctaatgtagtcagtgatcagaataattttagaaaattgatgaaggaacaaagtgaccttgcaccaatagttgaagcttacaaagcttataaagaagctaagcagacagttgaagacagtctcatgattttggatgaagaatctgatgaagaaatgagagaacttgccaaggaagaaatgaatgaagcaaaggagcagattactgaattagaagaaaaattaaaaatcttacttcttccaaaggatgaaaatgatgacaagaacgttgtagtcgaaatccgtggtggtgccggcggtgatgaagcagctttatttgcagcagaattatatagaatgtattgtatgtacgctgaaacacagcactggaaaacagaaatgatttcagttaacgagaatggattaggtggctttaaagaagtagtatttatgattaacggtcagggtgcatattcaaaattaaaatatgaaagtggagttcacagggtacagagaatcccggtaacagaatcaggcggacgtattcatacatcaacagcaacagtagctataatgcctgaagctgaagaagtagatgtagaaattgatatgaatgattgccgtttcgatgtattccgtgcatcaggaaatggtggacagtgtgtaaatacaacagactcagccgtaagacttacacatattccaacaggaatagtaatttcatgtcaggatgaaaagtcacagcttaaaaacaaagacaaagcccttaaagtattaagagctagattatatgaattagagtgtcagaagaaacaggatgctgaatcagaggcaagaagaagccagattggtacaggggacagatcagaaaaaatcagaacatacaacttcccacagggacgtgtaacagaccacagaatcaaattcacatcccatagattagatgaaatcttaaatggacacctggaagaaatcatcgataactgcattgctgctgaccaggctgcaaaactcagtaacatgaacgactaacactcacaaaaccacaacaagacgcacaggctgcttgcagccatgtgcgttttttgtggttttagggagtcaaacgctcactgagatgaagcgaagcggaatcgaagtgaacgattggctcgtcaaagcgaagctttggagagtgttagtcgtgtagtagtgtgatgcgggagtcaaacgctcactgagatgaagcgaagcggaatcgaagtgaacgtttgactcaccaaagcgaagctttggagagtgttagtcgtagtagtggggaaatatttgttcttttgcgtggaattacgtgtcgtagaacaaaaacgctaccccacacgtaatttattgaaatattttagtattttcagttggaattacgtgtcgtagaacaaaaatgctaccccacacgtaatttgttgaaatattttagtatttctagctggaattacgtgtcgtagaacgaaaatgcaaccacacacgtaatttattgaaatattctaacatttctagctggaattacgtgtcgtagaacgaaaatgctaccccacacgtaatttattgaaatattttagtatttccagttggaattacgtgtcgtagaacgaaaatgctaccccacacgtaatttattggaatattttagtatttccagttggaattacgtgtcgtagaacgaaaatgctaccccacacgtaatttattgaaatattttagtatttctagctggaattacgtgtcgtagaacgaaaatgcaactacacacgtaatttattgaaatattctaacatttctagttggaattacgcgtcatataacaataatattgtatgacacgtaatatagcgaagatttcatgtttttctaaaaaaatttgaaaggaaagtgtattaaaaaagcaagagatatgttatagttgacaaacaaaaccacgtacaaaatatggaatgcaacataaactgggtacaaaaagaaaaagcgaggtgacgaattataaatataaaagaaattaatgaacgattagaatatttaaaaataattaaagttaaagcggagaagagtctgtcaggtgcaccagaagggaagttggtgctagcaagaagcgcaaatactattcaatatcagcagaagcaaaaagacggaacgagagtgtatataaaaaagagcaacgccgccctgattaaagccctggcgcaaaaggagtatgaccaaaagattttgaaaactattgatgctgaagagagaagaataaggaagtttctaaataagtacaatccaaattcactattagaagtatatgattctatgccggagcagaaagggatttttgttactaaatatgaattaactgatgaagaatatgcaaaaatgtgggaggagtctaagaataatttaggaagaattgagccggatgaacaattaaaagaattaggtttgataacagaaaagggggaatatgtcaggtctaaatcagagaagataatagctgatactttgacaaaaaacaatataaattatgtatatgaattgccattacgtttgaaaggatatggtactgttaaaccagactttacagtattgaacaaaagaacaaggcacgaatatgtgtgggaacattttggaatgatggatgattcaatatatgttaaaaacgcaattaaaaaaattgaacaatatggaaaaagcggatatgtgcagggaagaaattttattgcaacttttgaaagcaaggaagcaccgttgaatacagttacaataaatagggctatacaggatttctttcaatagagaaaacaaattaataaaatgaatataagacacaataaaatactaaatatgaaaatgctggagaaaatacgtattataaaacaacaaaaaattacaaataaaaattcagtttaagaatataaaactactattaaaatttccaaattttgtatttaatatttttataaaatggttgtcacaacaacataaaataatcataaattataatattatctatcttgcagaaaggcaatgaagtcaatagtaaaataaagaaaggaatatggcaatttagttaacgatgaataactaccatattgtggtgaaaagcgttaatgctgagataattatctcaccatttcacatacgcaggtggaataaaatcttatgacactgtaatcttaatataaattgccaagggaaagttaataaaatgaaaaaagatatggggaaagatttaaataataaaatgttttgctttcagtgcgagcagacagcaggctgtgcaggatgtataggagcaacaggtgtttgtggaaagacagctaatacatcaagattgcaggatgaattaacaggagcagtaattggacttgccaagtcttgcggccacaatgaaaagtctgaaagaacagatagaattataattgaaggattgtttacaacagttacaaatgttaactttaacgacaaaacgttggaagatatgattgaaaaagtccataaggaaaaagaagcaattgcgcctaattgcattacttgcgcagcaccttgcggaaatactgaagattttgatatgaatttattgtggaatgaagatgaggatatccgatcattaaagtcacttattttatttggaataagaggaatggctgcgtatgcgtatcacgcaatggtactaggttatgaaagtgaagaagtaaatcagtttttctacaaggcattgtcgattataacttatgacttagaaatggatagattaattgaagtggcaatggaagttggcgagaagaatttaaagtgtatggaattactcgataaagcaaacacatcaagctatggaacaccaactcctgtgaaagtgccattaactatagaaaaaggaccttttattgtaataacaggtcacgatttaaaggatttggaagttttgttgaagcagacggaaggaaagggcatcaacatttatactcacggtgaaatgttgcccgctcacggctatccggag

SEQ ID NO: 12756 - DNA, 977 bp, Unknown
  gut microbiota DNA sequence
cttacagggagatgcttgatgcattctcaaaagacttaaactgggattctcaatccctttcaaaaatcacaggtgagtgtttaattagcaatgctaattaccaccctattaaatatatgatttttatgtggtttgttatagttattatgctgatttcattaaagaatatagtcgaagcaattatgggaatagttaatccatatctttaccctgtttgcacttttttaaacaaacagcttggaaaagaatatattgacgatgccgagtcagaacttagttttggtaattacatacagattaactcgatttatataactgaaaactattgcatagaccttggaaaaaacaagatttccatacttccacttaatgatattgtgtggtgctaccgacttggaaatatttcgcttaatcctaaaagcgaagaaccaactttttcacttcactttacattaatagatggctccacaattctttttaagaaaaaaacaagcgacgaggctttggaggcaattaatgccatccgtgcaacagaatacaatattataatcggccattcggaatcaaagaaaaaagctgcaaaggcagttataaatagttataaacagaaataaataacagcaccttagtgacattttgccattaagatgctgttgtttttaattttctttataaaatatcaattaataatttcaaaaaaataggctgatgcaacagcctatttttttgtgaaaactatcttccacaacaatatttgtatttctttcctgaaccacatgggcaaggatcgtttcttccaactttcttttcctttataacggttcctgaaagtttctgttctttgtaaagttcctttcttctttcaggtgttaaaaggttgtcccattcttctaagttataaagccagtctgccttagcatcaaccatgttcttgtataacttttcaggatcatattctaagctaacttctgttgtat

SEQ ID NO: 12757 - DNA, 261 bp, Unknown
  gut microbiota DNA sequence
tccccacgctttcgagcctcaacgtcagtcatcgtccagtaagccgccttcgccactggtgttcctcccaatatctacgcatttcaccgctacactgggaattccacttacctctccgacactctagctgcatagtttccaaagcagtcccggggttgagccccgggctttcacttcagacttacacagccgtctacgctccctttacacccagtaaatccggataacgcttgcaccatacgtattaccgcggctgctggc

SEQ ID NO: 12758 - DNA, 2416 bp, Unknown
  gut microbiota DNA sequence
gacggcaacgatctctggaaggatatgtcaatgttggcatataacgttcagaaatataaagaattctctttttccgtggattttaaaaacaatatcagaggcgattatgaagaggatggtattacacataaagataactgggaagtaagacagggggcaatgattggctttggggcacaggttgttgatgaagatgtactaggatggaatggtgaagatacaggggtatggataaaaccatacggaacaaattctatcaaactggcaggaagttttgataatattaatagtggaacgcaccagtcagcaacacagtggaacacaacaattgacggtgttgatgtgtcaaatgataattggcataatatgaaattggaagtaaaagatggcagaataaagatttatgtagataattgcttggcatggccggaacagccactatcagttggcgatgattataatggcggatatcttttcctggcatcaaacaatggtggaacacagttcaaaaatgttcagattgaggaatataatagcgaggaaggggaaccaaccaatgactttagtaaagtaagcagttattatacagaagataatgcaacttctgatttgagattagcagagccaacagattattggactgagacgaatggaagttataagagaaaggctgtagaagataatccggaagcaaaagatgcgttgtatatggcacagttattccttaaagataagcaatattatgaatttgaattggaagccgacattaatataggaaagaataactggagaagaacgattattggctttggagctcaggaaggaagacattttcgacaatcaggtggtggaatgggtatctattttgatggtattgattcaccgacagaagcaagcgtatgtcatgtaggaaattgctttaatgatgatggcgtgttcaaaaactgggacacatggggagatcaacattataaaggtattgatgcaaatggtacagttcatgtaaaaatgatagtaaaagaccgtgctgttacaatatacgttgatgataaggagacaccgactaagttttctattccatattggtataaaggaggatacatttatctggcatcaaacgctacaggagcaaaattctctaatataaccattaaggaaatcagtggaacaatatcagaagatacagaaagcccattatataaaaagtcttcattgttcataggagattctatcagttatggagctggtgcagatcttgtaaatccggtaggatattcctggggcggaattattggtgaaaaaaatgaaatggattggttgaatgtttctgtaggtggtgcaacgatagcagaaagtccggcgacaattattgaaaatgaattaaatgcaccatgtgtagaaagcaaagattgggattatattattgtagaaggtggaataaatgatgctatgaaaaatactgaaacgggagtttgtccattaggaacaataaccccatctttaaataataagtttgataagacaacctttgcaggagcactcgaggcactatttaaaagattgattgttacatatccaaatgctaaaataggatatattgtgacatttaatattaaatgggaaccggcatatgattctgacaagtattttgatttagcaaagcagatttgtgataagtggggaattcagtacctgaacctcagagataacagcattttagacaatgaatctttcatggagaatcttttgatggatggctgtcatccaagtacacagggatatgaaactttatctccgattattgaaggatggatgaagacattaaaaacagataagatagatattccaaaaaatccggacgaaacaacgaaagaaccggtaacacaggaaactacaacgaataagacagatactccgggtacgacaacacagagacaggtaacacaggaaactacaacgaataagacagatactccgggtacgacgacacagagacaggtaacggttcagaaacctgcaaaagctgtaataaagaaattgaaaaatacaaagaaaaaatcaattaaaatatctttaaagaaagcagtacgtgctaaaaagtatcagattcagtattcgttgaataaaaagtttaaaaaagcaaaaataaaaactacaacaaaacttacttacgtaattaagaatttgaaaaaaggaaaaacttattatgtaagagtaagaggagttaatggaacgaaaaacggagcgtggagtagaattaagagagttaagataaaaaaataacaaattgataaaaggataaaataataaaattttttaatcaaacataaaaaggcaggtcaatattcgaggtataaagaatgacctgtctttttgtgtattataattaatcagattgataatgggagtcagggtt

SEQ ID NO: 12759 - DNA, 97534 bp, Unknown
  gut microbiota DNA sequence
aaataaagatgcaatatggatggagaacatattaggaggaacggaaatgaaaagaaagataatttcaataatgctaagtattgctattgttattacaggaattcaactgccagtaattaagaaggctgtacttgcaaaggaaaatgtgttaaacaaatttgacgcttattatacagcacatagtgataatgtaaaagattatcccgcaaaaaaagtgataaaatcggattattgggaggaagatggagcaggtgttattaccagaacagcgaaagatactacgacggaaacaaattctcagaatcctaattatgacggaaatccgtatccggatatggcgatgctgtattacaatattaaacaatataaggattttactgtagaggtagaatataaaaatccgaataaaggaagaggagcagcatggctgggatttggcggaaaagtaactgatgatactgcaaatacatggtgcacagaaaatggtgcaacaatatttggaacaagtggagaaaagacggtcaaacttataggaacttatataccatggcagaaatctaataagggagcaaagactgatggaagtacactttgggatacagatatatcaggagcagactggggaacagaatggaacgcagttaagattatagtaaaagatggaattatcaatttttatactaaggtcggaagtgaatggaaaacagcatggggagacgacaaattttattatggagactggtataaaggagggtatattttccttgcaagcaacaatgctggaacacagtttagaaactttaagatagaggagattaaagatacagatattctcaagaatttcaatggttattatacagaagatacaaaaggtaacagttcagtagcagatgttgtcagcaaagaaaaatactggacggaagatgaaaatggaattctaaccagaacttcgaaaaatacaacagcaaacgtaggggatgcttataaaaatatggcatacttattttataatgtaaaagagtatgaagagttttctttagaagtagactataaaaatgctgatcctaaaaaaggtggagcatgggtaggatttgatggaaaaatagaagatgatgtagccaaaacatggtttggtgatggccagggaactatgattgcagccaatggcaaaaacgaggtgaatcttgttggaacatttggtaatggagataaaccaaagattactacctacaacacaacgaagagagtctggaaaactgaagtggagggggcagactggaccaaagcagaatggaaaactataaaaattgaagtgaaaaaaggaaagattaattttcaaattaaaaataatggaaaatggtatacggtatacgaaaaagaagaacttttatatgatacatggtatgatggcggatacatattcctggcaagtaatcatgcgggaacacagtttaaaaatttcaaactaacagagtataaagagtcagaagaatttcgtgagttgaaaaagtttgaatcatattatgcagaagatatttataatgcagaaccagtgcctgcttttacaaaagactattggacagaaaatcaggatggtatcataacacgtaagacgaaagacgtaggcacagaaaatgatggaaatccttaccccaatatggcgctgctttattataatgtatcacaatataaggattttacattagaagtggagattaaaaatccaataaaaggaaaagcatcagcatgggtaggatttgacgggacgaaaggaaagtcgtggttgacatcctgcaatggtacgatgataagtgcaattggagaaagtgccgtaaaattagtgggaagttttgatgcctatggaatgaatccgtttagatcatcgaaaagtaaacctgtcatttgggattattggatggatgatgtgaaaaattggggaacagattggtataaagttaaaattcaagtattggatggcgaaattaaatttttttataatacaagtggaaaatggatgagcgcatggccggaagaatcatttacatatgatgaatggtataacggaggttatgtttttctggcatgtaatagtggtggcacatcttttagaaactttaaagtcacgaatgctactacaaaaaaatctgttttagacaaatttgaaacatggtatacagtgggatgtgataaagaaaaaccaaagaaggtatttacttcacattattgggaagcagatgagaatggggttatcacaagaaaaggaagagatgtaaaaaaaggtgaagattctaatgatggtaatccatatccgaacatggcatatcttttctataatacaaagaaatataaagattttagtttggaagtcgatattaagtcacctacagataaaagaagttctgcatgggttggatatgatggcgaaaaaggaaaaacatggcttaacaaattgggcggaacaatgttgagtacacagggagatcgggtggtaaaaatggttggaagctttgatgcatacaatcataacaaattccgcccgtcaataaaaacaccaaatatctgggactattggatggagaacgtagaaaactggggcactgattggtataaattaaagatagaagtgtgcgatgggacaataaaatatttttataaagttaaaaaaagcgggaaatggagtccgtggctgaatgcatggttagaggatgcgtttacatatgataaatggtatgatggcggatacatattcctggcaagtaatcatgcgggaacacagtttagaaatttaaaagttaaagaaataaagaggaaaaactctatattggatgattttgagccgtattacacagtaggatgcgataagcaaaaaccgaaagcaactcgcatgtcttattattggaaagctgataagaatggtgtcattacaagaaaaggtatggatttgacagacaatctgaaagaatgtaatgatggaaacccatatccgaacatggctattctttacagtaagaaaatttataaagattttactatgaatcttgagtataaaaatccagctggagaccgtggtggcgcatggataggatttgacggagaaaaaggtaagacttggacagacaaaaatagtggaaccatgtggtgcacttgtggaacgaatggaattaagatggcaggtacatttaccgcttataatggagttaagtgggatagtgcattatgggactactggcttgacaaggctgattttaatgcccgctggattaaagcaaagttagtagttaaaaatggcgagattaagtattatataaaaatcaaaggtaaatggaagttgacatgggatactgcagactatgcaaatccactctattatactgattggtatgatggtggaaggattttcttagctgcaaacgaattaggcgttcagtatagaaacatcaaaataaaagaagaaaaatcaaccaatgatttttcaagatttaattcatattattcagagtgtgttgaaaatcagccgttggtaaaggttgatccgggtaagtattggtatgaagataaaggtgttttgattagaaagaatgaggaattaggagagtttcaaggaaaagaatggaatttaagtaattaccagcagaacaaaatggcatacatgtttcttaatggcaactatgtgtatagcgataactggcagttagatgtagatgttacattaggaaatagtgcatggaaacgattctatataggttatggtgccacagatactgttacctggcgtaagccgaatggaggtacagtattttggacagatgataatggcggagtctgtatggaaggtaattatgccagcaatgaacaaatatatggagacacagcagaaagtataaaaaattttgaaaagaataaagcacatcattataggattgtagcaaaagcaggtgttgtgcatctttatatagatggaattcaagtaaaagaatatgttcagcagaagtatcagaaaggcggacgggtattttttgcgagtaattcagtaaacactacattttcaaatatcagtattaaaacgcttgaatcggatttctcccagtcatcatggtcgggatataaagaatattactcatcagatattacgaagaatgcattaactaaggttcaggaaggaacaaactgggcaatagaagatggtgttatcagacgtaaagcacaggagccgggaatggatgattgtagaaattatctggatatggcatatttatatttaaatgataagaaatatacaaatttcaagttggaactggattataaaaatggtaattccggatggcatagatcaccgataggttttggagcaaaaatgggcagacattttatggaagaaggtggaggaattactgcattagtacagccggatggatatgtgcattttgacggaaacaatcagagtgatggcgcatttgaggaacatgtattttggccggtttatgacgaaaagggaaatgatgtttcaacattaaagccgtatgatgagacaaaatggcatcatatggtaatggaggttgcagatggatatgtgacagtaacagtcgatggatttaagtatgtgtatgagatggcacttccgtcatattataatggaggatatatttatcttgcggcgaattctgtctgggcagaatataaaaatattaaaattgaagattattccgagatgtataattcagatgataagggatggataccaaagcgtgaagatatcgaatatgattttgaatacagagaaaaggaagaaaataattcaatatggtcatggatttataaagaattataatttggtacagtggaaaggagaaacagatgagaaaaagtaataaaattattgcattagtgctttcgattattttgacagtaagtatgtctgctacagtttttgctgctaccaaagcaaaaccgaacgagtgggattcctttggaacaagtgcagaaggtcctaagtacccacagattcgtggagagtatagaacagttgacagtttagttggaattaaaaagaagcagaaagaatttattttagaagtgaaggtagatggaaaaacagaaaaattacatttgacatttccttctaccggaggatttcggttgacaggaagccataaaggatattttgctccgaaagatgttcaggatataacatatcaaaagaatgataaaacaatgattcagatgagagcagaagatggaacagcagtgagctttaagaaggaggggagtggctttcgattaagtgttttcaacaaggaaaacagaaagctgtttgatatttctccggagcagatagcattttcttttgagaatagcgagattaaaaaagtgcggctggaattgccattagcaagtgaagaatctatatacggtacaggagaacgttttaatgaattagatcagactggaaaaagacttctcatgtggaatgttgatgcagggtataacaatgcaacaggagcactcaatgcagaaaaatggcgaggatataaaaatgttcctatcatatatagcaatagaggatatactttgttttttaattcgttttacagtggcaggctggatataggatatactaacagtaaaaaatgtacgatggaatttcaaggtcctgattttgatttttttgtatggacagggactccgaaagaaaatatttcgggttacacaagtcttacgggagcatcaattgttctccctaagtggggataccgatatatggcgggaggtcattcaacattttgggagacatatggtggttcgacaatcggttctattttgaaaatgcagcaaggctttaaaaatataggcattcctgatatagcagcagtatatgtagaatcggccgatataacagatgcaaaaatttataatgcacttaagaaaacaggaacaaaactgcttacctggaattctccagactataatatagatacaatgaagggatatctgccgggagttgatacgaagaaattaccgataacaaaatcggtaaataatccgttagcagatgttggatgttttatagattttacagatcctatgtcaaaaacaatgctgaataatcgtattggaaattatggaaaattaggctgggcaggcggattagtagactttggcgaattaattccattaagagctttatttagaggaaatggaagcactggagcagaaatgcataatatgtttccttattgggaaacaaaagtatataacgaagtgttaaaagagaaaacaatagatggtggtgtgactttttcaagagccggatgtgcaggagcgcaaagttattcggcattctttaatggagatcaggccagtggaatgaatggcatgaaaatgcagttgatatctggtttatcagatagtgtcagtggatttacgatgtggggagcagatttaggaggacttgatggcagtctgagtaatgaagtgtacgcaagagcagttgaattttctgcttttcagccaataatgagagcacacggacaaacaagcagatttccgtgggattatggaaaaacaggtgaaaagacatatctgaaatattattggttaagagaaaatttgcttaatactatatatagtacagcaattaagtctaataaaaagggaacaccggtagcaacaccactcactatggagtatcctaatgaggcaaaatatgatggattatatactacctatttattctgtgatgattttttggtgagcccagtattggaagaacaggcatatttaaatgatgtggcttttccgaaaggaacatggtatggactttataatggagaaaaaatcgaaggtgggaagacaaaacaggtagaagctccgacggatgaaatacctgtgtatctaaaagcaggagcaacagtgccagtcacagtgtcagacagcctgaatctttcagacagtatgcaggacgtggataaagctgaagcactgctggttacaattccggataaagagagagagaacatattttataaagatgagaatacttgtgttaaatacgtgagtacacgggtagatgaaaatacttttgaagtaaaggcaggctccggaaatgaaacgactgctgtgatattaaagggaagtgcagcatattcggttgaattagatggtgagaaattagagtgtctggataataaaccaaattccaaaggtgagaagggttatttttgtgaaaataatgaacagaccattattaatcttggtaaaaaagattggaaaaaaattaaaataagtcttggaaaaattcaaacccaaaatgtccttaaggatgcaaaggtaagtgataaaaaattagcagcaacaattgatggtgactataattcaaagtatgttctgagtaataaagcaggaacagaggatttgatttatgaattaaaggaaaagaatgaaattcaaaacattaaagtgaaatggactgctcagtattcagaaaaatacaaagtatctgtatctgaaaatggaaaagagtggaaagaggttttaagtgaagaagaaggtataggtggaattaaagagataccattaaaaggaacaatagcgaaatatataaagatacatgatgtggagaaaaaaacaggaagtgttccaacgttgtatgaggtagaagcgtatggagtacaagccacaacgagtatatggatctatgctattataattgtattgatatgtattgtaattgttttgatgattgttacactgaaagttttaaggaggaagaaacatgaagatattgtttcaaggagatagcattacagattctaatcgggattatggtgatattcacgatttaggagatggatatgcacactatgcagcaggttttatttcagaaaaatatccggagtgtacatttgagtttgtgaatcagggaattaatggaaataaaacagaagatttattaaatcgggtacaatcagatttggttgatattcagccggacattgtatctattatgattggaattaatgatgtatggtattattcggaagatagggaatggctttcaaatgaggtttttgaggagagataccgtacgattttagaaaatatcagacagaagacaaaagcacatatcatgatattagagccatatttgatgccggctgaggataaattgttttttagagatgatttatacggtaaggttcaaattattagaaaacttgcatacgaatatgcagatgtattggttccgacagaaggtttgatttattcgtctattttaggagtagaagaacaaaagtttattggagatggtgttcatccgacagatttcgtggcgagagttattggtaaatattattgtgagtatatatcagtgattattgataaaattatataattgcacagtcagaaatactcctaggagcgaagaggcacagaaaagtagttgttcttacaagtccgtgcattgaaagagagtttgcttgcagactctcttttttgtatggataatatttacttttttaaagaaaaataagaaaaaaatatagatgtatgtagaaaaaaacacgaaaacccttcttttttttagcataagggaattatcaaaaagtaaaaaacgaaaaagtccatacgtgactttattgtgaaaaaaaatctataggatttaaaaagatgtcgatatataattattgcatagatataattcagtgcagaattaaagaaatgaaaggagtattatactatgagaattaagagaaaattattgacagtagtgctttgcttgagtatggttacatgcttgtttacaggatgtggtggcagttcagaggaagagacaacgaaagcggcatctacgaaaacaggtggagatttggtaattgaagggttaggaaccgaccagaatgctgactactcagtagaaggaacggttacgattgctgttgatacggcgagagctacagattatgaagctctttttgatgcattgcagcaggcttatccaaagttggatattcagtttgattatttttcgcatacagataaggacagcgcggcagaatatttgtcagctaaggcttctgcaggaaagatgcctgacattatctgggatgaagctgctacggatggttcgctgatgacatatatatcacagggatgggtatatccactggatgagtttgttaaggatgatccggattttaaatatgtacctaaaaatttagttaagaattatacattttgtgataagttatatgcgcttccacatcaggcacagtttgaagaaatggtcgtgaatttagatgttcttgatgcgttaaatcttgatatgccggaattagactggacattagaggattttgaaaaatatctgaaagcggctacaaattctacatattcaggtatagaaaaacttttccagataccaagtttggtagtgagtgcctataatcctaaaaatactgtaaatggatataatgaagatacgcatcagtttgaagcagatgcgtatgtaaaagcattgaaatatatgattaatttaagagctattccagggcttgaagcgtgggctctcagaagaacatcaacaggtgataagacagattatgttaaaaaatttggaacggatgaagataatgcagcttttgataaaggacttacattgttccatggtgtaggtacgtgggaattggcagatgctcagtccagatggtcggacaaaaactggaccagttggacaatacctcagaataaaaaggcaaaaggagtgatgccgtaccatgtagatcactgttttatgacaagcagttgtgaaaatacaaaagcagcttggcaggttctgagatttattacatatagttctgagggaaatttggcaagactcagcatgtatgatgagacaaatacaggaaaatatgcaacaatcaataagttatattatcctacaacatccaatcctaaggtggcagaaaaatttaatagtttaccgggagtgacagaggtagacaaatatttgtttaaaaatattgataagtgcagacgtattgatgtgggaaaaatagtgccacggtataatgacataataaagaactattttgatgaagcacagaatcaggcaacagacggaacaagttctaatgttgaaccgattattaaagaggcggtagcaaaagctaatccggaaatgaaaaaagcctgggaagattttgaaaaaaaagttttgaaagttcagaaagattttgaacaaaaacattcgaaatagaacagaaacacaacgggttacaaaaaagtttggaacagaataggttaaattgttagaggatggaggaaaaatgcaaaaaagaatcagcttgttattagttatagtaatgattgttacttcacttttagcgtgtggaaaggaaaaattaaatacaaagaacgaatcctatgaaggaaagacaggcggattttatacaaaacaggcaattgaaaactggaattcatatgacgaagctgactgtactaatatagaagcagaaaatatccggcttagtggaaagaaggtttcaaattatccgataactgtaaccagaaaagaaaaactgaagttgcgtgttacgcctccagagtcagcagattattgtgttgtagcagaatatcgtccagtgggcgatgttctggctacagatgcattgtatgaagtgaaattgaatggaaaagaaacaaagcggacacagttacaaatgctttggcatgatttgacaagagaagctgttgatagaagtgggaacgaatccgttagaagacaaacaaacttggatgaatatgtgaagaacacatttttagattatggaaatacggatagagagaaagttcagtggaaattagagaagggaaaaacttatacatttgagataattccggatgagcagggaatagaaatatccggattaatgctttataaaataaaagatacgaaaacagaaaaaatgcaaaaaacggataatgttccgatgattgtaattgaagcagaaaaatattcgttaaagtcagattcttatatcagagcaacatcagcaagggacgcatctctttcaccttatgatacatatcataaaaaaattaatttgattgacagttctgcatggggaacagcaggtcagaagattatatgggaatttgaggcgaaagaggaaggcaattatcgtttaggtcttcatttgaaacaaaatgctgatgttaataagacggtgtttagaacgatagagatagatggaaaagttacagattccagatgggagaatgcaaaagtcccatatacaggaaccagtggatatcataattatacatttaatgacgaagagggggatatgacggtacacctggcgaaaggaaaacatactttggcaatggtggtaactgtgggagattataaagaaatatattcacagattgatgaattgatgaaaaatgtaaatcaactgggaactgagttacttcgtattacaggcggggtgtccgatgaaaatcgtacatgggatttagaatcttatatgcctgatgcaacagacagaataaagaaatacgcagaacaggcagataaaatatatgagcaattagaaaaaatagacggaaaagaaccggtatatgcgatggacttacagacagcgtccgataaacttagaaaactattggaggaaccggaaaaaataccagggaagacagaagatattttcagaggtgatgattcagcctccaagtatttaggaaatgtgttatcctgccttacaggtcagggattatctttggataaaatttatctgtatggaacagatgaactgccaaaagaagatatatcaatattcaaaacagcaggagaggcgattaagcgatttttatggtcatttacagacgaagcagatagcgataattatgctgccagtgatcagaatgaagaagaactggaagtgtgggtggcacaatctactgtaacagttcagatattacaacagttattagatgagacatataataaagagcataatacaaatattcgtttgaaagttatgccaaatgaacaaaaactggtattgtccaatgcaacgaatacaaatccggatgtggtgctctgtgcaacggcaggacagccgtttacgtttgcctgtagaggggcattaaagaatcttctggactatgaagactttatggatgtctacacaaaagattatcaattggaatctttagtagcaacatcttatggtgacggtgtttatggcgctgtggattccagaaactttcagttattgttttatcgcaaagatattctggaatcactacatctggaagtgccacagacatgggatgacatagaggccatgatgccgacactgttaagaaatcagatgaactgttatatacctatttcacagagagcatcattaaagggtttaggagttactactccatttatataccaaaagggtgcagaaatatattcagaaaaaggtaatacgacagcaattaatagtacagagtcggtggatgctattacagaaatgacagaattctacaaaatatacggaatgcagactactgtagaaaacttttatctgagttttagatatggtgaggtgccaatcggaataggagattttaatacgtatctccagttgaagatggcagcaccggaattggcaggacagtggggagttgcattatgtccgggaaccagacagaaggatggaagtattctcagatatcagccggctgacactacggcatcaatgatttttgcgaatacagataagccggatgaagcatgggaattccttaaatggtggttggacgaggatacacagtatgagtattctatcagaagatgtcaaagtttaggtttagaataccaatggaatacagcaaatattgaggctttcaagaaactgccatttgattcggatgtaaaagaaaaagctatagaacagtggcagtatcagagagaagttacgccacatcctgcgtcttacattgtggagagagagttaagcggtgtatggaatgatgtggttatagacagcagtgatatgatggaatctttagatcaggctgttttagtaatagacagagaaattaaaagaaaacttcaggaatttggatatatagatcaagatggaaaattaattaaagattataatatagagatactaaaaatgctttacacaaaaacaggaagacgaggtgccaaaaatgaaaagtaaactcctttctttaaaaaaaattaaaaatgaatattcctctttagttttaatggcaccttatacattcctgtttattttgtttattataatcccggtgggggcggctattatattatcatttacatcatttaatgcaattggtgcgccgtcctttacagggttaagcaattatgtgaatttgcttacgaatgattcggtatttatgcagaaagtattgccgaatacattgatatatgccatttttgtaggacttggtggttatgtattatcattttttttggcatggtcattatctcagataccaaaaataccgagaacaattatgaccgttatattatattctccgtctgtaactggtggagtattgctggcgactatatggagttcagtttttagtggagacaagagaggcttgttgaattatttactgttaaaatatgatattatagagaatcctattcaatggttacagtcgggatcatatctcatgccgattatgattattgtaggtctttggagttctatgggcatagggtttctctcaatgctgtcaggtattttgaatacggataaagaaatgtatgaggcagcaagaatagacggtgtcaagaatagatttcaggaaattatctatattacgattccggcgataaaaccgcaaatgatgttcggtgcagtaatggcgattgttaatatctttaaagatggtggaagtggtgtaacactttccggagccaaccccacaccggattatgcaggacagttgatagcaaatcatattgatgattatggatttatccgttatgagatgggatatgctgcggcagtttctacagtattactgttgatgatatttatattgtcaagagttgtttcaagagtgttcagtagtgatggtgagtaggaggtactgtatgttaaaaagaaaaaggcgacataaattgggaacaagtaatacagatcctgccagatttaataaaagccagataaaaatatatgggtatctgataccaatatctattgtaatgcttttaccaattatatatattgtagtatctgcatttaaaccgatggatgaactgtttgcatatccaccaagattttatgtgaaaaatcctacatttgataatttcaggaggttgtttgaggtgtcttcagatactgcaatttcggcaggaagatatttattcaacactttcgtgaataccgttgtcattatgtttttaaatgtgtggatatctgtgtgcgtcgggttcgttttatctaagaaaacatttcgtggcaaagatgcattgctgcagattaataatatggcgttgatgttcgttcagacggctgtggcaataccgacctattttgttattgtatatacaggacttagaaacaattttcttgtaggcattatacctgcattggtagtgccaacaggagtgtttttagtaaaacagtttattgaccagctgccggatgcattgattgaggcagcacgtattgatggggctacggactatcagattatacgaaaagtagtgtttccattagtgaaaccggcgttagctaccgtaatgttattagcatttcagggggcatggcttgatgcaaatgcctctacgatgtatttggatagtgagactttaaaaacatttgcgtattatataggaacattgacggcaggaggaagtgttatcacacaggggatagcagcagcaggagcattaattatgttagttccgaatattgttttatttattattcttcagtcaatagtaatgaatactatggcaaactcgggaattaagtagttaacaatataaatggagaaaaatatggcgacaaaattaaggaatatatttttatttataatacttattagtgttattttgtcaggaaagacaaatattgtttcggcatcagaaggaacaacatacacatatactatttctgtagatggcgattatatcagaacgcaggaagcatatttggcaagtacggtttatatgcagagacaagggctggtacagccaagtgatttgtttatatacgggaaagagatatttattgcagatacaggaaataaaagaatcgtagtttataacaaagagaatggagttgccagaaatattacaaatgatgcatttgagggaccgagtggattgtttgtgacagataaaagaatgtacatagcagatccgatggcacaagcggtatttatctgcgacaggcaggggaatatattgacaacgatttccagaccaaaagattcacctttgatgagcaaatcggcaatatttaaaccggttaatgtagttgctacagatgactccaatattatcgtagtaggtgaaggctcttatgatggtttaatgcagtttggtgatgatggcgagtttaaagggtactttgcagcaaatcaaagaagcttaacactgttagaacgaattcaggagatgatatataccagagagcagaaatctcagcttcagacaaggaaaccaagagcaatacaaaatatagacttatctgccagaggtttagtttatagtgttacgcaaagtgcagaggtaacttattcatggtctaaggctgaaacgaaaacatcaaacgcattgaaattacataatatggcaggtacaaatattttatcacctaataagtttatggatgatgagtggaatttcgtggatgtgacagcaggaccatatggaaatgtgtatgcattgacgcagacagggctgatttatgaatatgacaatagcggaaatctgttgttttcgtttggaggaagagcagtgtctaatgacagatacggattgtttacatcagcagcagcgattgatttagatgaagaaggatttgtttatgtattagataaggaaagaggttttgttcaggtatttgcccctacagaatttgcaatgttgaatcacagggcgatttatgatttagaaaaaggaaattatgtagaaagcaagaaaatctggcaggaaattttaagattaaacggcatgtccaaaatagctcatataggatatggaaaaagccttttaagacagcagcagtatgcagaggcattagagcattttaagacagccaatgatagagataactattcggagtgtttctgggaaatcagaaatgtaatgattaataaatatattgtatgggtaatcgccggattattgataatatttgtaatatcactaatcaaaggagcagttcgtccgaagaaaaaaaagaagcaatataatacacatggtattgctgaaataccagcaaagggaattggcagattaaagggtgattttaaatatatgggaacaatgctgaaacatcctatcgatgcaatttattatttgaagattggaaaaagaggaagtttgttgtcagcggggattatgataatcgtaacgtttatcatatatatggcagacattttaggaagaggatttatctttaatcagaatagtttgtcaacgttgtcaccaatgttgctttcgacaattttctttatcattctaggtttatttattgggggtaattacatggtttccacaattaatgatggcgaaggaacgataaaaaacatatttgtttcagtggcatattccatggttccatatatgataatggcaccaatagcaattgtgttgagttatgttttgacccagaacgaggcgtttttgattacattagtgtggtatattggtattttatggtcagcggcacttgtaatcttaagtatattgaatgtgcataattatacatttaaacagacagtgaaaaatgtgttgctaacattgttttttgcaattgttgcacttattctggtagcaattttatatctggtatgggataaggttatagagtttataggagaggtaatatcggaggtggagtatcgtgtacaaatataagagaataatatgtatcggcttgacattcattttatctgtaacagtaactatggcgtatgcagcaaagaaggaagataataaagtatcagaaattgattttgttgtaccggattcatctgcattagatgtaacttctggaaggtatacacaaatagaagaggttagaaaggtaaaaaacagactggctgatttgaaaggctttgaaaaaaagatggaaagtgatatccttgcagtttactattcagatgaaacaaaaggtattcgtattttaaataaagaaacagggtatgtgtggggaggcttaaaggaaacaaaggcagaagatatgaataaaaagtggtcgtctatggcaaattcaattatatccatagactatctgggcggaaaatgccagtctgccagagcaacattgggagatagtggaaactctattaattttaattggaaagaaaatgaagcaatttgtaatgcaaactttgttttggcaggaatatcattgtcatttaagatgaaactggaagaagaccatttgacaatagaagtgttacaaaacacggtaaaggaactaaaaaataataaactgcagtcggtttggatattaccgtttttaggaacagtaaaggaggatactacgccagggtatatgtttgtgccggatggttcaggagcattaatccgctataataaaaagggaacttatacatcggtgtatgatgaaagagtttacggaaaggatgcatctgtagatggactttcagaggctggtgatctgatagcaaagcgaaataatgattacatgattgatacacaaaaggctacaataccggtttatggtgtggtgcatggtgcaaatcaaaatgcgtatatggcagtaattgaagagggagcagagtattcttcagtatatgcttctccggcaggaatggtgacagattataactgggtatcttccagatttgattacagacaggcatatagttatccggtcaataagagcggaaagacaattatgactacgcaggatgaagcagaagcatataacggcagagttacattttattttctgtcgaacgaaaaggcagattattccggaatggctgtaaaatatagagaactggtaaaaaatgcaggaatattgaaaaggaatgaacgagaggacaaagaaattcctatgtatctgcatatgatggcaggtgtagtggaggaaggacttatttttaatggatataataagttgacttctgtgaaagaagcacaggatattgttgataatttgcggagaaatgatattaaaaatatttcagtttcatatgaaggatggcagaaaaatggaatcagcggacataaatatgggacaaccagtttagattccgatcttggaaatgagggagatttgaaggaattacataaaatgcttggagacaatggtggaagattttatctttacactaatccggtaagttttaatgaagatcaggcgaggattgcttcaacgtcagctcttacaatttcgaaaaattattcttcatatactagaagtaatacaatgttaatgtatccgacagagtattatgcacatccgtcagatgtggttgattcactggcggatatggtagaggattatcccgagtataatctggatgtggctaaagttggaaacatgatttatggtgattattctaagaatgaaaaaatatcaaggcagaaaagtaaacaaatattgagtgaaactgtttcaaaaataaaaaaagataaagtattagaaaatccgaatcagtatttgtggaatgatacatctgagtatataaatatgccgttacagaatagtcaatatatgtatgaaacagattctgttccgtttttacagatcgttttgaaaggaagcatagactattatgcaccatatgcgaatcagggattttataatcagacaaacaaactaaagatgattgagtatggcgcgtatccttcttttataattatgtcagagaaaaacgaaaagttaatagatactccattagaagattatttttcactgaattacaatgattggtctgatgtgatgaaggaagtttatcaatatttaaatggtgcactgaaagaagtggaaggaagttctattattcaacataagatgcttgatacaggcgttgcggcagtgtcatatgataatggaaaagtaatttatattaattatttaaatcgggagtatgtgacaaaacagggagtacatattccagcaaagaattatttggtagcagatagataatttggcatagaataggagaaaaacatggtaatcaaaccaaagggtaaggtatcaaaaaacggaaaatataaaaaaacaaaattaacaaataccataaaaggaatattatttgtttcaccatggctgattggatttgctgtgtttacgttgattccttttattaacagtattttatatagttttaatgcagtatccattactccgggaaagataaatttaaaatgggcaggtcttgaatattataatcatgcgtggaatgtaagcacaagtttcaaattaaatctgtcctcttcggcaatgatgatatgttgtgcgacgccggttatattggtgtttgcattgatagtagcggtgatgcttaataataaatttcgtggaagagtatttttcagagcaatattttttatgccggtaattattatgagtggtccggttataagtaaacttcttacgggatatacagtgaattttacggaagaaggttcccaaataatgctttttctacagagccttccaggtgtgattagtaagccatgtgtgtttgtgttggataatctggtactaatactctggttttcaggagtacagattttgatttatttagcaggtctccaaaaggtatcaaccagtctttatgaagcagctgaaattgatggtgccggagcatgggaaaaattttggaaaataacattgccacatatgggaccgattattttaattaatggaatatatacagtagttacaatagctaactattcagaacaggcaatcaatcaggaaatatcaaatagtatgtttaatacatctatgatgtatagtttatcagctgccatgtcgtggatatatttcttattggtacttttaatactggcagtggtaggactgttgttttggtttatcagtaaaaaggagaatacataatgaagaaaaaaagaaagataccagtatcaaaaatatttgtatattttatattggcaggaatgggattcgtgtatttgtatccggttttatacatgatagtaaacagttttctgtcagcaggagatttgacagatcccagcgtgacttggatacctacagaattatgttttgataattttagtactgcatttgaaacattggatttttttaaaagttttggaatgtctatgctgatgagtttgattccggcggttcttcagacagccgtaacggctgttattgcctatggattggcgaggtttcatataccatttaaaaaagtaatattagtattgatactgataacatttttattgccgacacaggttatgcttgtaccacgttatgtgttgtttgatacatatcatttaacagatactatttgggcacagtttttgccagccttgtttggtcagggacttaatagtgcaatattcatatttgtttattatagttactttgtttcctatccggtggtcttggacgaagcagctgagatagatggagcaggaaaatggaagatatttttaaaggtgtcacttccaatggcaaaaggagcaattattctgagtatgttgttttcctttgtattttattggaatgaaacatatttgagcaatacattatgggggggaaagatacagacactgccattgaaactgcagagttttacattacagtacgaggctttgtatggaaaagaggcagcaggttctattagtgagtccgtatcattagcaggaaccctcttgtcaatattaccacttttagtgatgtatttgatttttcagagacagtttgtagaaagtatagaatcaacaggaattactggtgagtaggaacaaagaaaggaagaatagatttatgaatattgaagaaagaatagaagagcttttgtcaaagatgacattacatgaaaaggtgggacagttgcatcaggtagcaccttcgaaggtagggggatttgaaatacctgaggaggaagcttttaaattatataaaagcggtgatatggatgagaagacatatgatgcaattattaatcacaagatgttgagcaatcatgaagacgaaataagaaaaggcgaaataggctcttttattagtgtcatagatgcagaaacagcgaaccattatcaaaaaattgcggtggaggagagccggttgggaatacctttaatctttggtttggatgttattcatggatttaagacaatgtttccaataccattggcggagtcatgtagttttgacgatgaactttttgaagagacggcaagagtagcagcaaaagaatccgcagcaggaggggtgaactggacatatgcacctatggtggatgtggcgagagattcccgttggggacgtgttgctgaaggtgcgggagaggatacatatcttgcgtcacgtttctcaagagcaaaggtaagaggatttcagggaaaggatttaacagatgaagatagaatcgcagcttgtgtgaaacattttgcagcctatggagctgtggaaggaggatgtgattatgatacggtagatatgagcatgccaaagttttttgagacatattatccaccatatgaagctgcagttaaagaaggatgtgcatcagttatgatggcgtttaacgacttatccggagttccatgtacgacaaatgaatggttgatacaggatctgctacgaaaaaatttaggatttaagggtgtggtaatcagtgatgccaatgcgattaaggaatgtgtgaaccatggaacagcattagatactgaagatgctgtaaaacagtctattgaggcggggaccgaaatggatttaggttcggatttgtatgaaactcttttagaacaaatggtgctagaggggaaagtagaagaaaaatatgttgatgaggcagttagaaatatattgaggctaaaattcaaagtaggtttatttgaaaaaccgtatgcagatgtaactaaaaaagaatgtcttttatgtgatgaacatagaggcatcgccagagatgcggcaagaaaatctattgttttattaaaaaatgacaataagcttcttccattatcaaagaaattaaaaatagcggttgtaggttcagcagcttcagataaagagcagatgtatggatgctggtcatttacaggagaatgggaaaatgcagttactcttgtagatgcattgaaaaaagagggatatgattatcaatatgggaaagtatgtggagaaaaactgccatttgataaagaagaaatgatgaaaacagtcaaagatgcagatgtaattattgcaacgattgaacatttgaacagtggggaggcagaatccctggcagatattactattcagggacagcagttagaaatgctgtcagaactaaaaaaattagaaaaacctattgtgacagtattattcaacggaagaccccttgcaatcccggagattgttgaaatgtcagatgcattggttgaggcatggcatttagggagtgaggcgggaaacgctgtggcagatgtattatttggagattataatccaagtgcaaggctgacaatgacttttcctcataaatcaggggaatgtccgatttattataatcatccaaataccggaagaccggcaggggattatttctggacaaacaaatacatggatacgtcacaaaaaccattattcccatttggatatggtttgggatattcagaatttgaatatggcgacttagaattagaaaaaacacaagaaggatttaaagcaactgtagagataaaaaacattggagaatatgatggcacagagacagtgcaactttatatccatagaagaaaggccacaagagtacgacctgtgagagaattgaaaggatacaaaaaagttacattgaaatcaggtgaaagcaggaaagtatctttatgcgttaatagagaagatttaggttattatgatacaagaatgaattatattgtggacgaaagtgagtttgatgtatggatggcacatgacagtgggtgtggaagttgggcgagaataagcttataaggagatatcgcatatgaaaagagtcgaaaagatagtattaatattgttgattgttattatgtcatttcacacaccaataatttcgtatgggtatacagcagtaccgagtgatcaggatccttttgatagtggatatagtccggagtttccatcaatggagggaatttataatacaccgaataaacttctgggatatgaacagaaagacagagaattctgttttacaataaaaacacctgattatatagtaccattgtctatatcttttcctaaaattggaggagttagaatacatggcgaaaaaaaaggcagttttgaagcagcagagaattacaaaatttcgtatactatttcaaaatctggtgatattaccatgaagggaaataatgagacaaaggtagtattccaaaaaaaagaagatgcattcaaaatacatatttacaatggctcaggagagcgtattttgggaatagattctacgcaaatggaatttgcatttaatgatgcaggagaactgacaaaatataatctgaagtttccgttagacagaaacaaagaagaaatttatggttcaggggagagatttaatgaattaagtcaggtaggaaagcgtcttaagatgtggaatttggatgccagttatcatggagatgatactttaaacgcagaattgtggagaggttacaagaatataccattacttcatagttctaagggatatacattattttttaatacatattatgcgggaacatttgatatcggttattcagaggcgagtaggatatgtgcagagtttaagggagcagaatttgatttttatctttggacagatgcaccaaaagaaaatctgaaagcatatacagaattgacgggaaaatctatccttcttcctaaatgggcatatgagtatagtgcaggggggagtagtgggttttggaatagtggtaaaggagtatatggaaattcagtagatgctattaatgggtataagagaatgggaactccaaatatagcatcagtatatttagaatcagccagtaaagaggctcagagtgtatacgatttgtataagagtgcaggaattagagtattgaaatggaattcccccaatatgacaccgaaagaaatgaagagttatcttccagggatgagagaagatgaattgccatatataagatatatatgggacaaaacagctagttgtggtgactttatagattttacacagaatacttctacaacagcattgatagggcgcttaagcagcgaagttcaatggggagctaagggaggattagtagattttggagaactaattcagccatatgcttattttccgggagtagataaagatggagcagtaatgcataatgaatttgcatattggtattccagaagatattgtgaggctatgtcacaacttatgggaaatggagactttgtacttcattcacgaagtgccgctgcaggttcacaagcgtatactgcattttttacaggagatcagcagacttcaatggaggggctcagaaggcagctggcaggtggaattagtgcaagcgctagtggattaacaacatggggtggcgatattggcggtttgtccggtggagtagcaggagacggaccaacaacacaggtgtttgccagaagtatgcagttttcaaccttccagccattaatgaggacgcatggaacaacatcccgatttccttgggattatggagctttaggagaaagtacatataagacacattattggctgagagaaaatatattgaataaaatatatagtacagcgattgctgcacataaaacaggaagcacaatcgttacaccattaacaatggaatattcagatgaacagtctttgggaaatgtatatgaaacatacttgttctgcgatgactttttggtaacaccggttttaaaggaaaatgcatatctttataatgtaatgtttccacaaggaaactggtacagtttatggacaggtgaaaaaataagtggttgtggagagaaaacagtagaatccccaattgataaatccccaatatatctcagggcaggagcacttatcccggtgactgtggcaaacagcctgaatttaacagacagcatgcaggatgtaaaaaagacagaagccttgttggtgacaaagcctgataatgacagaacaacaacatattatagagatgaaaacactagtatttcttacaagaatatgaaaaatgggaacaatggattcgttatttcggcagaaactggaaatgatactacggcactgattttgaagggaacagccgcaggaagtgtagttgttgatggaaaaagtctgaaaaaattgacaaacagaccaacaggagacggggaaattggatattacagtaatgataatagggagactattattaatataggaacaaatgattggagcagcgtagagatagaagatgcagatgttgatagtgtgaatctgatgaaagataacattttaacagacaatatgaaagttacagctgatggagatttcaacacggcattatcattatctgaaaaagaatatgtatttgaattgtctaagacatctaatatgaatgaaattttagtgaagtggacagataaatacgcaaaaaaatttaaagtagcagtttcagagaacggaaatgattggactgtaatcaaagatgaagcaaatggttatggcggtataacaaattgcagcattgaaaataagaatgtaaagtatgtcaaattgtatgatatagaagcaggtacagaaagtgcaccggaaatttatgaaatagaggcatatggaaataacagtaattgctgtataacttataatttaaaggggggagcaaccaaaatcgaagagaaaacagtggtgcttaataattctcagtatacattaccatcaaaaaatcgctttacagccccacaggggaaacagttcaaatggtacataattaatggaaaggtttataatccgggtgatgtgtacagggtgattagagatacaaccatatttttagtatgggaagattatgttccatcggatgaaaatgacagtattttggcattctttgacggtttttatagtagtaacgcaactacttctaaaaaagtaaaaactacagattattggagtgagaatacagagggaataattacaagaaaagctaagggaactgatggggctttatataatggtgacccggcctctaacatggcaatgctttattacaatgcaaatatttataaggattttgttttggaattagagtatagaaatcctgtagccggtatgggaggggcctatgttggttttgggggaaagatagataacggagtcgctacgacatggaaaagcagtaatgcaggaacaatttttggaacagcggggtctagtgaagtaaaactggcaggaaattttgaagcatatggtggaaataagcattctacaggtgaagaagattcaaaagtctggacagactgggtaatggatgcagactggggaacaggatggaatgctattaaactggaagtaaaaagtggacatataaactgctatgtgaaagttaatggcaaatggatacaatcatggaaaaatgatacttttgatatgccatttacttacggagactggtacgatggaggatatgtatatatcgcatcgaataatgaaggaacgcagtttcggaatattaaaataagtgatagggatctttcattggatgaaactgtggcagcagaaaaaaacgagataatgaaccagtttgattcgtattatacaagtggtgtagataagaaaaatcccgaatatgctgaaatatataaatattggactgcagatacagatggagtattaacaagaaaagatataaaagaatcaggtgaaaaattaggaaatgaaaataaaggaaatccttatccggaaatggcaatattatattatgatattggaaagtataaagattttaccatgacagtagattactataatcctgtggctgataatggtggagcatggattggatttgatggtgaaaaaggtgaaagctggtacaatcattccggaaatacaatgattaatactgcggaaggaaatgtttatcatttaaccggaacatttgatgtagatggagaaacttatggattaccaaatgcaaatgacattaaatggacaggttatctggaagatggaaaatttaattctttgtggaatacagtcaagatagaggtgaaagaagggaaaatcaagttttttattcaagtagataatgagtggaaatcactttggaatgaagaaacgttttcctatggtgactggtatgatggtggatatatttttttagtagcaaataatggtggaacgaaatttagaaaccttcagataacaggaacgccgataaaagaagtaacggaatcggatttaaaagattttacagcatattatagtccgcattgtcaaagatatcctagcacaaaaacgaatattaatacttactggagttgtaccagtgatggtgttattaccagaaaggcgagaggaacaacgacagaaacaggaccatatgtggggaattgctggtcggatatgtctatgctttattatgatgtttccagatacaaagattttacattagaagtggaatatagaaatccgaatgaaagtatcggtggagcatggattgggtttgatggtgagataaacgatagcggcagtgccaccacatggtatggtgatagtacaggaacagtgtttgccacagatggaaataacagtgtacggattgcaggaacttttgactataacggaagaaaacagacgacgtataatacgagtgattctatctggagagctgaaatagctaattgtgagtggaaaaccagttggatgaaagcaaaactggaagtaaagaatggatttattaatttttatgttgatgtaaatgggaaatgggaaacaccatgggaaaaagatgctataagatatagtggatggtatgatggtggatatgtttacattgcttcgaataatgaaggaacgcagtttcggaattttaaaatcactggagaagcattagaagaagaaactacatcagaaatacctacgacaaaagaggttccgacaacgacaaatgaaacagtaacatcaacaaaggatatgacaactgagaccacgaaagtagatattactactgaaataccaacaacttataaaattcatgaaagtacaacgggttatcttaatcaaatagaaacaaagaggcctggcagagtgaagattgcaaaaataaatataaagaaaaaacactctaaaaaagtgaaaatttatctgctaaaagtaagtgaagcaaatggttatcaaattagaatttatacttcgaagaaaagggcgaagaaaaataaaaaagcattgattaccaagaacataaaatcttttagaaaagtgtttaaatcaaagaaattaaaaaataaaaaaagactttacgtgagggcaagagcatataggaatgttggtaaaataaaaatttatgggcgatggtctaaaataaaaaaactcagaatcaggtagaagaagacttggtttggaagggctggtaatttatgaataatagaacagaacagtatatttggattacatttggaaatgagacaaaaaatgagccaataaattattgcaaaaaaaacagtaatgttatgatggggcttggatatcatattaatccaaaaacaagagaattagaaagtaattattattgtagttcaaatagtgtggaaagtgattgggtagcagataaatatgcttttaatccattagtagcacataaaatcaaattaacggtaggagaagatggttatattgtatgggttgatggagaaagacagattgtttatcctctacccgaaaattataaaggtggctatgtaggcataggtacaggatatacaagtacagagataagaaatttaagaataaatctaaaaaaagaagagccaaatagttgtacatactttacaaattgccaaaatgagggatttgagatgcctgtttcaagtttttatgaaaaggggaaggatgtatataagcgaatttttaatggttcaggaagttttatttctaatataccaattatgttttttgaggataaaatggaaacttttgaattagaatttgacttattctttgctgagtccatagaagagaatgctccggcttcaaaagaattcgaagatccgtttaggacatattcttttggtccatatccattacaactattttcagagtggaaacagtatgatgacgtttatgaaaccattttacataaagacagtttcgagattaagacgaagtcaccagagtgggatcaaaaggaacgttccttgtttatttcgtgtcctaatgtaggtggaatcagaatatcttctgaagcacccaaaaatgcagatgcatcttatgtaggagatactgctatatttgaaccggagtactcacttgcaattgataaagcagactttaataatgaattgataggaactgatggaacaaaagtaaaaataatatgcaagacaggttattgggggttagagatatataatgctcaaaatcaactgatacatacaattaacaaatggaatttatcacgttctgacgaccgatttgttacacgtcaatattctcttgagttgccattgaatagtgatgaaattatttttggcacaggagagagatataatcatttcaatcaacacggattgagaatgtgtttttggaatacagatatgtgttatcagggatatacatctcttgatacacatgaattgtggagaagttacaaaaatgttccggtagttaacagcaacaaggggattacatattttttcaatactacttgttatggggaaggtgattttggatatacggacaaaacaagaacgagaatttcttttgatgacagcagagtagatttttatgtatggacaggaacaccagtagaaaatatggtgaagtatactgatttgacaggaaagcctgtattaccaccaaagtgggcgtttcgttatcaggcaggcggttctaatggcttttggggactaggtcagaatagagggaaggaatatccaagagaaattacgagaacgatgattgaaaagttcagcgagatgggaacattaccgtctgctatttatatggaaggcggaggtgctgatgataaagtatgctatgatatgtgcaacgaaaaagacattaaggtaatgcagtggaattgtggcgatttctggccggaatttgtgcatgaaaattatccggataaggattataaagaaatgccgatggtaaaaaatatatataatccggatgaggtacactattttggcgattttacgcataaagatgctctttctgttttaaagaaaattcatggagaaagaatcaggtggggactgcgtggtggaatggtagattttactgagttagttcctatagatacaaagtttgacaatggattgatgggaaatcgaatgcacaatttctgggtatggtggtatgcaaaggcatatcatgacttgtatacagaaatgacaggtggggattatctatgttacatgcgcggtgcttgtgccggttctcaaaaatggaattgtacatggacaggagaccagatgaatagctttgacggattaaaacaacagatagtaggtggattaagtttgtcggcgagtggtttttctatttggggaaccgatatgggaggtctttcagaaaaaccggaggatgaagtatatataagagcgtatcagttttgcacatttatgccaattatgcgtaccggaggggatgcaacgaaacttccttgggattatggtgaaaaggttcaggaagtgtttaagaaattctattggttaagagaaaatcttcttgatatgatttatagttatgccatttattctcataaaacaggtattccaatgacacaggcaatggctctggcttttccagaatgtaaagaagctgcaggaaatgaagaacaatatgtattttgtgacaacattttgtttgcatctgtgtttgaaaaggcggatacgaagaatgtttattttcctgcaggacggtggtattcactctttaatgatgaagtaattgagggagaaggatatcagaaagttgctgcaccacttgattattctccggcatatttaagagatggagcggtgatacctgtaactttaggggcttctctaaaattgatggaggatatgctggaaaacagatataaaggtatattgattgcaccacccgaaatagagcgctcaagtcagatatataaagatgagaacacaaaattagtcatgattagcaagcggattacggatcaaatgtttactgttgagattacaggagagaatgattttgaagtggcagtaattttagccgaagcaaaagaagtatctgttaatggtcaaataatcgggaagaaagcagacattatttctgaaaatgagggatatgtagtgcaggatggcaggacatatgtgaaacattcaggaactgaaataaaagtaattcaggtagttacacaatgaggtaatgagtttttagaagatttttaacataacaaaaagacaaaaactttttagatggtttttgtctttttgttttatgggtcgtcatgatttagaagggttattgataatagatatcaataacagaatttcttttatcacgtacttttatagcatcatctccccatacagtatctccgaaatactcttcgccatcaataataattttctcgatttgagcattccaggtattttttctgaaagggttatgcaggataaccttgttagttgataaaaaattatatgtgatacgattattttgatcaaacaagtcaccgcacagttttggacgaagagataaacctaagcgattatctttataaataaaaggatgtttaccaagaaacatgtctgtccaaatgtataaaacttctgagttagaacctgatagcctggaaacaaaatttcgtccgtgtaaagtttcatctggattagcggaggagacaatgaatgagcaattttctaatatggaacgaccatatatttccggattgcagaatggaacaaacacatttgtcaattcttcataaaaacgttcatagattccactttcaatcagtgaaaacaggaatttgtattccatatgaagaaaaatggattcattttcctgccatccgggagtaaaaacagcaatacggccgaactcaagtccctcagtaattgtaggagcacttgttttgtacatttttagttttttatcgtatagttcagaggcttttactttgtctaagatatgagaagcttctgaaggattggtacagtttcgaatttgtttcgcaggtccctctaaaaagtctacaactttttgtggttgaaatgcgtttactttaatatttggataaccatttgggttttcttttataatttcataatcagtagcgacatatctaaagtaagtaggacagagtccgtcgcctagttgcattgcttttattactccatcagataaaagatttatatatatatccagtgaatggatgaaatcaggtatgtccatagcgacagtttgtccactgattgagtaacaggttttgtcacgataagtttctcttgctgtagccagagcgtcccataactcaaaaccagaactacatgtggcaatggaatcattcactttagcatataattcaaaaagttcttcaggaactgtaattgtatgattgctatattttgttaaaacatcttttacaaaatggcaagtacgtgcaacttcgaaattttcactcataccactgccaaagaggctagggagaccattacaggcatcgttccagccggcacggttagcttccatctcaatacccatctggcaaggatcaagtagagcgattttattgacaataatggcaattaacttttctattaaattagtatagtaaatttcatcggaactggttttcagccagttcgtatcctcggctttatagcctaattcatatttttttgtatttacatagaaagcatctaattgtcttgctttttttccgtcgaaaaaatatttttcgttacggggttttactgtttggtctgaatcgaagtatttgtagacctttgatttgaatattaaatcttctatcttttctggatagatgcgttgataacataatatcatatctaataaatagtcccattggtcaatgtagtttccgactttttctgtagatgattcatagttttgctgacaaaaatctaatatacgatgaagaaactcgtcaatggaaatagtgattgaaatgttattgctaagaatcacatttgccaatgagcctgccgtgaatctgtcttcaagtgcagaaattattttagattttccatgtaatacagtatcatcaagaaatttataaacgtcctctttgtgtttttttattacagaaaaggtgcaggcttttacgtacataggtgtatagccgtctatttgtactaatgaataaaattgtctgatgtcaaattcattaatctctggatgaaaaataatatcacatcgtctgttttgtaaaacgtctctaaaattaccatcaccttgagaatagaattcggcagcagtagagaattgattataatctctctcagggtcaccatgttttcgggagaaaaggtgaagtactttatcatcattactgccggaaacaacaataggatatccaccacgcaaaaagttatctaaataactttggcggaaatattcatcaagaataggatttccggttgttgttgcaatatcattggtatattttaatgctaattggtcagcttctactaattttttattaatatattctttatctaaaatgtgtggtataagacgattaataaaatcttcgttgtgtgcaaaaccacataatgtagatagtgtatagttttggttagtacttaacttttttgccaccggagcaaacgcacatgaaattttgtttgtaaagtgttgtgaataaccagctacaaatttaagaccgtgcattatgaaatttattggaaattgaagagatgtttcattttcgaataaggcacatgggtcatatattgggcatatagttccgttattatcaaaacacatgtaataatagccgccaacattttctttcatttctgcggcatcatcactttctatgcgggagaaaaataaaggaacatcattttttaagttacttacggtattataggaacgcatgagatttgccattgtggtaaattttgttcctggaataccataaggaataatgcgcgacataccatctaagatttcaaagtcagcttcttccccaagattagtgaaagttacgtttctgaccagagcaccaaaaggttcatgtggtagaataaagtatgtaatttctgttttaaagttatgcgtgtagtcggtttcaataatgcgaaaagaatttgctttaattcgcatagtgcgtttaacttttgcatcataattggcagaaaaaggctcgaagtattcatcgtttttgcgtatgaatgttcgaaaaccttttaatgaagtgttttcataggcgataaccgccggttgaaattccataattggattttcctttttctcaataccaaaactagtcaggcattgtcccctgtttacgtaaaaactccatagaggaattccatcttccccggtaagtcccggaagaaaactggtaaagggggctttagaatcgtaattttcaatgataaattcattgttttcaagtctgtaatcactcataataaatatatctgcctaaaaggcatgtcctttctaaaaattattatatgaaacgccatggtattttttatttactcacggcgtttgattatagttccatctttttttgtggttgatacgaaagaagcatccaggtgtttttgcctatattgggaaggtgtgattccttccgcattggtgaagacacggctgaaatacatctggtccggaaaacctgtctgctcagcaacttgtctaatggacattgttgagagcagcatggattttgccttttctattcttaaatttgtaagataggctttagggctaagaccaaaatgttttgtaaacgttttggaaagccagctggaactgtaattcagttctttggcaatagaagtaatgctgattttgtttggataattagtattgaaaatttctaatactttttctaaaatcaaatcatttttggaagaaatatatgtaatagtacagatatttctggaaattgtgtacaataattctaacattagaatagatgatatatccataaaatgaagttttctgtttagcagttcattaataattttatcaaaaatagtatcatattcaggacagatagttcccataaatgcatgtttcgttgaaaggtttaattttccaagaatattgtcaacattatctccagtaaaatgaatccagtaaatatcaggtgcatctttaaggaaaaattcataatgcattaattcgcttggtttataaattagaattccacctgcagaaattgaatattgttttttgtcaatatagtagtaaatggtgccatgctttacatatagtaactgataatcctgtcgctttttttgatttacgcagaaagaatcatgggtatacaaaacatgccttccacagctggtggcaattacgggatattcatagttgggtaaatctatttcggaacttgaataacatgaactattaatagataacataagatacctccacgaataaattaattttattataacaggaacaactaaaaaaaagaatggatttaattgacagtagataaaaaaatatggatttttttgttgcacatataatggaattatttctatatatgtcctgtaaaaatatatttttgataaatttaaaaagaaatataaaaaataaatccatatcaatcaaaagaagtgtaaaaaatccatatgctttattgtcaaaataaagtaatataaaattacataaacagtagtaagtagtagtaagtaaacaaatatagaagggacggattttatggataagaaaaaaatgtaccgtcaggtggaaaaaaatgaatttggtaaatttaatagtggagcatcgccaacagaaccaattgtagatgaatggagaatattggaaaaaatggttgatattgtaaagttcgaggaacggttaaagattacatatcaattaggaaatgaaaatatagattttgtcatatcggctccaagtttgggaggaatccgaattacaacaacagagagtagtttttttaatccgacagaaagagaagaaattcattttatagaaagtgacgacaaggatattattctttttaggacaatggatggtacagaatttcatttagtaaatggtccggagtggacaatcaaaatttttgatatttataatgtacttcaatattgtttgacaaaagacagcattcgttttggattctatgaaaataaattagtaaaaatccgcttggaatttgatattgatccagatgatgtgcttttaggaatgggagaaaaattttcagatataaaccaaaatgggaaacgacagtttctttggaatacgaattgtgaatatgatattgatagtgatggattggaattgtggaaatcttataaaaatgttccattgttacatagttccagaggcaatacgttgttttatgcttcttattatccggctgtcagcgacttgggatatacaaatccgtataaaggaatatgggagttttgggaaacagaatttgatatatatatttggacaggaactttagacaaaaggttacgttcttatacaagattgacaggaaagccgtttcttccacctaaatgggcgtttcgttatactatgggggcaggaaatcaggtatggtatggggagaattgggaaaaggaaaataatccggaaaaatacttaaagatattaaaggaaatgttgaatggatataggagattaggaattacaaatctttctgcaatgtatggagaaggatggatttcagaaaataggattgcttatgaaatacttaatgcacaaggaattcgtatgattgtctggtgtacaccggattcagagttagaacagaatagaaaatatctgccaaacgttaaggaggaagactatcctatcattaaaataaaagaaggttcgaaacaggaatcagggggacgtattgatttttttaaccacaatgcaaaagttttaattagaaaccaaaagaatgattattttattaagggtatgcgtggtggaatgctgggatatagtgaacagattacagaggacgatatgtattgcaatggtattacaggaaaagagatgcataattggggggcatactggtacacaaaggtttatggtgaggcaacgcgggaaatcatagatgacgattatatatattattgtcgggaagggtgtgcaggaagtcagcagtgggcagcagtttattcgggaaatcagccagcagagctgtatggattaaaacaacaattaaatgcaggattatctgccggcttatgtggattcgcagtatggagtggagatatggcaggttatgaaggtaagccgaatgtagagacttacatcagaggagttgagtttgcagcttttcagccattaatgcggagtcatggaacaaaaacacgctgtccatgggattttgggaaagaggcggaaacagtatatttgaaatattattggttacgggaaaaccttatagaaatgctttatagtgcggcaatttcatcaaatcatagaggattaccaatgatgaaagcaatggctctggcgtttcctgaagagaaagattatctgaacaatggagaacaatatttattctgcgatacaatattagttgcaccggttttggaagaaaaggcacagacaaagaaagtctgttttccgaaaggaacatggtatgaattgtggagtggtaatgaagttttaggaagttgtgagagagaggttccggtatctttaaaagattgtccggcatatttaaagtccggaattgtacttcctgttattatgaatgaaaaaatgaagtgggcggtcccattttcagaacagaatcagacaaaagtgatagtgattacaccaccgaatatggatgatgaatatcgttattatgcagaggaagatgataaatatgtattcaagtgtgtaaaagaagatgaaagagtatttacaatttattctttgaaagacattttcattaataaactcttaatatatggaaacgtgcatgaaatagaggttgatggcaagaaagaggaattttctattgtatatgaaaatcagacgatgactgcacttagattaaagagcgataggtggaataaactgacaattacttgtaaataaataacaagcttagaaagagagaggaaaatgagaaattacgagaatccgttggtaaccagcaaaaatagaatgaatcctaggagttactatattcctgaaggagtatcggaacttcaaatgttaaatggagagtggagttttaaatattacaaacgagacattgatgtcaaagatgaaattgcagactgggacaagataatggttccttcctgctggcagttacagggatatgatgatttaaattataccaatattaattacccatatcctgtagatccaccttatgttccggatgataatccatgtggagtatatcagagagagtttgatataaagaaagtatggggaaagatttattttgtgttggaaggtgtttcttcctgtgcgtatatatatgttaataaagaatatgtaggatttacacaaggaagtcatttacaggcagagtttgacattacgaagtttgtgactaagggaactaatacgattcaggtaagagttttgaaatggtgttgcggaagttatttggaagatcaggattttctaagatataatggtattttcagggattgctatattctacagcgtccgaaagatcatatagaagatgtgaggattttatcagatgcggagaagatttcagtagatgtgggaaaagaagcagatattgtattattagatgcagaagaaaatgttcttcagttggagaggaatgcatgcaatgtagaatggaagatagagaatcctatattgtggaatgcggaaaaaccatatttgtacacaatcaaaattaagcgaaacggagaagaaattgtccagaaaacaggaatgagaagtattgctatttcggaaaagtcagaacttttgattaatggtgtgcctgtaaaactacatggggtaaatcatcatgatacagatccaaaaacgggatggtatcagaccccggaagcactggtgaaagatttaaaattaatgaaagaattgaatattaactgtattcgtacctcacattatccaccgacaccgcatatgattgaactgtgtgatgaaatgggattttatgttattctggaaaatgatatggaaacgcatggatttcgtatgagaaatcctaatgaagaggaccgatatgatatagagacaggagaatggccatgtcagagagccgaatggaagaaagagatggttgagcgtatgcaaagaactgttatgcgggataagaaccataccagcgttattatgtggtcattaggaaatgaaagtgcttttggagaaaacatgaaagagatggtccgcttcattagaacgcagaaggattgtcgtttaatacatagtgaagatgccagcagattaggagaaagtgattatgtagatgtacattctacaatgtatcattctctcgaagaagtagaagcgttttttaaaacaggaagcaaacagccatattttttctgtgaatattgccacgctatgggaaatggaccgggggatatatatgattataatgaactgattcatgcaacgccacaaatgataggaggatgtgtatgggaatgggcagatcatgttgttttggatgaaaagggagtacagagatacggtggagattttcaaaatgaaaaaacacatgacagtaatttctgctgtgacggtatggttttttctgatagaagtattagaagtggttccttagaagtaaaaacagcatatcagccaatggtgacgcagtatgagaatggcgtgcttacagtaacaaacagatatgattttacaaatatggaagattgtgaatttacatatgaaatacaggcagatggggaaacgattgtattcagaacgatgaaactggcaatagaaccacatgagagcctgaaattaaacatagatgtgccaaaggtagaatatcaatatggattgtatttaaactgcagattatacaaagaggggaaggagtatgctgtcacacagcataagttagcagataccccggcaagacagaaaagtgatgaagcagcggtacaggcagtgtatgaaggagaaaatgtggttataaccggggaacattttcgatatgtattttccagacagtatggaacatttacgagtatgaaaatcaatggaaaagagcaattggcaggaccaatgagacttacagcatggcgggcacctacggataatgactgtaatgtacagttagagtggggcggattagagagttaccgtcaaaatggcagaagtgaaaatttagacaaacagttttctaaaatatatgattgcgaaatcaaggatggaagaattattgtaaaaggagccttagctggagtagcgagaagaccattttttaaatatatgatgtcagttaatgttacaaaggatggaaggattgatatacttttagaaggcaacgttcatgaaagaacaaaatatttgccgagacttggttttgagtttgatattcccgaaagtaatgcagcatttacatattatggacgtggagaaggtgaaacatattgcgacgagtgccattatgcaacgattggcatgtatgaaagtaatgcggaaaaagaatatgttcattatgtgagaccacaggaacatggaaatcatatagatgttaagatgctgaaaataggaaatttaaagtttgaaacagaaaagacatttgaatgtaaggtctctcagtatagtacagaagtgttaaccagagcacagcatacggatgaattaattaaggatggaaaaacacatgtaagggtagactataaagtttcaggtgtaggttctaatgcctgtggaccatttctggctgaaaagtatcagttaaatgataaacagatatgttttgaagtagagataagccctgatgaacattatgagtaaaaataataaagtatattatagtgaaaggggatgaaaaattaccctgacagatgacctgcatcagctaatgctgatgcaggttttttcatttcaaaacgatgtttgaaagttgttagaatacaaaaaagtccaaaaaaacaataaaacccaacaaaaaaaatatatcattttaattttataagagagataatttaaaataaggaagaaactaataatattcaatataaaaagatatacttaaatgtaccttattcagaaaaagaagaagctaaagcacttggctcaagatgggatgctaataaaaggcagtggtacataactgagaatttatacacatcagcttttacgcgatggtcataactttgagtggcggaatatttccgccacttcttttttttctaaattaatacattttaaatacgaataattattataggaggacaatatgaaaataggtaaagaaaaagaagttgaaacaaaaatacacaagaagcaggatagcaagattcataagaagaaggatgtaaaaatagataacaaagcaatgtctacaaggacaaagaataatgcaagagcaatgagaaaagtagtcgagtcaaagattacagatagcattgaaggtggtgaaaatattgaagaaacttttgaagctacaggaatggcaatgaagcctctaaagagcattgcaaaagaaggtaatcgaattagaaaaaaggcaaaagtttcaaaacttcaaaaagaggtcataggaagcagggtgagaaagagaacgattaataaaggcaaacaattagcaaagaagtagaatgatgaaattttttatggataagctgaaaccaaacgaagagcagaatgacagccttttcaaacttgtggggagcatggtaagaaacaaaatgacttttatgattaaaaaagaagtatccttgttggcaccattgattacaccaattttaataattgtaatagctgcaaccggaattgtgtttgccgtaattgcaattctgtacaattcaccatttgcattgtttcttccaccattggaaagtggagacacaatacagtcagtgacaacacagtatgtttcagaatttaatcaggaagtgcagactttgattgatgaacacaaggacgctgacaagggaagaaaggtatatgtggattatgaaggaatgaatagtgaaccgtccaattattacgacattatgagtgtatacatggttaagtacggatatgaaaataccgcgacaaaaatgaatgaaacgaacaagcaaaatttgaaagcagtgtttgatgatatgtgtaagtacaccacggagaatgtaacagagaaaaaaggcaaaaagaagacaaagtacttagaggtgagaattacactaaaaacatatacggaaatggcaatagagtaccagtttgatgagaatagaacagcaacacttaatcagttgatgagtgcttacataacaaacaatccttctggtggaagtcagataagtggattacagggaagtcttactcctcaggaaataagcaacataacagacaagatttctaatccaacacaaaaggctgttgcttcatttgttttgtcaaaagtaggatatccttacagtcagccattaagaaacagcggaaaagcatttgactgtagttcattggcatactatgcatggaagtcagcaggtgttgacatattgtttggtggtggaacaactgcggctgcagaagcagagggactaaaatataagacggtgaaagaagaaaatctacagccgggagatttgatcttctacagttatacaaccaatggaaggtataagaacatcagccatgttggaatttatgtgggcaatggaaagatggttgaagctgtggatgaagctcatggagtgtgcttggggaattatcataatggtggattagtgatgatatgtagaccaaaaaaataataaaaaataatgtatgtatttatgttataatattttaattgtattagtagggggtaaaggtataaatgacaggtgttttaatctatactgaagcagatgaaatagtcccccttggcttgcaactaaacctaaaaatcgcataatttttaaggcttttgccctgttttgggcagaagcctttttgcatatttaataagattttcttcttcgtgtaatattaaatgtgtcggctgtaaaattaacaaaaatttaattggactttcattgacccatataacaccttacaatataataaaagcaaatatatagcttataaaggaggttccttaatgacgaaaaaaataaccgcaatattcttggcattgtgcatggcaatttccgttttgccgatgaccattcaggcggcatcaaagcccgatattaaagttggcgactatgttaaaatgggcgcgtataacaatgcctcaattctttggcgatgtgtaagcattgacaataacggaccgcttatgcttgcagacaaaattgttgacacccttgcatatgatgccaaaacaaatgacaacagcaattcaaaatcacacagcagaagctataagcgtgatgattacggttctaactattggaaagacagcaatatgcgttcttggttaaattcgaccgcagctgaaggcaaagtcgattggctttgcggcaaccctccgaaagacggatatgtaagcggtgtgggagcgtacaacgaaaaagcgggttttctcaacgctttttcaaaatctgaaattgcggcaatgaaaaccgttacccagcgttctctcgtttctcatcccgaatacaacaagggcatagttgatggagacgcaaattcggatttgttatactacaccgatatttcggaagcggtggcaaactacgacagttcatattttgaaactacaaccgaaaaggtttttcttcttgatgtaaagcaggctaatgccgtgtggaaaaatctcaaaggttattatgttgcgtataataatgacggtatggcttggccttattggcttcgcactcctgttaccgattgcaatcacgatatgcgttatatcagttcatcgggtcaggtcggtcgttatgctccgtggtattccgatttgggcgtaagacctgcattttatctcgattccgaatattttgttacaacttccggcagcggctcacaaagcagtccttatatcggctctgctccaaataagcaagaggatgattatacaatttcggaacctgccgaggacgcaaatcccgattggaatgtcagcaccgagcaaagcattcagctcaccctcggcccgtggtattcaaatgacggaaaatattctaatcctaccatccctgtttataccatccaaaaaacacgcagcgacacggaaaatatggttgttgtcgtttgcggcgagggatacacaaaaagtcagcagggcaaattcatcaatgatgtcaaacgactttggcaggacgctatgaaatatgaaccgtatcgcagttatgccgacagattcaatgtttacgctctttgcacagcttccgaatcgacttttgacaatggtggaagcaccttctttgatgttatagtcgacaaatataattcgcctgttatttctaataatctccacggaagtcagtggaaaaatcatatttttgagagatgtatcggtcctgaatttatcgagaaaattcacgatgctcatatcaaaaaaaagtgtgatccaaacacaattccgtccggttcggaatatgagccttattattatgttcacgattatattgctcagttcgctatggttgtaaacacaaaatcagatttcggcggtgcttataataaccgtgaatacggcttccattatttcatttcgccatcagacagttatcgtgcgtcaaaaacttttgcacacgagtttggacacggtttgctcggtctcggtgatgaatacagtaacggatatttgcttgacgataaggaacttaaatcactcaatctttcctcggttgaagacccggaaaagataaaatggcgacagcttttaggttttagaaacacatatacttgccgcaatgcttacggctcaaaaatgcttgtttcaagttatgagtgcataatgagagacacaaactatcaattctgtgaggtttgccgtttgcagggcttcaagcgaatgtctcagcttgttaaggatgtagacctttatgttgcaactcccgaggttaaggaatatacgggcgcttattcaaagccgtctgattttaccgaccttgaaacaagttcatattataattacacatataatcgcaatgaccgacttttgagcggcaacagcaaaagcagatttaatactaatatgaacagtaaaaaaatcgagcttagaactgttattcaaaacatttcagataaaaatgcacgacaattaaaattcaaaatgtggattaagcactccgacggaagcgttgcgaccgattcatcggggaatccgcttcaaacagtacaaacctttgacattcctgtttggaatgataaggcaaatttctggccgctcggtgctttggatcacatcaaaagcgactttaattcaggcttaaagagttgctcgcttatttatcaaattccgtctgatgcacagcttaagagcggcgataccgtggcatttcaggtgctcgatgaaaacggaaatgtgcttgcagacgacaatacggaaacacagcgctacacaaccgtttcaattcagtataaatttgaggacggctctgaaattccaaacactgccggcggaacatttaccgtgccatacggcacaaagcttgatttaacaccggcaaaaacactttatgattatgaatttataaaggttgacggcttgaataagcctattgtttcggacggaacggttgttacatattattacaaaaataaaaacgaagaacacactcacaatctgactttggttgctgcgaaagctgccacctgcactactgcgggcaattccgcatactacacctgcgatggctgtgacaagtggttcgcagatgcaacaggatcggtagaaattaccgataaaaccagtgtgaagattccggctcccggacataccgcaggcacagaatggaagtctgatgatactaaccactggcatgaatgttctcgttgccacgacaaaaatgacgaagcggctcacagcaccagcgagtggatcattgacacggcagctaccgaaaccgcagaaggtgctaagcataaggaatgcaccgtctgcaagaagattcttgaaaccgcaacgatccccgcaacaggcagcagccataccaatagctacggcgtatacgttggaatgacatatacggcaggaaatttaatataccagattacatcaattgatactgcaacagtaggacaatcaaaggttattggtgtagtagctgctaaaaagaataaaataaagaaagttacaattccggacagagcagattgtaagggatatagattaaatgtaacaacaattggtaacaatgcgtttgccggctgcaaggcccttgagaagcttacaataggtaacaaggtaactgttatcggaaaaaatgcatttaagaactgctcaaaacttgaaacagtagtaattggaaaagcagttaagacaataagttctaaggcatttataggagataacaagattaagaagattacattcaaaggtgacaaacttaagactgtaaagaagaatgcatttagcaagaaagcaaagaaaaatattaagtctaagaagactaaacttaaaggaaataagaaagccattaagttgtttaagaagaaacttaaaattaaataattaaaaagtaattaaagaggctagcttttcaagagttggacatgtcatgtatgtcttgtattctgcgaaaaggtagcctctaataagtttattaaggcagtcagatacaatatcgccaagcaggtcaaaaagatattttgacaataatgtccagttggattatcattggagtgttcaggtacttcgttacaaacatgaggaattctctatcgtgtattttccgacagcaaatttacgctaccgaaaaataatataaacttgacttttcgttaaacaaaaactataataacaacataggaggtatgcatatgtcaaagatgggaagaccaaaatcagacaatgctaaggagcatatcgttgctgtaaggcttactgatgaggaacacgaaagactcaccatgtatgcaaaaagacattctctgaatatgtccgacgttctaaaaaaaggattatattttattttagaaaataaaggagaagattaacaataaatatagacaattttaattaaaaaaaattaggtggctaccatttaattgattaatcacaataatacaagtaaatggaaacaaaaataagtataaaaagtgccgattttaaagtaattacaacgcgtaatacgtcaggaaaatcggagtttgaataacggattaaaatgccgaaagcctgtatttatgcgggtttccggcattcgttttatcaaatggctctagtttggctctatttgcgggcgtagtaatataaaaaatgtgtgttgagaattagcatagtaggagaaaataaaaatgtttaaggttgcaatattacaaaaacatgccattcatgcaaaaatagataagaatattgaaagtaaatatgtagatgataaagtggcatatactaatggaaagcaagaaatgatagatattattctgaattataaatagattgttgacatgaattgccaagactggtatattattcaacaaaaacaaggagaatacacacatgaatcagaacttatattcaagacattatatgtacatgtattacggacgtacacagctataaatatgcaaggttagtgcattaggttatagcttgtaagtcttttagtctagtgcataaaaccaggatataagagaagaatttacatatatggcatcttattacattggagatatcgcattagacatttaatgtttggtgcgatttttttatgtttacaagaaagaggtgcagaaaatgaatgatttaattgaactgaaactgataacaagagaggatgcagaatgtctgcataaactgcagatagaagcgtttatgcccttatatgaaaaatatcaggatgatactacaagcccagtaaaagaaagtcttgaaataatagagaagaagatagctgaggacaaatcagatttctattttattttgtttaatggtgagaaggctggagctgtaagagttaaatggtataaaggtggaaaggtatatgagaatgtaaattggatagctcctatttttattattccacattttcaaaataagggaattgccagcaatgttattaagcaattatttaatatctatcccaatactatcgaatggcgattagatacaattaagcaggaagagagaaattgttatttgtatgaaaaatgtggatttgttaaaactggagatgagacagttgtaaatgaaaatatgacattgattgattatgtgaaaaattgcattaaggtgaggcaatttaaggaagaggatgccaaagaggtcagaaatcttattgtcagaaatttcttagaggttaacagtaaagattatggcatatcagcaatggagaaacttgcaaaggcttacgatgtggaaaaggttttgaatgtggcaagttatgcacatatgtatgtctttgaatttgatgaaaaaatagttggaacaggttctatctcaagtttttggggaagcgaaacagaaagtatacttctgtgtatttttgtcctcccggaatttcacggaaaaggtattggaagaaaaattataaatacattagaagcagatgaattttatgcaagagcaagcagaattgagataccggcatctattacggcaactgagttttatagaaaatttggatatgattataagaatggtgctaaggaattggatgatgagcatcattgcagattggaaaaatttaaggaggcaggattgaaatagcagcagatttaatcgatatcaaataaacatggttgtcaagtatagagtttgggtaatataattatttcataaacaaggtttaggtaattgattgttataagttattagtataggaattgataaataaatttcatataaccctctagcgtagggtagttgtcacccacctcccaagttgatatgataagtatcagaaggacaggtgattgctatgagttacaacaaatatccaaaggaaatgaaggaagccataatggcaagaatgcttgaaggcgatgaaacagtaacagacatccagcgagatacaggagtagggatcaatactttgtacagatggagaaatcaggctaagcatcaaaagggcttataagcaacaacaaaatataagaatgcagacaaatggagcagtcaggataagttcatggttgttcttgaaactgcaaatttaacagagatagagttttcggatttatacagcagaaagattgttggttgggaagtttggaaaagtgaagacgcaaagcatgcaagtgaattccagaaagatgggcaagagaaaccagagactggagtttttcagaagaagaatggctaaattcaagacaggaagcagaaacgaaaaaagagacaaaagtctcgtgaaattaaaagaaaggaaaatcgggtagggtgacaaccacccgaaaaaattccggagaggagatatgtatgaggagaaatatattatgtattatattgtgtatgatattactgagtgcatgcagttccaaaagtaatgagattattgaagggtatagtaactgtgaagaatattacagtgatggatttcaagattatatagattattgcaaatatttctataaggaaagcgagaataaaaaatttgaggagaacagttattattctattgtaacaaaagaaaatatagatgatataaagagttattttgataagttcccttatgaaagtatggaggatagcaataagtatgactttgaaacagataatataaatgaaggagattattatagcctgagagcagggtcaaacaatgataattacagtgtatttttatatgacgtaaatagtcatatattgtactatatacattataatatatagtgtaatgaaaattattgatttgcaattgtgcaattagattattttatgcactagcactaaaaaataaagtattgtgtatagaatgtcattattaagaataatagttcattaaatttgaaacgtattttttataggtattaaaataacttaatgaaataaaatctgacttatgttataacacttccatggcaacactatggcaacacgaaatcagaaggataatacaaattatataatataggtaaattaacagataaaaacacacgaaacttaaacaaatatgtttaagtcaaactcagtacaagccgagtttgaatagtaaaaaaagaaaccatgggcttgaggttgtatcctatttgatgctatatggtttctttttttgatttcttcaatgaattacagtacaaatatttgcccactatttcctaagaaattccctcaacctatccggataataattcattattaattcattatcaacattcattgattctaccaatggaccgcagtggtcgtagttggcaatatcagttgtaaagtgtgcatcacttcccattatgaaaggatgattgtatttcttacagttttcgataattaatttctggttttcttttacattttttctatttttatccctaagggcattattatttatttcaagaagaacgtgatattcttttgcagcctgaacaagggcttcgtaatcaagaggacaacggccgtcgtcaggatggcttataatgtttacattaggattcttaatggcatttattattgcagcagtgttttcttcttttgagccgaacttgtaacatacagaatggatgccggcaataacaaaatcaagtcggtcaatgtattcctgaccaaggtcaagtgtaccattgtagtcaattatgttaatttccgcaccaagttttaaatctaatccaaaaaggtctcttggaacaactcctaaattcttaaaatacaaatcggcacaagttccggggattcctgaactgtgttcagtgattccataaatttcaagtcctttgtttactgcttctttacacatttctgtaagtgtggcataagcgtgaccgcttgcaatggtgtgagtgtgcatatctgcgagaattttgttcatagatttttcctcctgtatacttcgtttatttatgattacacggattgttgcgtgcttcgcactcccacaatccttccccttaatattcgcatattgtgaagtttgcacttcacttttatgctcatattgtgggcgtgtctcaaagtcattatccctttattgtgcaggcacaagtgagataagactttttgacgttgtaatcatttaatattgtagcaccattgtattgacaatgaaataagataattatatattatataaggttaggaatactaaactttttgtttaaaaataacaaacttagccttaaagtatgattaaagctaaaaataaaaagggataatactatggatataggaaaaaagattaaagagttaagaattttgaaaggacttactcaggaggaattggctgatagggcagagttgactaagggatttatttctcaggttgagaggaatcatacatctccgtcaatagcaactcttgtggatattctccagtgtctgggtacggatttgaagaatttttttgaagaagatgaggataatcagattgtcttttctaatgaagactattttgagaaggaagataaagaacttaaaaatatgattcagtggattgtgccaaatgcacaaaaaaatctgatggaacctattttggtcacattagaggcaggcggttcaacttaccctgacaatcctcacgagggtgaagagtttggctatgttttgtcaggaacgattaaggttgtgcttggaagcaagacttataaagtgaaaaaaggtgaaactttttattatgaggcaaaatataagcactatcttaaatcagacaagggcgcaaaggtgttatggattagtggccccccaagtttttaaaacagtttaggagaaagttatggaaaagaagattattgaattaaaaaatattagcaagaattttgaagaccagcaggttttaaaggggattgatttaaacatatatgaaaacgaatttcttacattacttggaccaagcggatgcggtaagactactttgttaagaattatcggtggtttcgaggaaccaagtaatggtcagttgatttttgacggaaaggatatttcaaaggttccgccttacaaaagagaagtaaatacagtatttcagaagtacgccctgtttcctttcttaaatgtggcagataatattgcttttggtcttaatcttaagaaaatggacaaagacgtcatagagaaaaaggttagcagaatgcttgaactggtaggccttaaaggctttgaaaaaagagatgtaactttactttcaggaggtcagcagcagagagttgccatagcaagagcccttgttaacgaacctaaggtattacttcttgatgagcctttgggtgcgttggatgccaagcttagaaaagatatgcagactgagcttaaaaagattcagaaggaagttgggattacatttatttttgttactcacgaccaggaagaggcactttcaatgtcagatacaatcgttgttttgaacgacggtgttattcagcagattggaactccaatggatatttacaacgagccacagaacagatttgtagctgaatttattggtgagtcaaatattattgaaggtaatatgattaaggactgtcttgttaattttgatggcagagactgggaatgtgtagacaagggatttaaggataatgaagatattgaagttgttttaagacctgaagacatggatgttgtggaaccggaggcaggtaaggtttcaggaactattatttcaaaagtttttatgggtgttcattatgaatatctcgtggaaactaaaaacagaaattataaggttcatacaacagaaaattatgaaattgggaaaaaagtaggacttacaattgatccctttgacattcaggtaatgcacaaaatggagaattaaggaggaaagagatgcatcattataaaggcttagtgaaaccttatgtgttatggtcttttctgctaatagttttgcctttggcattaatattactttactccattacaacaggggataattcacttataacaatacattttacattagataattttagaaaaatatctgatcctatttacttaaatgtttttattaaatctttgcaaatgggactaattacaacgggagtttgtcttgttttggcatatccaatggcgtatattatttcaaagtttgatgaaagttctcagaatattttaatactgttagtcacaattccaatgtggattaacacattgcttagaacttatgcatggataagtcttttgtcagacaacggaattattaattcattatttaaactgttaggattaaatcagcagacaatgatgtatactaatttttcggttgttatgggcttagtatgtgatttgttgccatttatggttattccaattcacacatcactggcaaaaatggaccactcacttgtagaagctgcaagtgaccttggcgccaacagatttcagacttttacaaaggttattttgaaattgtcacttcctggcgttataaacggtgtttcaatggtatttcttttgtctatttcaagtttcgttataccacagttacttggtggacatcagtttgtacttattggtaaccttattgaaaatcagtttatttctgtaggtgactggaatttcggaagttccatttcagttattcttgcagttattattttagcaatgatgggatttatgaaaaaaatagatcctgacgagaatggaggtaactaatgaataagaagaaaatctccataggaccaaaattatatattacattgtgttttatatttttctatttaccaattgcagttacaatgtttttttcatttaactcatcaaaatccttaactaagtttaccggattttcacttaaatggtataagaaacttttaacagataatgatattattgcagcagtttatgtatctataagtattgctgttattgccacaattatatctacagttcttggtacaattacggcaatcggactttcaagaagcagaaaaattcttagagaatggcttttgaatgttaacaatatgcctattatgaaccctgatattgttacggcaatcggacttatgattttgtttacgtcaatgagacttgaacgtggatatcttacaatgcttttagcacatattgctttttgtacgccatatgttataacaagcgtttatccaaaggttcgaagtatggaccacaaccttgcaaatgttgccatggatcttggtgccacaccgtttcaggcgttaactaaggttattattccgatgttaaaaccgggaatttttgcaggaatgcttcttgcatttactatgtcacttgacgattttgttgtttcatattttgtaacaggaaacggtgtttccaacatttcaattgttgtttacaatatgacaaagagaacaaatcctacaattaacgctttgtcaacattgcttattcttgtggttgttttgattttggttggtgtaaatgttataccggctcttgcaaaaaaaagacacaaaaaggttgaaatgtcagcatcacacaatagtccccttaaaaagattggtgtggctgttgcaactgttggagttttggcagtggcagtattttgtggggcaagattttcagccattagcagtaagccggttcttcgtgtgtataattcaggggaatatatggatacttctcttattgaggatttccaaaaagagtataactgcaaggttgtatatgaaacatttgattctaacgaaacaatgtatacaaagcttcaaagtggggcagaatatgatgtgataataccgtctgattatatgattgaacgacttatatcagaagattatttgcagccaattgactggaaacttataactaacaaagacaagattattccaaagctcttgaagaatgattttgatcctgataataaatacacagtaccttattattggggaactgtagggattttgtacgacaaaacagttgtagatgaaaatgacttaaaagaaggttggaatattctaaggaataagaaatacagcggtcagatttatatgtatgattctgaaagggattcttttatggtggctttgaaaggccttggttattcaatgaatacaagaaataaagatgaactaaaacaggcgtacaactggcttattgaacagaataatacaatgaaacctgtatatgttggagatgatgttatggacaacatgatttcaggtaataaggcaatggctgtagtatattcaggagatggctcatatgttattaatgagaatgataatatgggatttctcgtgccggatcagggaagtaatgtttggactgacggaatggttattaccaaaaagtgcaaaaatactaaacttgctcatcagtttattgattatttcttaagttatgatgtggcagagcagaatactgattatataggatatgacagtgcagtaaaaagtgtttatgagtatttcaaaaatgatgcttttgaaggaaatccgggctgtggacctgacacgtcaaatcctaaaaatgaagtttttaaagaccagccacaggatataaaggcgtatagttcaagtctttggacaaaagttaagtcacattaggatttaaaaattcaatcacactaaagtttttggcttaaaaattaaaagtaatttaaatatattaaattgaagtttatgttttgaaataaatgagagagggaatcatggacaaaaatttttggagggaatatttttctattcctaatataatgggatattttagaatagcgttggcaatgttatatatgttgctattttacagggcgttagacggtgctccttactggcctgtaattgtgacaattgtaatctcgggaataacagatttctttgatggtaaaattgccagaaggtttaatatgataacagactggggaaagatgcttgatccaatagccgacaaaataactttgggagctattattataagtatgtctttcaaatattccatagttgtatttatggttgtcttttatataataaaggaaggttatatggcggttgcaggaattatatcaattagagccggacacaaaatcgaaggtgcaatgtggtatggcaaagtatgcacttttgcaacttatgtaattctgattgtattgcttttatttcctaatatgccggaagttatggttaatgttttggttatagcagatatgattataatggcatttaccctgataaaatattttatttatcacagaggcttgtgggaagagttaagaggtaagttgccgaaaaacatggagaaataatatggtatactactagtacaaaataattttatataggagaaattaaaaaaatcttgacaaaaatatttatatagtgtaacataacagagcgataagtcataacgcaaatcgcccagttagctcagttggtagagcagaggactgaaaatcctcgtgtctctggttcgattccggaactgggcactatataaatatgcgggtgtagttcagtggtagaacaccagccttccaagctggatatgtgggttcgattcccatcacccgctctatttttttgcccgaaaggctgccgtgctaaagaaagcacggtggcttttctttttatattccccttgttgtatctttgttcttttgtggtaaaattaaaaaagagtgttgcgattttacgcaatgaagaacggaggaattagatatggcagaaaaagttcaatttacaaattcacagatgcttaaatggatggaatatgtggcagatatgcagggagtaagtgcggagaagattaagatgcttaacacttgcagcaagagaagaaatgtgttggcaactattgcaacacataagagagttttgatttttgcagattctacatatcctaacatgttatataaatgctgggaagcaggatatggtgattatgaaatgtactttggtaaagggtacgaaccttctgaaatgaagcattgcaaagtaagcgatatgatggacggcaatttagaaggaccaacggttatttatattgttaatgaaaacacaagagaatcaatgattttcggaatgaagaatgataatttttcatcaggtatggttaaatatgtaggtcatgaaatccgtgcagttattatgaataagcttgaaatggatgtaagagacactgttttacttgcaaatgctgagagtattgcagttgaagcatcaatggtagcttatgaaggggttgttattgcagcggaaagagatgcaggttcacttagaacaatggaagagaatgcttctaagtttggtacccataatattgaaattattcctgaaattactgttgaagcattggaaaaacttccaacgccaagacttgcttttatcgtggcacaagaaagtaccatcgaaaatgatatagtaactttattaaaagtaaatccgaagattaaatttattatttatacattagaattagatattttagcagatattaaatacctaatgaagaaacatggtgtagatgtaacagaagtaatgcagatagctgtgtctaaggtagacaagaatggagtatttgtcgcacagccggcaccatggatgattacatgtgaggtaaaagagaaataatatgaagtttttgctagttgcaattaatgcaaagtacatacattcaaatcttgcagtttacagccttaaggcttttgctgaaaaatatggaaataataataatgaaatagaaattgcagaatatactattaaccagtacagtgatgatattttaagagatatttataaaagaaaaccagatgcagttggtttttcatgctatatctggaatattggaatggttaaggagattgttagggattataagaagatttgcccaaatgtggatgtttgggtaggtggccctgaagtttcctacaatgtggagcaggttcttagggagaatgaaaccattgattatgttatgtatggggagggcgagcttactttcaaagaagtaatggacaagtataattttaatggaattggtattgataaccttaaggatatacttggcataggatatagaaagtctaaaagtttagaacatcagatattcgaatcagaaacaggaatactagattgttcaaaaaaacagagaatccagattataatcaacaaacctcaacagcctgttgatatgtcggacattccttttgtttataaggagatgaaggactttgaaaacaagattatttactatgaaacaagcagaggctgccctttttcatgcagttattgtctttcatccattgacaaaagattaaggtttagaagtcttgatttggttaagaaggaacttcagtttttcatagacaataatactaatcaggttaagtttgtggacagaacttttaattgcaacaagaagcatgcaatggaaatttggtcatatattaagaaacacgataatggtgtaactaattttcattttgaaattgcagcagatcttatgacggaggaggagattgccttaataagtgatatgcgaccggggttgattcagttggaaattggcgtgcagtcaactaacgagaagactttggaggcaattaatcgtaaaacggacattgaaaaaatagcagagattacggaaaagatacatcatggtggtaatattcatcagcatcttgaccttatagcagggcttccatatgagaattatgaaagctttaagagaagttttgatcaggtgtatgcaatgaagcctgaccagtttcagttgggatttttgaaagttctttatggctcaatgatgaaggaaaatagtgaaaaatatggtatggcttatagtggcagggcaccttacgaagtgcttaaaaccaactgggttagttttgatgacatattgaaactaaaagaagtggaggctgttgttgagatatattacaatagttttcagtttgaaaatacaataagaaagcttagtgaactttacgaatcaccatttgaactgtatgaacaattgggtagtttttaccagagacacagtgaaaacggggagaaacattcaagagtaaagcgttatgaattacttttgaattttattaagaagaggaactttgaagagaatattcaatgggaggagcttttgacaaaagatttttatttgcgtgaaaatgccaaaagccgtcctggattttctaaaaacattgaaaaatacaagcatcagattagagagttttttaaaggagaagaggttagaacaatccttatggattatgaagattacgattccaagcagttagaaaaaatgactcacgttgaagtgtttggaataaatgaggacaatcttacatatatattatttgattacaaacacagaaatcctttgaataaacaggctaagctgattaacataacaaagcagataaagagataggaattatggttaaagattatgtgtgtgtggatatcgaaacatccggcgtaagagtaaagtgggacaaaataatagagattggagcagttaaggtaagggacagtaaggtagttgatactttttcggagttgattaatccgggactgaaacttagtccctatattacggaacttacgggaataactgacgaaatgttaaaggataaaccttttatagagaaagttctgccaagatttattgagtttaccggggacgatgtgattatggggcacaatattatgtttgactatagttttttgaaacagaatgcaattaaccagaaacttaagtttgacaaaatgggaattgatacattaaagattgcaagaaagactttgaagggacttgaaagcagaggcttggaatatttgtgcaattattatggaatagcagatgaaaaccatcacagggcatttaatgatgcagaggttacatctaagttatacaatgtgctaatggaaaagtttgggacagagtgtccgggattttttgaaccttatcagttagtatttaaagcgaaaaaaatgcaacctattactgacagacaaaagaaatatttaaaagatttgatggtatatcataagattgaaataaattttaatatagatgagctttcaaagaatgaagcgtctaaaaaaatagacaaaattctttcagaaaaaggcagaatttttgactaggacatttttgacagttatggtatactttgttaaagaaaaagtgggttattagaccacagttcacaatattaacgttttttattaatataataaatgttaaaatacctaaaatttgattacactgtaatcattagtttattgggaaaaggagaatggtatgaactttttttacaacaagaagaatcagagaattatcgcaggagtaatagcaggcttattaatacttgcaatggttattacaacagtatttagtgtatagagaaggacttgaggaggctaattttgaaggggattaagaaagtagttttattaatcgcatgtgttattcttacaatgggaacagtgtgtgtatgggctgcttctgaggatgcagaagaaaagattaaaaacggcgtgtcaattgacagcgttgatgtaagtggaatgacagcaagcgaagctacaaaagcgttgaagacagttgtgtcagacaagacagctacaacagtaacacttgatgttaatggtaagtcagttcagactacgttaggggatttaggatacaagtggagcaataagacagtagttgatgaagctgtgaatacaggaaagacaggtaacattataaagagatataaggatggtcttgatttacagcataatggcatgaagtttaatattgaaatgtcatttaataaagataccttaaaaaagaagttgcaaactatttgtgctgattatgaaataaaggcgaagaatgcatctttggaggctacaggtcatggatttaagattataaaagagaaagaaggcgtgactgtagactatgataagactgtagaacagttatatacatatgtaacagagaagtggaataagaaagctaacataaagttaactgccacaactacagtttcaaaacctaagtatacaacagaggattgtgaaaaggtttctaacgaaccaatgggcagttatacaacagagtttagtgtaggaagttcttatgctaatagaaacttaaacatacagaatggtgctaagttaattaacggagcagttgtttatccgggagaacagtattcatgtaatgaaaacttatatccgtggacagaggataacggatggcatcctgcaggtacatatgttgatggtggcgttcaggatagcttaggtggtggtatttgtcaggtttcaagtacactttacaatgctttacttagagcagagattaaggttgttaagagattcccgcattcaatggcagtaggatatgttcctttgtcagcagatgcagctttggcaggagattacaaggatttagtatttgaaaatgatactgatgcgcctatttatgttcaaggtatttataattcaggcggttcaattactttcaatatttatggacatgacacaagaaaagcaggtcattcagtaaaatatgaaagcaagactataaagactacacctgttaaaacacagaccaagaaggattcaagtaagcctgtaggctattcagaagttgaatcttcaggtcatgtagggtatgtggctgaattatggaagattacatatgaagacggcaagcaggttagtaaggaattaatacatacaagtacttatgcaatgtcaccaacaattgttgtaaagggaactaagaaggcttccacaacaactaagaaagatgatagtgataaggaccacaagaagagtagtgaagagacaacaaaaaagtcaacttcaagtaagaaatcaaaaaaatcagaatagttaaataaggcggtgaattatgaatccgggaaaagtttcagaagtaacttataaaagagctattttaaagaatttaaattccaaaaacgaaggagttaaaccgggagtaaattctgcaaacatacaattagaagacattacggctgtagtgtcttctaattgtatattaaagacttttgacggatgtgaagagttttatgttcagcgaagtattaacagtatttgcgaaaagggcggtgttccaaaaagtttacaattaagcattacaatgccattggaatttgaagaaaaagaagtaaacagaatgattaaaaattttagaaagtcagcagacagtcataatgtggaaattaaccagtgtaatgtttatagaggagccactgaaggcccaattattaacatttttatgattggaacaacaggcaatttactaaaaagtgatagcataaaaccgggaatggatgttataatggcaggaacacttgctattggtggaacatcagttatagcagaaagatataaagataagttagcaggcaagttttccggaagatttatttcagaatgcttggaattgaaagattacactagtaccgagaaagcttctgcaatagcaatagatgcaggagctgtgtatatgcacgctgtttctgaaggaggattgtttagcggattatgggaagtggcttcatgtgtggataaaggcattcaggtagatattaacaagattcctatttggcagcaggttattgaaatagcagaatttatggatattaacccttatttgttggaaggttcaggttcgctattgattgtaagccctgatggttataaaatagaagagtcactaaacgctaacggaatctatggagaagtaatcggaaagataactgacaataagaacagagtagttataaatggcgatgaaacaaggtatttggaacctccaagaggtgatgaaatatacaaatttatttaaaaaaggagattggcaatgagagaagagattttacgtttaattgaaaaaaatagcagaattgacattcatgaaatggcgattcttttaggagcgaaggaggcggaagttgccaacgccatagcggatatggaaaaggaaggtgtaatatgtggatattacacacttattgattgggataaaactaacgatgaaaaagtaacagcattaatcgaagttcgtgttacaccacagcgtggaagcggatttgatgaaattgcagagagaatatataaatttgaagaagttaaggcagtttatcttatgtcaggtggttttgactttacagttatacttgaagaaaaaacaatgaaagagatagcccagtttgtatcaagtaagctttctactttagattcaattttgaatacagcaacacattttgtattgaagaagtataaagactacggaatgattttagatgaaaaacaaaaagatgaaaggatgttagtgacaccataatgagagatccattatcaaaagtaacaaaggaaattaaaccatcaggcattagaaagttttttgacattgtaagcgagatgaaagatgctatttcacttggcgtaggtgagcctgatttcgataccccttggcatattagagaagaggggatatatagtcttgagaaaggacgtactttttatacatctaactcaggtcttaaagagttaaagatggaggtatgcaattaccttaaaagaaaattagatgtagattatgattataacggcgaagtaatgattactgtaggtggtagtgaggccattgatattgcgatgagagcaatgcttgatccgggtgatgaagttttgattccacagccaagctacgtttcatatgttccatgtgttgaattaacacatgctgttcctgtcattattgaattaaaggaagagaacgaatttcgcttaactaaggaagaagttttagaaaagataactgacaaaactaagattttggttttacctttccctaataatccaacaggttctattatggaaagaaaggatttggaagatattgctcaggtttgtatagaaaaagatatttttgtattatctgatgaaatttattctgaattatcttacaaggaagagcatgtttcaatagcatgtattccgggaatgaaggaaagaacagttttgattaacggtttttcaaaggcttatgcaatgacaggttggagacttggttatgcgtgtgcaccaaaggttattatggatcagatggttaaaatccatcagtttgcaattatgtgtgcacctacaacaagccagtatgcagcagttgaagcattaagaaacggtgatgatgatgtggcaagaatgaaggagtcatacaatcagagaagaaattatcttgttcacgaattaagagatatgggacttgattgttttgaaccatatggagcattctatgtattcccaagcattaagaagtttggactcacatcagaagagtttgctacaagattgctagaggaagaaaaggttgccgtagttccgggaacagctttcggtgattgcggagaaggttttcttagaatatcatatgcatattcacttgatgatcttaagcttgcccttggcagagttagaaagttcgttgaaagactggagcagaagtagactataagcttacatgattagcagatgcacattagtgtacagttttgtaagccagaatggagataggttatgaatgttatattattagagcctgaaatcccacagaacacaggtaacataggacgaacatgttgtgcaacaggtacaaagcttcatcttattgaacctatgggatttagaataaatgagaagaatcttaagcgtgcaggaatggactattgggatgatttggacgtgactatttatgatagtttcaaagattttatggatcagcatccgggaataaagatttggatggctacaactaaggctccacacagatatacagatgtagagtttggaccggatgattatataatgtttgggaaagaaagcgcaggaataccggaagagattttggtagataatgaagatacctgtattagaatcccaatgaatccggagattagatcattaaatcttgccaattcagttgcaattgtactttatgaggcattaagacagaatgatttccatggaatgcagatggaaggtcaccttcacagactgcagtggaaggaataatataatcagacacaaattgattatagaaataaaaaaaattataaagcatttagactattaagtaacaatgtaaaaaatagcctaaatgcttttatttttttgtgcattataacgtttttagagattgtggtcgaaaaatctttaaacttctgctaaaatgttttatcgaaagtaaaaaaaggaggatttgacaatgtcaaacaacgaaattggtaactcagcagtatatgatgccagagagttgggaaaaggaaagatgtttcttttaggtttccagcatatgttcgccatgtttggtgcaacagttttggtaccacttttaacaggtcttgatgttcagacaacattacttatggcaggtcttggaactattcttttccatatttttacaaaattacaggttccggcatttcttggttcatcttttgcatttcttggtggatatacaacagtatcaggagcttttggtgactttggagtaaaagattcagcccatatgcttccatatgcatgtttaggtgtagcttgcgcaggactattatatttagttttagcgttgctaataaagttagtaggtgttaagaaggttatgaagttcttcccacctgttgtaacaggtcctattattattgctattggtctttgccttgcaccatcagcacttaataactgtgcaacatgttggccacttgccgtcgtagcgcttgttatcgtaatattatttaatatctggggaagaggaatggcaaagattattcctattcttttaggtgtagttggagcatatttattcgcccttattttcggaaacggattaggtttattaggcgaagcaggtcaggttgatgtaaaagctattgctgatgcagcatggattggtcttcctgttcatatggacgaaacaatttttgcaattgactggaacaacagctcagcaattatttttgctattacaacaatggttccaattgccattgcaacaatgatggaacatatcggtgacatttgtgccatcggtgctacagtaggaaaagactttattaaccgcccgggtcttcacagaacacttttaggtgacggacttgctacaacattatcatcaatttttggtggccctgctaacacaacatatggtgaaaacacaggtgtactcgctctttcaagagtatatgatccaagagtagtaagaattgcagcttatcttgcaatgttattctcattctcacctaagtttgccatgattattcaggctatgccatcaggtatcgttggtggtatttcatttatgctttatggaatgattgcagcaatcggtgttcgtaatgtagtagaagcacaggttgactttaagaagagcagaaacgttatcgttgcagctattatcgttgtatgtgctttaggtatcaagtttagttcaggaatgggcgcagatgtattaagcggagttgacggagcagtttcattctcaatcggaggagtagtaatcagcctttcaggacttgcagttgcatcaattgcaggaattatccttaatgcagtattcccagacaaagatgaagtgaacgatgtaacagaatccaaataataaattaatgtaattacagtgtcaaaaggtcctatcccaattattccagtacaaaaagggaaaggtgaattggaattttgatattttaattaagtatcacaaaaaaatggatgccagcaaacaataggcagattttcgaaattttgcgagtatagtgtacagcgataaaactactgtccgagcgaagcgagtttagtttttcgctgtacgatagacgacggagcaaaataagaaaatcaacgtgtttgagggcatccatttttttgtgatacgacaagtggcaaattacctgttaatggtaacaattcctttgttagtctgtatcaatccttcatctttcattttctttaattctctactcatggcacttctgtcaactgaaagatagtccgcaagggcagtcattgtgaagggaagcttgaaagtattgcttccggatttcgaagacaaaatttcaaaataattatttaaacggtcacgtatggttcgaccgcttaaaacttcaagatgttcacagatagatcttgtcttatctgaaattataacaagaatattattaactaactggctgtgatgtggacaagcttttgagcatctttttataatgtgttcataatcaataaaacgaacaacgcagtcacatgtagcttcaagagaaatgttttcaggacaggcatagtgataaaaaagctgaccgaaaagatcaccacgacataattgttcaagaatagtctgggtcccgttaggaagaaaatgtataacccttgcgctacctgactcgattatacctacccctatattgttgtcgtcatagaagcagataacttctctggatttataagttctggtatacgttttaaaacagtgcatcatttcagcctgttgctgttctgaaatattgtaaaacaaatctgtttttgttatttccataaataaactccaatctatattgatataactattgtataaaaatttttatcatgaatatgttgcaaatgcaacagaaaaataaaaacaatcatcatataataagaatgtaaagaaaatatagaccaggattgcactttataaagtgaaaaacgttaaattttaaaaacgaaaataattccttcttaacgttgcaaaaaaaaagagaaagtgttatattattcacagttagtgaaaattacttttattgtgtctagttgcgtctttttgacaattaaacacggcactggctaatatttttgagaggtgtatgatatggatacaataacatgcattaaaacaagaagaagtgttagaaagtttaaacaggaatcaatatctaagaatattattgaagatttggttttggatgcttcgtatgcgccttcttggaagaatactcagacaacacgatatattgcaataacagatgctgagattaaagctaagcttgcagaggaatgttgtgcagagcacaacagaggaattattaatggagcaccacttcttattgctacattaatagtggacaagcgttcaggctttgagagagatggcagttattccacatctcgaaaagattgttggcaggcatttgacaatggcattgctacacagacattgtgtttggcagctaatgacaaaggcttgggaacagtaataatgggattgtatgacatcgataaagcagaagagattatcggggttcccgatggacagttacttatggcacttgttgctgtaggttatcctgatgaagaacctggtgttccaaagaagaagacagtagatgatttattaagctatcgttagtcattcactatattttatgctttacatttatttttaggaggaaaaacaagatgagagaagaatggaaaggatttactacaggcgaatgggcaaaagaagtcaacgtcagagattttatccagaagaactacacaccatatgatggtgatgcaagtttcttagcaggtcctacacaggcaacaacagatttatggaatcaggtacttgatcttcagaaacaggaaagagcagcaggcggcgtacttgatatggatacaaaggttgtacagacaatcacatcacacggcgcaggttacttagataaagataaagaaactattgttggtttccagacagataagcctttcaagagaggtcttcaggttaacggtggtatccgtatggcaatgaaggcttgtagtgacaatggatacgaagtagatccagaagttgtagatttctacacaaactacagaaagactcataacgctggtgtatttgatgcttacacaccagaaatcagaacatgtagaacaaaccacatcgtaacaggtcttccagatgcttacggacgtggacgtatcatcggcgactacagaagagttgcattatacggtgttgatacacttatcacagataaggaagctcagaaagcagctacacctacagaaatgagaccagaagttatccgtgatagagaagaatactcagaacagattagagctcttaaagaattaaaagaattaggtaagatttacggatttgatattagcagaccagctcagaacgtacaggaagctattcagtggatgtacttcggataccttgcagcagttaaggaacagaacggtgcagctatgtcattaggacgtacttcaacattcatcgatatctatgctgaaagagatttagctaacggaacatttacagaagaacagattcaggaattcgttgaccacttcatcatgaagttaagatgtgttaagttcgcaagaacacctgaatacaaccagattttcgctggtgatccagtttgggttacagaagcaatcggtggtgttggtattgacggacgtcacatggttacaaagatgtcattcagatatcttcatacattagaaaacttaggtgcagctccagaaccaaaccttacagttctttggtcaacaagacttccacaggacttcaagaaatactgtgctaagctttcaattgaatactcatcaatgcagtacgaaagtgatgacttaatgagaccaatcaatggtgatgactatggtatcgcttgttgtgtatcttcaatgagaatcggtaaggaaatgcagttcttcggagctagagcaaaccttgctaaatgtttactttacgctatcaacggtggtgttgatgaaaagactaaggttcaggtaggacctaagtacagaccaattacagcagaatatcttgattatgatgaagtaatggaaagatatgaagacatgatgaaatggttagcagacgtttatgttaacgctcttaacatcattcactacatgcatgataaatattcatatgaaagaatccagatggctttacatgatgctcatgtaacaagatggttcgcaacaggtgttgcaggactttcagtagtagctgactcactttcagctatcaagtatgctaaggttaaagctatcagagatgaagatggaatcgtagttgactatgaaacagaaggtgacttccctaaatatggtaacgatgatgacagagttgaccagatcgcagttatgatcgttaacaagttcatgggttacttaagacagcacttcacatacagagatagtgttccaacacagtcaatccttacaattacatcaaacgtaacatacggaaagaacacaggtaacacacctgacggaagaaagatgggacagccattcgcaccaggtgctaacccacttcatggtagagatacacacggtgctgtagcatcacttgcatctgtagctaagattcctttcgaaaacgctagagatggtatctcagatacatttacagtagttccagatgcacttggaaaagactgtgacgtatttacaggtgatcttgacgctgatgcacttggtcttgatattgatgaaatcatcaagcagcagcagttataataaatataaataaaaaggaaaatcagaatgtcaacaggaataattcattcaacagaaagttgcggaacagtagacggaccgggcgtgagatttgtagtgttctttaaagggtgtcctatgagatgtgcgtattgtcacaatcctgacacatggtcaatggaaggcggtacggaaatgaccgttgatgaattgcttaaagaatatgaaacaaagaaatttttctaccaaagtggaggtattactgccacaggtggtgaacccatggttcagattgatttccttactgaactgtttactgaagcacataagcgaggaattcatacctgtctggatacatcaggtgtaacatttagacctgatgatccggcaaatctgatgaaagtagataaattacttgaagtaaccgatttggttatgctggatattaaacatattaatccgcaagaacatttaaaactttgcaagcagcctaatgataatattttggcttttgcaaaatatcttgataaaaaaggtattcagatgtggataagacatgttgttgtaccacatataactttaaataaagagtacttatatgaattgggactttttataggtcagttaaaaatggttaaggctttggatatattgccatatcatgatatggctaagccaaagtacgagaaacttggcatggattacccattgaaggatatagagcctgctaccaaagaaatggcagtagctgctcgaaaaatagtgttgcagggatttaaagaatccagaattaagttattacaagagaataaataggaggtaataaaaatggcagcaagcgaaaaacagattgataatttagtttctttaatagatggatatgcacaggaaggtggttaccatcttaatgttaacgtattaaacagagatacattacttgatgctcagaagcatccagaaaaatatccacagcttacaatccgtgtatcaggatacgctgtaaacttcattaagttaacaaaagaacagcaggatgacgttatccacagaacattccacggaagtctataagataacgaaaagaaatgatcctttatcgccatatcggggtttcccggtatggcgattttttcttgctaattaatgaaaagagtttataattataaaaagagtgtcttactcaaatatatagtaaaagaggcgagaattatgcataatatagtttcaaaattacttatttacggagatatgcctaaagattccattcttatggaacttagtgacattattagagaatataaaagtggtgactataagaaagatgaaataatcactaggatatataatcagattaagagaattctggaagtatcaacagattatgctttcgataagaatttgtggcacaactatcttacatatttattaataacaaatgagaacccatttagcttaacatgtgaaaaggttggagcaagtgtgggaacagtaaacagttttgcaaagaatgactttaagcagttcaaggccttatttgattatgactttaagccaatggaagaagagcttggtattgactgttttacaaagattgaaaattatcaggcaattgggaaacctgaacttatgtacaataagaatgttagtgaaaaggttagagatttaagcgaaaagcttgaaagcgctaaggatgaagaagaattttttgatcacgtaacacagttttataaagattatggtgttggaatgtttggtcttaataaggcgttcagaatttcagacaacaatggcaaggttgaattccaggctattaacaatatggaaaaagttatgcttgatgacctggttggatacgaaattcagaaaaagaaacttgttgataatacagaagctttcgtacagggaagaaagagcaacaactgcttattatttggtgacagtggtacaggtaaatctacaagtattaaggctattgttaacgaatactatgatcagggacttagaatgatcgaaatatacaagcatcagtttaaagacctttctaacgttatagctatgataaagaatagaaactacaagttcattatttatatggatgacctttcatttgaagaatttgaaattgagtacaagttcttaaaggcagtaattgaggggggcgttgaaacaaaacctgagaatattttgatttatgcaacatctaacagaagacatcttattaaagaaacatggaatgacagaagtgatgttcaggttgataatggaatgcataagtcagatactatggaagaaaaattatcacttgtacatagatttggtgttacaattaactactcaaaacctacacagaaggaatactttgatattgcaattgaattgtgtagaagattaggtgttgaacttagtgatgatgaaatcaaggctgaagcaaataaatgggaattaagccatggtggaatttcaggtagaacagcacagcagtttgctaactatctggcaggtcagcagaaatagtaattattatgtgtgggtaacttttcaataataatcaacatatgtagataaatcttgcaaggttgttaaaaaaattaaccttgcaagataaaagaaaaataaaaaataaaatttttttgaaaaaaattaaaaaagtacttgcattgttatggtgactatgctagaatactttttgtcgcgagacattggcccatcgccaaatggtaaggcactggactctgactccagcattttcaaggttcgaatccttgtgggccagctttaaaccacttcgttatgaagtggtttttttctttctaagattatcaaaattcatttgtaaagctaagaatatatttatagtctgtaatcctgtatcctattttatacaactgcttggattgaaagcatagaagttctttttatccatgtcttcagttaccattcgtagagcttcgccaaaacgttgaaaatgaacaatttctcttgctcttaagaatttaataggttctcgaacatcactttcttttacaagagctaggatattatcgtatgtttttctggctttttgttccgcagccatatcttctataaggtctgcaataggatcaccacaagattggaaggtagtagctgagaaaggaacacctccggcagactgtggccatacgcccaaagtgtggtcgacatagtatttctcaaagcctgcaaggtcaatatcatcacaaggaaggtcttttacaagctgggaaacaatggagccgaccatttcaagatgcccaagttcttccaccgcaatatcgttgattaaacctgcaactttagggtttttcattgcaaatttctgtgacatataacgcattgcggccgctgattctccgtcaggacccccatactgactcaaaactatttgagcaatttttggacttttgattttaatatttacaggatactgtaatcttttttcataattatacattagcagttacctccttcccaaggcataggacctttattccagtcccaataatccttattagctacatcatatgccgaaagaggtccaaaattgtgggtgtacatttcccacgcctcttcccgcatttccttcgccttgtgatagtattcaagggcttccatgcaattgggatgtgtatcaaggaacagctttacgtcatccattgcaaaacttgccttagtaataatatccataagtttttctttactcatatcacatttcatcgtccacatccccttccaacataaggtttataaagttccttgaatatggttccacagcctatagcctggtcaatgtcataaacatcctgccatttttgccatggaacaaaacacataccgggagccatatggtcgacatgttctgttccacggtcacaaccctcattgttccgtttcatattgcaacaacaaccctgattatcataagtcatattgcaaccacatctatggttatcatttccgacactgtgattcatagtattgcgttccatacaacgatttgggttatccatatttcgttctctcacattgttgttcatttcacatccacattcctgtcccgacataggtctgccacatggcatcattctgttacaattaccacgattatatcttccgtttcttggcgtattcatattgttatgattaaaacaatttgcgttttgattgcaattgttacagtccataaaaatctccattttctttttgttctacagtattattctatgcataaaataatttggtgttaaataaaaataaaaaaataaaataaatgcaatattttttgaaaacccttcgtttaatatgtaaagacacaaggaaagctagcaaaataaagtgactttgaaacaacagtaaggaagactatgaaaaatcagtattaaatcaagaaggatacacaaacaaggaggtaggagctatgaggaaaacatcaaaatttttatttgcaacagctatggcagtaactgttttggcattggctaatccatcaccaacagtaatggctaaatcaaaagggaaaaaatcaaaggtagtatacacacttaaaaaaggcacacttacaatatcaggaaaaggtgaaatgcctaagaaaatgactttcaaaaataataagaaagttaaaaaagtagttattaaaaacggtgtaacgtcagtttcagacaaagcattttataagtgcaaaaacttgtcaaaagtaacaattggcaaatcggttaagaaaataggaattgatagttttaatggaacaaaaattaagaaagtaacaattcctaagaaagtaaaagaaatcggtcaggatgcttttgaaaattgtaagcagttagaaaatatcacattaccaggaaagtatacattaaaaaagaaaaaaggtgatgacgcttatgcaacaattatgggcggttcaatggctgacacagtaactttttcaacaagtattgatttaaagacagttacatatgttaattctaatgtttttgatgttagtgcaaatgacaagaattatacatcaaagtcaggaatgatttacacaaaggacggaaaaactcttgtaagagtatcagcaggaacaaaggaactttcaatagatgaaggttgtgaaacatttgcattacagtcaattctctatgcaagacattttgatggagatgattatgtagtttgtgacaaacttgaaaagataaggattccggcatcagttaagaagattgattataatgcatatcaggcaggagattatcatgaaagatttgatattggaaaggatatagtaatttcaggcgcagacttagatggagaaagtgttgtgaacctttgcaaccgtacaaacctttctacatgggaaaatattgcaaagcaggttccaagtatcaaagttgagaatggaatgtatatttcaaaggacaacgttttaataggctatgaaggaaaaagtgaaaaacttgttgttcctgaaggaattacaacaattgccaacaatgttataaaaggcgaaggatacaatcctgacagcaagattgcaaaggagattgttattcctgatactgtaaaagtaatagaagacagagcgttctttagcagatataaccttgaaaaagttacattgccaaagaatcttacagaaataggtgattatgcattttttgaatgcaacataaaggaaattgaaatacctaatactattacaaaatggggcaaaaatgttttctcaagttgtgcacttgaaaaagttacaattccaacaaatataaaagaaatcccagagggaatgtttgatgcatgttataaattaaaaaatattgtgattcctgataatatcgaaaaaataaatgagggtgctttttgggattgcagaaaccttgaaagtgtaacaataggaaaaaatgtaaagagtattggaaagtatgcatttcaaaatacaaaattgacaacaattacaattccgtcaaatgtacaaaaaatagattttaatgcatttttgggctgcgattctttggaaaagtttgtaattgaaggaaagacagatattgccaatggcgtatttgataacacttctaatgtagttttggattacagattaggagcacagtataacaaaacaagtgtacagataaataattttaaaagagacaagaaaaattatcttaaagtaaaggcttcatgggctaaggttaaaggcataagcggttatgaagtaaaagttgcaacagacaagaagttcaaaaagaatgttaaaaatgtaaaagtaaatgaaacaaaaacaactgtaacagttaagcagaaagttaaaaatgtttacaatataaagagagtctatgttaaggtaactccatacacatatgttaatgggaaaaaagtgtatggaaaatcacaaacagacttaatgaaataaactaagattataatggcttaacagcaacaaaacccagaaaaacttaatattatggtaataacccgggaaatcagaaaggtaacaaacaagatttcccgggtattatattttgtatagaagaaatataactgttggtttttgtcagaaactggggtatactaggtttcgtggaataaagttttggaggtaattatgagaaattgtttagttgcacagtctggtggaccgactgtggctattaactcaagcttggcgggagtaattcagggagcaatcgacagcaaaaagtttgacaaggtttacggctctcttaatggtgtacagggacttttaaatggatgccttatggatttgactgaaaaagttgaacaggtgcctatgtttattgaattgttaaaaaagtcaccttctatgtatttaggttcatgtagatatcagttacctgattatacagaagacgatgcaccatatgcatatatttttaataagtttgaaacatatgaaatagatgcatttttctatattggcggaaatgattctatggacacggtagacaagcttaacacatatgcaaaagctattggaaaggatgttaagatagttggtattcctaagactattgataatgatttgtgtattacagaccatacaccgggctatggttcagcagcaaaatatgtggcatctactttactggaaataggtcacgacacatcaatttatccaattaacagcgtaactattgtagaaattatgggacgtgatgcagggtggcttacaggggcctcagtccttgcaagaaataaatataatcatgcacctcatcttatttatttgccggaagttgctttcgatgaggctcagtttattgaagatgtaagagaggcaattaagaaatacaataacgttgtaattgctgtttcagagggaatcaaaaatgcagaaggaaagtacattagtgccacatctgcagtggaagatacttttggacacagccagttaagcggaacaggaaagtgcttagaatatattattaagcagaatcttcaggtaaaggttcgttctgttgaaattaatattttgcaaagatgtgctgcacatatgtcttctattacagatattggcgaagcattcagacttgggcgtcacgcagttgaaactgcacttgagggcaagtcaggcgttatggttacagcaatcagaaaagctaacgaaccatatagtgttaaaatgggagacacagatgttaaaaatgtggcaggccttgtaaaacatgttccaagagaatggattaacgaaagaggaaatgatgtaacacaggattttgttgattacgcatatccgcttattcttggggaaccggttgttaagtatgagagaggaattcctgattatttggatgtttctcatttgtatcctaataactaaagtagagaacaaacttcacaataattttataaaagtgcaaaaacatagttatattagcgaatattagtgttgcaatactaccgaaatgggttataatataagcagttgtttaaaaattaacaatgaatgaattttacggaggtacattatgttagtatcagctaaagaaatgttagaaaaagctaaagcaggccactatgcagtaggtcagtttaatatcaacaaccttgaatggacaaagtcaattcttttaacagcagaagaattaaagagtcctgttattttaggtgtatctgaaggtgctggaaagtacatgacaggatacaagacagtagtaggaatggttaacggaatgatggaagaacttggaattacagttccagttgctcttcacttagatcatggttcatatgaaggatgtttaaagtgtgttgaagcaggattttcatcaatcatgttcgacggttcacattatccaatcgaagaaaacatcgaaaagactaaagaattagttaaaatcgctaacgaacacggtatgtcacttgaagcagaagttggttcaatcggtggtgaagaagacggtgttatcggtaggggtgaatgtgcagatcctgatgaatgtaaggctattgctgatttaggagtaactatgttagcagcaggtattggtaacattcatggtaaatatccagcaaactgggaaggattaagctttgaaacattagcagcagttagtgaaaaagttggtaatatgccattagttcttcatggtggtacaggaattcctgcagaccagattaagaaagctatctcacttggcgtttcaaagattaacgttaatacagaatgtcagctttcatttgctgaagctacaagaaaatacatcgaagctggtaaggacttagaaggaaagggattcgatcctcgtaagttacttgcaccaggtgctgaagcaatcaaagcaacagtaaaagaaaaaatggaacttttcggttcagttggaaaagctgaataatccatacaaaaataaagcaagaatacatgccccggcaaaagccggggtttttcttttggcaggaggagattcctatacataatgatataattgattattttgctatgttagataatataatcaaaaatcacttatataattcttgattaaagtttaaaaagtatttatactttactaagaaaggttatgatatgaaaactaacaaaaaagaattaggaaaagaacagaatacaaaaatagaatctgaaaaaacagaaaataataaatcaattgaaacagatgaaaaaaattctacaacaattgaagggaaaaaaccaagcttggatgacttatcacctaagtctaagaagtttgcaaagatttataatgctgtaagagttcttgtgattattgcggcaggagtagccttgatttatgcgtcttacagcctgacagaatcttatttgaattacaaggatgatgagaagaagtatgcaagtcttaacgatatgtttgtacaggatgctaaagggaatacaggctcagatagtagtgccggtttaaatggaaacaaagctttaaataatagcgaggtttcagacagcaattcaactgccaacagcacaaattccaatacttcaaacacaggctcaagcaccacaagttcaaacagttcaagttcagacaccttaaactacagtgctgatagcaagaagtgggtttggaactatgatgccatgcttaagtataatgatgaggcaaaggggtatattaagttagacggtacaagaatacagtatccgatttttgaacatagtgataacaagtattatttaaagcatggtgcagacaagatttataatggagcaggtgcgatttttattgactatagaacagcaggccttgaaggagatatgtgtattttgtatggtcacaatatgcttgatggttctatgtttaaagaaattatgaattttagagataaggatttctgcaagaaacatccgacttttgatatttatattggtcgtaagcattacatttattatgttttctctgttttttcgggaaaagacgttgatgagaagatttaccagtatggttttgaaaataaaagcgatttccagagctggattgacagagtttacagcaagagcacatacaagtttgatacaagaaagccaacgacggatgacaagattattatgtgttcaacatgtgtggacgactatggaaacagacagcttgtttgtatgtacagaggggaagaagttgtggattagggactttcacttaattttattaagaaaaaggtttaaaaaattagataaatactcatatgctattgatttttgtaaagaaatgatgtaagttatgacacgtacagagcaaaaaagctcaaccgctaaatgagattaaggacaaggacgttcttcaaaaatgaagtttggagaagtgtcctttttttataagtgacgttcattagtgtatttactatcataaatgccatttataaaactttaagatgaaattgttaattatatttattatagcggacgaaaaatttgttgtataggaaaggaacagaactatgggagtaaacattgaaaaagtttttggggaaaacgtatttgacgatgcagtaatgaaagttcgtttaccaaagagcgattacgaaacagttaagaaacttatgtacgaaggtggtgaaatcacagaagatttagcagatgtggttgcacaggcaatgaaggaatgggcgttggaaaaaggtgctacacactttacacatgtgttccagccatatgtaatttcagtagtagctgaaaaacatgattcatttgcttctgttccaatagatggaaaaatcgaaaacacatttacaggaaaagatttattaatgggtgaacctgatgcttcatctttcccttcaggtggtttaagagctacttgcggagcaagaggatatacagcatgggatattacatcacctgtttatgttaaagaagataccctttgtattccaacggcgttttgctcatatacaggggaatcacttgatacaaagacaccattacttaaagcaatgcatgcagtaagtaagcagggtgtaagacttatgagattattcggtgatcaggatactaagagaattttctcttatgtaggacctgaacaggaatacttcttagtagacagagaaaaatatttaaagagacctgaccttatgtattcaggacgtacacttttcggagcaatgcctcctaagggacaggaaatggacgaccattactttggagcaattaagcctagagtaaaagcttttatggaagatattaacgttcagttatggaaattaggtattacagcaaaaacagaacataacgaggttgcacctgctcagcatgaaattgcaccaattttttcaatttcaaatgtagcattagacaataaccttttagtaatggatgtattaaagaaaacagctacaaagcatggccttgtatgtttattacatgaaaaaccatttgatggaatcaatggttcaggtaaacataataactggtcacttacaactgatgacggaattaacttgtttaagccaggtaagaaacctgaagaaaataaattattccagttagtacttgcctgcacaatggcagcagttgacagacatgcagtattattaagacttgcagcatcaaatacaggtaacgatcacagattaggagctaacgaagcacctccagcaattatttcaatgtatcttggtgatcaggttggagatattgtagagcagattcttaataacggtaaggctacttcaagtctttcatcaggaacacttgaatttggtattaagaaacttcctgtacttgaaaaagatcctacagatagaaatagaacatcaccttttgcattcacaggtaacagatttgaatttagaatggttgcttcatctaactcaattggtgatacaaatacagtgcttaacgcaatgatggcagaagcatttagcgaagcttgcgatgcccttgaaggagcagcagatttcgataaggcagttgaagaatatacagctaagttaatgaaagaacatgcaagaatcgtatttaacggtaacggatattcagaagaatggccaattgaagctgaaaagagaggacttcctaactgcagatcaatcgttgatgcaatccctgcattagtagacgatacaacagttgcaatgtacgagaaattcaacattttatcaaaggctgaattggaagcaagaaaagaaattctttttgaacagtatgcaggcgtacgtaacattgaagcattaacaatggttgaaatgtcaaacagaatcattatgccggcagttacaaaatatacaaaggatcttgctgatacggttatcgctgttaaggaagcaggagctgacgcatcagttcaggctggattattaggagaaatctcagctaagttagctgaaacaaagaaagctacaacagcacttgctgaaattgtagaagaagcaaaagctaaggatgacagcaaggcaattgcaatatcatacaaggacgacgtaatggcagctatggcagctttaagaaagcctgtagatgaacttgaagtaattatgcctaaggaagtatggccaatgcctacatacggtgatttagtatatgaaatcgataaataaaaggcaataacaatagaataattttgttaaagcaatacaaataaagtagggatactgtttttgagtaaagacggtatccctattttttgtgctataatgttaaaaaatcttatttcacctgtgattgataaaggtgaaataatgagctatatctgttgcataaatgccaataattgtataaaataatatctatgcgattaaaaagaaaaggtgaataaatgaaaacaatattagatattattttattattagtaggatttgtgcttcttataaaaggagcagactattttgtagacggaagttgtgcagtggcgaagagacttagagtaccatcaatagtaatcggacttacaattgtggcagttggaacttccctgccggaacttgcagtaagtacatttgcagcagttaaacattctaatgccatagcacttggaaacgtggtaggttctaacatatttaatcttttgatggtaattggcattactgcattatttaaagatatgttagtaaaaaaatccatattaaaaagagaaatgccacttttgcttataatatcagtactgttaatatttttggcaggagatattttatggtttggaggaataattaagaaaaacaacattttcctatttgaaaatggatcaacaatggtaggaaatgttaacagaattgatggtatattattgcttgtacttttcgtaggatttatagcctggactgtaagttatgctttaaaagaaagaacagaagaagatggtaccgatgaagttataatgctttcaaaaagaaaaagtgcaattttcatagttggtggtgcaattgccatagcggtaggaggacaggttgttgtagacagcgcaaagagtctggctcttgcagcaggaatgtctgaaacattggtaggacttacaattgtagcaatgggaacatcacttcctgaacttgtaacatcagcagttgcagcttccaagggagaggcagaccttgcaataggaaatgttgtaggttcaaacatttcaaacattcttttagtacttggactatcagcggcaatttcatcagttggagttacggcaatgaacttcgtggacataatagtttcattggctgccacaattatcgtgtttattgttgcatcaacacagagaacaattaagaagaaagaaggaatctttcttgtaataatttatacattctatatggcatacattatttgcagacagatttatggataaaaatgaaaaaagagcttcacttttcgtgaaactctttccgtgcaaaaaggatgcaacgcacgcatcctttccgcaaatatattctaataataaaaaagggagggaatcggattaaatccgattcaaaaaaattatgaaaaaacataaacaaatgattaatttcttttgtttatgtttgtattataattttaaaacgtgaaaaaagagtgttttacgtgtaaaagaaatatgaacaaaatgtaaaagttaaaggagatattaaaatggcagaaaaaaatccaatagtaacaattgaaatgaacaacggagatgttatgaaagctgaactttatcctgaagttgcgcctaacacagttaacaactttatcagccttgtaaacagaggatactatgatggaattattttccacagagtaatcagaggctttatgattcagggtggagatcctgaaggaacaggtattggtggaccgggatactcaattaagggcgaatttacacagaacggcttcaagaacgacttaaagcatgaaccgggcgtactttcaatggcacgtacaatgatgccaaattcagccggatcacagtttttcataatgcaccagacatcacctcaccttgatggtcagtatgctgcatttggcaaggtaatcgaaggaatagaggtagtaaacaaaattgcagacgtggcaacagacagaatggacaaaccattagaaccacaggtaatgaaaaaagtaacagtagaaacatttggagtagactatccggaacctgaaaaatgctaaaaaacataattattgaaaaataattatagaaaaggcaaaaatcagaacaaaattaaaataaggaagtaaaaaatatggaaaagataacaaaagacatgataatcaaagatatcataaacgtaaacatgggctgtattccaatcctcttaaatgaaggaatgcactgtgtaggatgccctgcatcacagggagaaacattggaagaagcatgtattgtacacggactggatgcagatgtacttgcaaagaaattaaatgatttcgtagtaagcgtagacggcgaataatagaaacatatctaaagaacatcgaagggagcatacaagttgtgctctctttttatttgatttatattgtgtcggcagagaaaaaacaccttcaaacacgttgattttatcattttacgcgttactgcaagcggtgcatgaattagtgaaaaaaagagccgcacaaatgcgactctcctgatatctttagtatatgtaggaattataaagctacgtcaccaataattccgtcgattacgtaataagctttcatgtcttcaggcttaatgtagatagaaactgacttcatatccttcttaccattctttgctgtgtaatcagcctttacagccttttcgattgcagcagtatcaaattccatacctgagaactgaacataaatgttgttttcaactttagcagccttagcaggtgcctttttagcagttgtagctgctttcttagtagttgtagctttcttggcagccggtttcttttcagcaacttttgtagcagccttagcaggtgccttatcttctttcttagctacagtcttaacttctacagccttttcaacttttttaggttcagctttttttacttcagcttctttcttagcttcaaccttagcttctttcttaggttcagctttagtcattgctgctactacaggaatctctactgtattgtctttcttagtagcaacaggtgttgtttttttctttgtgtttgccataacaaaattcctccttaacaaactttcgggaaaactaatttccgtatcttccatatttaatacagatcccgaatttacaattaacttatatatttgttaattataatggtaggtcgatactaagtccgtaatgtcaagttaagaaatttatcaaccaaaataataaatgcatacctcacaataatacaacttttgtgaaaaatatgcaatctttgggaaaaagtttatgaaaacattacaagatatattaactaatatatgcttttaataaggaattggttaataaaaatttaattaaaaaagttaaatgttaaaatctaacaataaaagaaaaaaattagctgaaaaaaattaagcattttaggcataaaatatatgacaaaaaattgacatagactgtaatatttgttacaatttttaaagacgatgacgaaatttgacaggaaaattcgaaaaatcagagaaggaaccattaatggatagcaatagattagagagaaaaaagagaatagagagaaacagaaagagaagattatacagaaatgttaataatcttatgtacgccggcatttttgttatggcagcaattattacaatagctgcagcagttagcagaaataataagattgaatatgtagatacagctcagatggcatcaacagagtcaatcagagttaacaatagcaatacagacaaggttgcagctaaggctgaggaaacaaccaagaaatcaaagaagaaggtagttacaacagaagaggcagttgagagtacaacatcagtcgaagctgagacaacagagcctgaaaccactacaacaggggaaaataaccttgaattaggcggaagaattaagattacggcagatacgttgtatgtaagagaggaagcttcagcagacagttcagtgcttggaatggcatcaacaggcgatgagttctacgttcttggaaaagaaggggactgggttttagtcaactatcagggtaatgatggttatatcaaagcagagtttgcccaatcagcagattaatatttatgtaggataataaatcttgagtataatgtataaaataaaatatacttagggtttatttttttgcgtttagatgataaaattgcataaaatgaaatgaaaggaagatgagtatgagctatattgcttggcttgtagtgtttgttgtttttgcagcacttgagttggtatcacttggtcttacctgtatatggtttgccattggagctttagccggatgtgtggcagcattgcttggagcaaactggattgtgcaggcagttgtttttctggtagttaccatggtggtattaatatttataagaccatttgccattaagtatgtaaacaacaaagctgaaaagactaatgttgaatcaatggcaggtaaacagggaaaagttgttgtggtaattgataacattaacgcaaaaggaatgattaaggtagacggtatggagtggacagccagaagtgtagatggagagattattcctaaagattcattagttacagttgtgtccgtagaaggggtaaaagctatggtcagaaaggcctagtataccaggaggtagaatatgatattttttattattttaatcgtgttggcaatcctattggtttcaacatgtgtaaagattgtgccacaggcgcattcatttgttattgaaagattaggtgtttacaaagaaacatggtcagtgggacttcatttcaaaattccatttttggatagagtatcaagaaaagttaatttgaaggaacaggttgcagactttgaaccacagcctgttattacaagagataatgttacaatgcagatagatacaattattttctatcagattacagatccaaagctttatgcttatggtgttgaaaatccaattgtggctattaagtctttaacagctacaacacttagaaatattgtaggtgatcttgaacttgatgaaactcttacttcaagagagacaatcaatgctaagatgcgtacagaattagacgttgcaacggatccttggggaattaaggttaacagagttgagcttaagaacattattccaccaagagatattcaggaagcaatggagaaacagatgagagctgaacgtgaaaagcgtgaacagattcttagagccgaaggtgagaagaaatcagcagttcttattgcagaaggtaagaaagaagcagctattcttaatgctgaagctgacaatcaggcagcagttcttaaggccgacgcagaaaagaagaagagaatccttgaagctgaaggtgaggcacaggctattcttagtgtccagaaagctacagcagatggtatcaaagccattaaggaagcaggagctgatgaggcagttcttacacttaagagtcttgaagcttttgcagcagcagcagacggtcaggctacaaagattattattccatctgaaattcagggaattgccggttcagtaaaggctttggctgaagttattaaggattaagacttaatttaatttttactaataaggaagaaatatgtttaacgagaaaatggtattgtgtggtgctaacgcatacgacaaaaaatattatttaaatgagcagttttccaacctgccggaacagattaaacaggaattgcagattatgtgtgttctttttacggaggaagttggcggaatacttgttctagaatatgatgaggaaggcaatcttcagattataacagaagctgatgaaggagatttgttatatgatgatattggctgtggactaaagataagacagatgcaaatggaaaaaagagatttactggaatctttagaaatgtactataaagtttttgtattgggagaagaaatataatgttacttactgttgatgttggaaatactaatataacacttggactatttaaggaggataaggtatttgccacatttagaatgaatacccagatggtgaaaacatctgatgaatatggttcaacaatagccgaattaatagcgagaaagaatattaatattaacgagattgaggatgttattatttcatcggtagttcctaaagttatgtattctttaaataatggtattattaagtattttggaataaagcctataattgtaggtccggggacaaagacaggaataagagttaaaagaactgatccgagggaacttggttcagaccgtcttgtggatgttgtggcagcatatgaattatatggcggaccttgtattgtaatagattttggcacagctacaacttatgatttggttggagctgacggtacttttgaagcaggagttatttcgccgggaataaagatttgcacaaaggctttgtggaatgaaacagctaagctccctgaaattgaaatcaaaaagcctgaaagcattttagctaaggatacaatttcatgtatgcaggcaggtattgtttatggatacatcggtcagacagaatatattattgaaaagatgaaagaggaaagcggtcttacagatgttaaggttgttgccacaggtggtcttggaagaataatatggcagaatacagacaaaatagacatatatgacaaggaattaactcttcagggaatgagaattatttacgagaagaacaagaataataaataagcttggagattaattatgaaaataggcaatgttgaaattgaaaatagtttggcattgggaccaatggcaggtgtaacggacctgccatttcgtctgctttgcaaagagcagggatgtggcatgctttacacggaaatggtaagtgccaaagctattttgtataaaaataaaaatacaaacatattattaaatattgataaggctgagcatccaatagctgttcagctttttggctctgatcctgacattatggcggaaatcggtgcaaaggttgcagaaggtccttgtgattttattgatattaatatggggtgcccggtgcctaagattgttaacaatcatgaaggttcttatttgcttacgcaacctaaacttgtggaagagattcttacaaaaatggttaaggcaataaagaagcctgttacaataaaggttagaaagggctttaaagacggtgaaattcaggcacctgagattgcaagaattgcggaaagctgtggcgtatcagcaattgccgttcacggaagaacaagggagcagtattacagcggaaaagcagactgggacgtgattaaagaggtaaaagaggctgtgaaaattcctgtaattggtaacggtgatattttttctgcaaaagatgcaaaggcaatgaaagaatataccggatgtgacgggttaatggttggaagagccgcaagaggaaatccatggatttttaaacagataaaagagtatcttgaaaatggaattattgtagataaaccgtcttcaacagaagtacgcgatatggttttaaaacacgcaagaatgcttattgattacaaaggtgaatatacggcagttagggaaatgcgaaaacacatagcctggtatacacagggcttgccacattctgcagagcttagacgcagatgcaatgagattgtggactggcagtccctagaggagctaattaaatcaaaattataaggttttataggctttttgtacactttttcggggctttaacattgacaataaatggtggttgggctattataaagtgtaaaactatgaacgaacatgtagatggaggaagtaaacatggcagatgcaaagaagaatatattgacatatgcaggtcttcaggaattagaagcagaattagaagatttaaaggtaaataaacgtaaagaagtagcacagaagattaaggaagccagagagcagggggacttatcagaaaacgctgaatacgatgcagctaaagatgaacagagagacattgaagcaagaatcgaagatattgaaaagattcttaaaaatgttgaagttgtagctgaatctgatattgatgatacaaagattaacgttggatgtcatatcatcattcatgatttcgaatatgatgaagaccttgagttcagcattgttggttcaacacagacaaacagcttaagtggaaagatttctaacgaatcaccattaggtcatgcacttattggacacgaagttggagatattgtagaggttgaaatgggcgatacagtatcaaaatataaagttcttgatattaagaagaaaaaataatttctgtcactgatttttagggtgcacagttgttatagttatagtaaagagttgtaattagcctagggctaattgaatataaattactttaaggagtttaagaaaatggcacagcagaataagaatgaacagcaggttgacgttaatcagcttttaaaggtgcgtcgtgagaagcttgctgatttacaggaaagaggaaaggatcctttccagattacaaagtatgatgtaacaaaccatactacagagattaaggataactttgaaaagtttgaatgtgaacatgatgaagaaggaaagcttgttaaagatcctgcaaagcttgtttcaattgcaggtcgtattatgcttaagcgtgtaatgggtaaagcttcattctgtaatgttcaggataaaacaggaaatattcaggtttatgttgcaagaaatgaattaggtgatgaaccttttgaagaatacaaggatttcaagaagatggatatcggtgatatcgttggtgttaagggatatccttttgtaacaaagacaggtgaaaagagtattcatgctacagaagttactcttctttcaaagagtcttcagattcttcctgaaaagcatcatggtcttacaaatacagatcttagataccgtcagagatatcttgaccttattatgaatcctgaagtaaaggaaacgtttattaagagatctaagattatcagtgaaatcagaaaatatttagacggacagggatttatggaagttgaaacacctatgcttgtacacaatgcaggtggtgcagcagcacgtccatttgaaactcattttaatgcattagatgaagacgttaagcttcgtatttcattagagctttatcttaagagacttattgttggtggccttgaaagagtttacgaaattggacgagtattccgtaacgaaggtgttgatacaagacacaaccctgaatttacacttatggaattatatcaggcatacacagactaccacggcatgatggatttaacagaaaatctttacagacatcttgctgaaaaagtttgtggaagtgctaagattgaatataatggcatcgaaatggatttaagcaagccttttgaaagacttacaatggttgatgcagttaagaagtatgccggtgttgactggaatgaagttgaaacagttgaacaggctagagaacttgcaaaagaacatcatgttgaatttgaagaacaccacaagaagggtgatatcttaaacttgttctttgaagaatttgttgaagaacatttagtacagcctacatttattatggatcatccaattgaaatttctcctttaacaaagaagaaacctgaaaaccctgaatatgtagaaagatttgaatttttcatgaatggttgggaaatggctaacgcttattcagagcttaacgatccaattgaccagagagaaagatttaaggctcaggaagaattattagcacttggtgatgaagaggctaatacaactgacgaagactttatgaacgcacttgaaattggtatgccacctacaggcggtatcggatttggtattgatagaatgtgtatgttacttacaaacgcagcagctatcagagatgttttattattcccgacaatgaagagcttagacagccctgttaaggaaaataaggaagctaagagtgatgaagcagaaaattgcaatcagaatgcgactgttgaagaaaagattgatttttcaaatgtaaagattgaacctttatttgaagaagaagttgattttgaaacatttagcaagtcagactttagagcagttaaggttaaagagtgtgttgcagtaccaaagagcaaaaaacttttacagtttacacttgatgatggcacaggcgtagatagaacaatcctttctggtattcatgcatattatgaaccggaagaattagttggaaagacattgattgcaatcacaaatctcccaccaagaaaaatgatgggaattgaatcttgtggtatgttactttcagcagtaaataaccttaaggattcagaagatgaagaacttcatcttgttatggttgataaccatattccggcaggagcaaaattatattagaataagagaacacgctaaagaaataggactttccgatataaaaatgaggaagtcctattttttatatacatttctttgatgtatttattattttatctttccaatcaataacattattaattgataatttttcttgtgcttttatgaatgctgtaatatatgtgtagtcgatgttatcatttgaatccacaggaagacgtatttccatataatcataatcaattgttccgtcatctttaacgggtaacattatagataattctggaagtttatcagtggcattagtaagatattctttaaatagaatctggagcttatttattgcagtaacgaaaataaacgtactgcttcacttttttcaccatctttaaagattaatgctttaacacgagtaccgatatgaaaattttctttttgtgtagtggcaaaaaatacgcctctatccgcaagtgctaaagtatccttataacaaaaaagggttctattaggtaattgtttgatatatttggcaataccattattctcatgtggagtatgtaattaattgccttggaaagaatactactaaggtgcggaatataaaaagttatttacttgccagcttgttcaatgcaggaagtaccataagcagttattatagggttgatgtaaatcatgatatgtcacagtatgctgggtaattgcgcaacgagaataccatgtgtggttggtgcaaattctgcattattcattgtaaaagtttaaaaatgcgacaaataaagaactgtacaaaccattttgaaataaaattaaacttgactttgctggaaactggtattatattaggtttataaaagtgacaaattagtttacatataacccaagttgatttataaaacatggaggtgttgattttgaatttgtattttgaactattgaaaactccagtatttactgtggaagatgtaaataaatattatgacaatatggacagcgctcgctctgcaatcaagcgattgatgaaggagggaatggtggcgaaaatccgtaacaatatgtatacctgcatcagtggagagacaggggcaccggttgctaatcgatttcagatagcaagcaagattacgccaacctcttatgtgtctcaccataccgctatggaatattatgggataactgatcaggtatattatgatgtctatgttgcatcagaaaccagctttcgagagtttgaatttgatggatatacgtatcgatatgtggcgtcaaaggatatggaaggcgtggaaacgcctgcactaagcggtgaaatacgtatcacaaatcgggaacgaactttggtagactgcgtaaaggatatggataaaatagctggaatagaagaagtgatacaggatattggaagtatgaagcgaatgcaggagaaaagagtcttgaaatatttagacctattatcgaatcagttcctataccaaaaaatgggatttcttctttctgagcataaggaaaagatggggctttcagatgaattctttgatacatgtaagagtcagattggaaagagtaagcgttacctgacgaaggacatgtcgggtggacgatatgttgatgaatggaagcttgtgataccagagaatatttacaatatgaaaaatggggtgatagaagatgccacaatataatagagcagaacttggacgaatggccacagaaagtggttttgtgagggatacttttgaaaaggtgcttcgattgaaggaaatattaaaatttctgaatgaggacaagttcttaagagagcatttactcttgaagggcggaacagcaattaatttaacagtatttaaccttcctcgattatcagtagatatcgatatggattatactcctaatgatacgagagaggatatgcttgaatgccgtgcaaagataacggacataattaaggaatacatggaatcagaagggtatcagttatcggaagcatcaagatttagccatagcttggatgcatttcactacaattatcagaacgccggtggtaatagggatatgattaagatagaactcaattattccttgagggcgcatatctttgaaccagtatatagtagtattctacctgagacttttgatgatagaatgaagatacgtatggtgaatcctatggaaatatttgcagctaaaggcaatgctcttattacaagagctgcagccagggatttgtatgattggtgcaatatgctgtctgagggtctctttgaagaacagcgtgatttgtttagaaaatgctttttattttatatgacgatttcagcagatacgcttaataaatcatttgacacctcagctattgacacacttgatttcaacaaaatcagaagagatttatttccagtgcttaataagaaagataatttccagttggatgagagaaagaagattgcgaagaattacatattgaatcttatggtgttgactactaaagagaaggaatatcttgatagattcgaagagaaaaaatacatgccggagttgctttttgaagacgtggagatagttgaaagagtgaagaatcatccaatggcactatggaaatgtaaggagtagattagctatgtatatattttgttccaaggcattagccgatgtcttaaatatcaagaaaaatgaattacagaaaatgttcgcaccctcgactctgataatgatattcaattgatggtttattccatacgggaataaatcttcatcaaatctttatttttttctgttaggttatatttcagtaagaaatgaaatatggaaggaaggatagtaaagatggaaatgatgttgcagacacaaaatttgtgtaaatattttagaaagcagaaagcggtaaataatgtttcacttaatatagaaaagaaacagatttatggactgcttggaccgaatggtgcgggaaaatctaccacattgaaaatgttgactggtatgatgaaaccaactgcaggaaagaattactttgatggaaaacttttggataggaaagatttatcaaaaataggagcgttaatt

SEQ ID NO: 12760 - DNA, 234 bp, Unknown
  gut microbiota DNA sequence
cagtttcttgtctgattttacattggaagtgatagatcctgctcccatatgtgctttgtatccaagtacggaatctccaacatagttgtaatgtggaacctgtactttattgaacagtataacattcttaagttctgtagaatttccgactacggctccctctcctacaattgcattgccacggataaatgcgcagtggcgaacctctgcatcttttccgatgattgccggtcc

SEQ ID NO: 12761 - DNA, 11113 bp, Unknown
  gut microbiota DNA sequence
ttttttcttttccgtacttatcttgttaattatatattactaatttatttgaaacgtctcaattgatttttttgacttaaaaaggttaaaatttttactaagaaatctgattggtaaaaatatctacctttttgtttaaaaatactcaacatatccttataaataacagaaagggagagcctggcatgccagactctcccctgagaagtgtatatattgtatttttacttaattgtaacttttactttcttgtaaacaccattttgtgcatatgcataaattgtgcacttacctctctttagggctgttattttaccacgctttgacactgtagctatttcaggattacttgattcgaaacttacctttctatgttttttaatcttaacatttttgctgtctgcaatctgttttactttaatcttgaatttttttccaagtaaaagttttactttagtcttatttaattttaaagatttacaatttcctacttttccacctttagttgctacatgaatcaattttgatgtagccaagacctcacctttatcattctgtgcaactacaagatatttgtaatatttacctttctttaatttattagctgtaaatgtcttcttgcttacttctttaatcttcttatacgatgtgccacatttagctccatatataacatactttgttgctccggacatcttcttccaaacaagcttaactgacttcttagttgttttctttactctaacactaagttttgcaaatgtagaatttgcaaaatccttatcatccttcttttccagaatttctttttccatctgttcagctgttttgtaagtgcttgatgtttccacagatattactgcaccattatttgtagttgtttcctgttctgtatcttttgttgttggtgctaccgttgttgttggagctgccgttgttgttggtgctatcgttgttgttggcgctactgttgttggtgctaccgttgttgttggtgctgccgttgttgttggtgctgccgttgttgttggcgctaccgttgttgttggcgctactgttgttgttggcgctgctgttgttgttggcgctgctgttgttgttggcgctgctgttgttggcgctactgttgttgttggcgctgctgttgttgttgggtgatttccatcatcaacatagttatacataatagatgttattcttgagcgtttgtttccttttacagttgcaacacctatttcatattctcctgatccttttgtaaatgctgtataatctaaattaacatttccatcaactacatttttaacgcaaactccattaacgtaaacattatatgaatctgctccatctgctcttgcccacgcaaaatagtatggtaactgtgcatttcctgcccatacaagcccttccggtgccttaatactttcatcaacacttggatctacttccggagatactgttgttggcgctaccgttgttgttggggctaccgttgttggcgctggttttgtctcagctgacactttttcaacatcagatatttttgaaataacccaatccgttaattctttatcattaatattgaatctaaatactacatactgctcgcctgtcacttcctgatcaacaatttttttaaatccaatatctgtcttattcattggatatcctggacaatttccaccatttgtttctactgcctgcttataaaaagcttctgcctctgtttttccattaagtatttcataatatacaattgcactgttgacatcgtcttttgcaatgaaatttaactttccattttcatcaacatatgctcctctttgtattcttgattcagggctttttttaatatcataatataggcgaagaactaattttccttctgctattactattcccttagtcactgagttttcgctaagaatataaccatcatactccttttcctctgcagaaacctctgtaccgattatagcttctattctctcagtatcttcagttacaaggtcatatccgctttcgtcttctttctgtttataatactctaccgtatactcggatatagttgactcatcaaggaactttgcatacagtactaaattttctgctgtagaatctgttatttccgttatctgattctgatacttatcatctgtataccaaccaaggaacttataaccttctctcgttggattattaagttttattgaacttccgaatctataaccgttagggtttgcatcattgtttgttccatcgtttaattcatactgaattgtatagctattacgtttataatataccttaaccgtagctgtattgtcttcttttacaaccgttgtaagtatattattgctatttccattatcatatgtaaatcccgtaatgttctctggttcatacgtataacttgtagttccctcttttacgctaacctgtttttcctgcttttcgtatccggttccctcataattttcaagatatatttccacgttaacttttgaagtatttcctagcaattcactttcatcaacatttggatttgaaccgtttcctgtttttggtccaacatagcttgaattagctggtacatcaacatatgtattatctgtaaaatatactctctttacttcatcagtatgattttccgcaacatatgttttgtttccatccttgctcaatactagtgaaagtggctcactgcctgtaatggaaaaatcctgatttccatacttctgtaatgatgttatatatgaaagagtatgtgcccttgattcaccattttcaacttttccgctatcactcatatcccatcttgcaagggcaccatccggatcataataagcataatactctgctactacatcctgattagtctttggatctgtaagcatgtcaactttattgaaattattgcaaatctgttctttattagaaacaaaatgtttccactgattactgttttcatctatactgtctacaacgtttttgactttatccttatattttcccatataaagtgttgccccggaaattggtaacattgtaattgtagttacttcaatagagttttctgtccaccatgctgtatgatcatagcgaccaccaaataatcttgtaactgtctgaatattataattacctgcatctttatatttttctgtgaaaatttcattatgtacatcataataatagtcttcaattgcagctatttcagttgtatacatataaatacccgcatctctaattgtagtatttccaactgcttctccccataagattaatgatgcccatgcattaattgactcagatgatgattcctggttatttccacctgaaagaccacccttcttgtcaactaactctccattctcatcaaattcataattagccacacctgatgcccatgaatgaccttcataaatatcaaagtttctaaggaatggatacttagtaggactgttggcattataaccttttccgtcacgattaacattagcaatatcaccaatcatctcataaaccattccgccccattctttagcccactgtggatctttcattgcaactgctgcagctgccttaatccaatatccataatggaaatgatggtcgttaacctgcttgtctgaatcatatgatgatggatagcctattaatgttccataattttcatcataatagaaatagctatccttgtaatcaccacttatatatgcctgatatggatcaaaccagaattcaagatagttttctactccttctaccatttcatttgttatattcttcatatccgcatcatcaccatccagctgacctgaaagccatattgcatctgataatgtattaagattctttcctatccaatatgtgtcaaatccaccatactgaccttccaaattgcaaatccacttaggatcttctttgttttttctataatcataaagatatcctaactgctgcttaatatttccaattgtattttcgtcagttgtaaccggcaatgaagataaaattccgttgtattgcatttcagttacataacttgttccaacaatcgttttcattgttccacgaattgtgttgtatgtatagttagtatatttagaattagaataacgccactgatgaggatatagtgccataatagtatctccacctgtgcttccattctccatattctttgttgttacattatatttagtaacgaccttagaagaattctttaaatattcccactgtacctttgtatctgtaataaagttaaatgcatatttttcatataaagaaaatgcttcattgcttccatcaggaagtattgctacagacatatagttttttcctgaaggcatctttgctgtaagttttccacctgcattaatccatgttgtacctgatggtgctgctaacatgtaataatgtatttttccatcttttttattttttaaacttacaccgattatatttgaagatgttgtattttttactattgtaaagtctgttgcacctgcaccaagtgaaattgttggtgtaacattatcaaatgtataataggcatatggagttccctttgcaataattgaacgcattgaactattgcctgcattatctgccattacaatttcataactccaatctgttgttttatccaccttagcatctttagctgaaaaattttcaccaccaacaaccatttctactgtatcatcatttaataaactttctactgttggttcaccgtcaacataagaagtactatctactacagccggtgatgccatctgcataccattacttgcagctctatatgcaagaggatgtgcatacaatgactctgaatactggtcaaatacaactgaacttgcccagtcatttgttggaacagttccaactgtctctttataattgtcagttaaataaacctttgatggaggtaatgattcttttctatctgtccagtttactccccagtcgtcagttctaactccaaagacttctttcttatatccgcctttgtcaatcattaccgaattgttctcatcaaaaaaatctcctgttgccgcttttatgtttattgcagtaaatggtatgcttgttgctagcattgtaatcgaacaacataatgctattgatttttttagtgctccttttttcattttaatctcctttttgtaatctaaaaacgaaattttcgtttcttcttacataagaatatacttatttttgttctctcgcaatctatttttttgacaaaaaaggttaaaaattttactttttacactattttatgttaaataactggaagtcatataatctaagtgttccaactccatcatcaggtgtaaatattttatatttaactttattcctgacactgtacagcatcataccctgtttcacctgttcttatttttgtggcactggcaacagggtaactgaagatttttccatcaccaaactcccctgtgtaagccgctttttttattgcttctattgttttttctgcccactcttctgaagaaacaacaatctcaaatttaatctttggctgcatctgtggctcaacttccataccacggacaatttctttatagcctctctgtaagccacatcccattacctgagatactgtaagaccattaacttctatctccattaatgcattttttacatcttcaaatttttcttctctaacaattgcatctattttcattatcatagaatatcatctcctcttgatttattactgatccataccattaaaacttggatatgcattttcaccgtgctgtgatatgtcaagtccaattctctcttctctgtctgttactctaagcggtgtaaatattcttactattgctacacaaattaaggttcccacaactgcaattacaattgtaataagtattccttctatctgtgctgcaaataacctccattcaccataaactaatccatcccattttgctaccggattaatagaatttttcccaaatatacctgttgcgattcctccccatataccacctattccgtgacaaccaaatgcatctaatgcatcatcaatttttaattttttctttataagtataactccataataacatattgggctgacaagagcaccaattataaaagatgaccaaattggaacaaatcctgctcccggtgtaatagctaccagaccaattaccaaacctgttgaagcgcctaccaaagttgtttttctgtcatttattatatctaataacatccatgataacaatgctgacgccgatgcaatagctgatgtcataaatgcatgcgccgcaagtccgtctgctttcaaggcacttcctgcattaaatccaaaccatccaaaccaaagtattgtagcccctaatacaacaaatggaatattatgtattctgtatgtcgctctctcataaccttttcttcttccaagaataattgcaagtaccaatgctgttattcccgaactgatatgtacaacatctcctcctgcaaaatctacagaacctaattctgccaaaaatcccccctgcccccataccatatgtgctaacggataataaactattattgaccatattgccacaaatatgaataaagctttaaatttcattcttcctacaacagaacctgtaattaacgccggtgtgataattgcaaacatcatctgaaatgcacaaaatactaaattaggaattgaatctgaataaggtccagtgccccatccaactccttctaagccaaaccatctgaaatctcctattattccaccatgatttccaccaaatgctaatgaaaatccaaacaatgcccacataacaacagctaatcccataatcataactattgccatcatagtgttaactacattttttcttcttactaaacctccatagaaaaatgccaaccccggtgtcataaaaaataccaaagccgcacaagtcaacataaaacctgtgtctcctgcattcatgcaataatacctcctgctcttttaacatatttttcttaattctcatcttgtgtaccaaaacatttcaatgccataaatttcagtccaagtatttatgacatcgaaaaaggcgcctggccataaagccaaacgcccttgtttgttaacgtgaagtctatcatttattaagtgaaaacacaagtatatattttatttttttaattatctaatgaatttatttaattattttaagcttttacttaattttgtttagtcccttttcaatgcctattgcaatcttctttaacgttttacttgaatggtcgcttctcttatctcccacttccaaatctacagatggtattgttgagtaagaagtctgagtaagatctattgccatggaaccactgccataaattttaacaccggcacttctcattccgtttataaggttctttcctaaattattgtgtttcttccaattctttgaaacaggatacatacttctatatttgttgttgttaggaacactaatatagaaagctcctttattagaagatgttgaatcataatgtaatgcaatatggtaatccgcattattattagcaaaaactgttcttgctatattatctaattgtgcatcatcgctttctctaaccataagaacattatagccttcttttaaaagctgtttcttaacagtcatagcaagtttaagtgtggctgttgcctcccttgtgccatcggctaaagttgttccaccattaatagatgtagcagttatggctccctggcttgtacttcctcctgtaaccttgctacttccatcaggatggcataaagttttaacactttctccgcctcttgttccgtgtcctgcatttacacatactgttttgtttttctttttagctgcattagagaaatataatgtaggtgaatcagtatgaatctttgaattttttgcaaattcccacttagtattccatgcaataacttctgctacattactccactcagaataatattttttattattcttttttacgtaagcactaacacgaacataatagttcttagacttatttacttttgcaatcttagtctttgtctttgatgcactttttacatttttgttttttacgttcttgaaatccttatcattagaatactggattctatagccattagcctttttattctttttccatgaagcagaaatagttcctgactttcttgttaccgtgtctatgctaatcttcttaacattaaccttaacattagtcttgtttgttgtctgcttatttgttacctgctcatttgtcttaactacaacatttgatatggttggattcggcgtggtagcttttggaatatccgcataactattacctgttccttggaaaaacactgccgtagctataattaatgtaaaagcaactattttattaactactcttttactcatttgtacctcctgaaaattgtaaatatctgtaatttaattataccatttttttgtcttattgtttattttaatatatcttatatttttttcttttcttaaaggcaatttcattgtaaaatgaatataatgaaaacgacagaaaggagcgaatacatgaaaaaaaagcttagtattctgctatgtttaacactattaattcttagtggttgccgtgcttcgggaaatactatccgattcggtgccgctgatattggtggtatgtattactcttttgctaacacttttactgaactggcaaatgaggaatatgataattataaatttgaagttagaaccactgcaggttcatctgctaacctgcgacttttatctgacaactatattgagttaggtattgcccaagctgatttgcttgacaacgcttacaagaagaacagcaatctgcgtgccattgcaggattatataccgaagcatgtcagcttgttgtaaaggctgattcagatattaaatcaattaacgacctttccggtcatacagtaagtattggagcagaagaatcaggtactgaattaaacgccaatcagatattggaattttcaggtatgccttcttccattgttacaactaagaatatggattacattgatgctgctaatagccttaagtcaggtgacattgatgcgttcttctgtacagccggattaaaaactacaattattgatgagctttcaagagaatgtgacattcgcattattcctattgatgacacagttatcaacaaaatgctcacatattcaagttcttatagtcgttatactattcctgccggaacatataagggacaggatgaagatataaacactattggagtaaagtctgttcttataacatcagactctatttcagaagctcttgttaaacagcttacgcaaatgctcttcaagaaatcaaaagaactccagtattcaacatccctggatcttcagattgatgaaaaatttgccactgacgacattacaattccttttcattcaggtgcagaatcctactataaagaaaaaggaattaatctaaatacacaataattaacagaaagggtaaataatgaagattcaattggatatgtaccaaacgttagctgttgctgttttggtacttttacttggaaattttttaaagaaacgaattaactttttggaaaaattttgtattccttctcctgtaatcggaggacttttgttcgccattatgacatgtatttgttacacaacaggaattgctgaattttcctttgatgacactttacgagaagtttgcatggtattcttttttacatctgtaggattccaggcaaatcttaaagttttaaaaagcggtggtaaatcactgattgtatttcttggacttgttatcgtattgatacttctccagaacgttactgccgtaggacttgccaaagctttaggacttgatcctcttattggaatgtgtacaggttcaattccaatggttggtggtcacggtacagccggagcttttggtcctgtacttgaagatttcaacatcagtggtgctactacaatatgtacagctgctgccacatttggacttatcttcggaagcttagttggtggtcctcttggcaaacgtcttattgaaaaacataatcttcttgatactgtttcaacagaagatgacagcttacttgtagaagatgaaaagaaacatgaacgacatactaatatgtatcctgctgctgtgttccagcttattcttgctattggacttggaactattttttcaatgttccttacacagacaggacttacatttcctatttatattggtgccatgcttgccgctgcacttatgagaaacatttgcgaatacacaaacattactactattcacatgggtgaaattaacgaccttggtggtatcagcctttcattattccttggaatggctatgattactttaaagctttgggaacttgcttctcttgctttaccacttgttattttattagcagctcaggttgttttaatttgtgttttcacttattttgtggaatttaacattatgggaagagattacgatgccgctattcttgtttcaggaacttgtggtttcggtatgggtgctacacctaatgccatggcaaacatgcaggctgtttgtgaaaaatatgttccttcagtaaaggcatacctactcataccacttataggaagtttgtttgctgactttcttaacagtttagttattacattttttattaatatattataattttgaggagtaaaatatgtttgagaaattgagaaaattttttgaagcaaaaaaagaacagcatgagtataattacaatgttaagttcgacaacgtagccattcctgaggttcacactcacaaatcagataagcacgaagaggaaaaacctaaacactctccgataaactatgaaaatgtagctatacctgaagttcatattcgtacaaagaaaaataaataatattatatggattttcaaaaatccttaattaaattctaaaagtccgctatcattttgcgtctcgataacggactttttttattttagtatgtccttccaaccttctactatttcttccaactcataagaagttctttttcatttgtatcattatcaatactt

SEQ ID NO: 12762 - DNA, 328 bp, Unknown
  gut microbiota DNA sequence
tcgactagtgagctattacgcactctttgaatgaatggctgcttctgagccaacatcctagttgtcttagagatcccacatccttttccacttaacatgcactttgggaccttagctgcaggtctgggctctttcccttttgactatccaacttatctcgtatagtctgactcccgttcatcatctgtatggcattcggagtttgatatcccttagtaagctttgacgcccccttgggaattcagtgctctacctccaccagactaaaacgaggctagccctaaagctatttcgaggagaaccagctatctccgggttcgattggaat

SEQ ID NO: 12763 - DNA, 122485 bp, Unknown
  gut microbiota DNA sequence
atttatgcaatgattgattctctgagtgaggaagaattatttaaaccacatatgagaaaatgggctgatgaagcaactaaaacagctgtctgggaagtatacaaattcatacatattaatacagttgctcccttcggaacctttagaaccaagattagaaaatggaaaaagattgcactataacttcttgtttggaaagcttaaatcttcgaaatatgtagatgtaagaaataaaggctgataccaagatattacaggaacatattgtgcctcattaattaatattgtaaaggttaattacacaagaatatttgtggcaagagcatatgcaaagattgaatatgaaaatggtgaaataaagagtatatactcagagcagaatgaaggtttgcaaactgtgacaaagtaaaaaatagagtattacaaaggagtatgaatatgaaaaataatgaaataatagagaaaatagcgaaaagcactattggaggcaaattgaaatacatgttaagtattttagccatgtgtggattaataagcttagtagcgttttcaagtgaaacaaaagcagaaactttagtggagaaggaaacaacggtagtagtggaaaaagagacaaatattccaactgaaagcactaagcctaatgaaactaccggacctaatgaaacaaaaaagccagaggaaacagctaaggcttcaataatcaaaaagtcatccttaagtccggcaaagtctaaggttattttgcttgatccgggacattgcaggaagcatataggtgcaaggggcaatggattaaaagaagaggatgttaatctagacataggaaaagcatgtagaaattacttaaataaatattcagatgtaactgtttatatgacaagaactaatagcaagtgcgttaaaaaacttaagctaggcgattgccttacggcaagaaatcatttggctaaaagattaagtgcagattcacttgtaagctttcatataaactgggatccagacaaaaagagaagcggtgctatgatattagcagcatacaattcaggatataataagaatgttagcaaaaccactcaggcattgggtagtagcataatgtctaatttgcaggaacttggaataaaaaacgagggtttttggtttagaactttggatgatggaaagtataaaaacggcgcaaaggcagattattactcaattgtaagagagggcgttcttaacaagattccaagccttattattgaacatggatatgtttcaaacaaaagtgattgtaacaattattttaaaactgctgaacaaagaaagagtttgggagtggcagatgcaaagggtatcattaattattacaagcttagtgcaaaaaacatcgaaggtgattttcaaacaatttcaggcaagacatattttgttgacaaggaaggaaataaaatagcaggctgggtaaaaaaagacggaaagtggtatcactttaacaacaaaacagccgttatgaataaaggtttctttaaagaagcaggaaacaaattttatttgaatccgaagactggagaaatgacaagcggttggtttactattcgtggtaaaagttatttggcaaaaggtaacggagttgtagtaactaatcagatttacacagacggagtgaaaagttatttcttcaagaaaagtggaaaaagaaaaaacggatgggtaacatacaaaaatgctaaatattatttttcaaagaaaaaaggcatgcttaaaggcaaacagaaaatcaaaggaaaaagatatacttttagcaagaaaacaggaaagcttagaaagaagaaataagtatatagttgttgtgaaggagaagaattttgaacaaaaatatatttttagcaccgggagcacatgttgttggaaatgttaaaataggaaacaacgtgggaatctggtataatgcggtaattcgtggggacatggaaggaataacaataggcgataattctaatgtgcaggacaattgcacattgcacacaggtaatggttttgcgttaaccattggcaatggggtaacaataggtcataatgcaatagttcatggatgtacggttggagataatacagttataggaatgggaagtattcttctgaatggagcaaaagtaggcaagaattgcattattggtgccggtgctttagtaacgggaaaaatggaaatccctgacaattcaatggcatttggtaatcctgctaaagttatccgaaatcttaccgaagcagaaatagaagacaatagagagaatgcagaagaatatgtgaaattaatgatgcaggaggtaaagtagaatgctagtaacaataagaacaatcttaggcattatatgcttggtactttgcgtgctggatatttgttttttaataaaaatcagaagaacaatgaaaatggaatcattaaccaaagaagatattttattaaaagatagtttaacatataaagagttgatgaaatcacttaagctgtttggtgcaatagcaatattggcgtttgtggtaataattcttagctggttttagaggtggattcttggatgaaagttacgactttgtgttacatagaaaaagatgaaaaatatttaatgttacatagaactaaaaaagaaaatgacattaataaggataagtggattggcgtaggcggtcactcagaaggaaatgaaagccctgaggaatgtcttttaagagaagtaaaagaggagacaggcttggaattgttgtcgtataagtttagaggtttgataacttttgtaagtgatgactgtgagcctgaaatgatgtgcctttttacatcggacgattttcgtggagagattattacttgtgacgagggagaattggaatgggtaagcaagacggaagtgcctaaacttccaacatgggaaggggatgctatttttctaaagttgttgcttgataatgaagaaagatttttttcattaaagcttgtttatgaaaatgaaaaattggttgaaaaggcagtgcaaatctattaaaaaatcataaaatattcgagaaatgcttctaaaaaatatttatgataaaataaagatgaaaacgtttcaattgtcgcaactacgaaaaaagaaaatccatattgatttcttccgaaacaatagtacaatcaagttataagggtatgaacaggaggacaagattatgaaaggaaatttaaaaaaatctttatcaatctttggagcattgtcttttgcttttacagcaggatttttgcttagcaatgtcaatgtttatgcagcaactaaccagacacttgaactgaacaaggattattattttgacttgaatggagatgggcaggcggagaagattaagtacacaactcagattaataaagatgataatgacttctttaatagtgtaagtttgtttataaatgataagaatgtttacactaagaagttaacagatacttgggctaagtatacggttcttgatattgacagtagtgataatactttggaattgaatttgcagattggaggctattcggatgttatggattacagttcatttcagagatggaatggtgcgtcaattgtagaatttgataacgataaaaacaaggctttgaattatacaagagagtattcttttagcaatgtaaaaggcaatggcagatttaatattgtggtagatacaccatattcattgccaattggctgtttttatgctaacattccattgaaattacagaataacaagattacaacaactacaggaacatataatcttgtaggaagttcaaagaagtataagtataaggctaagagtaatattaaggtttacaaaaaagcatcaaagaagtcaaaagtgaaatttacagtcaaaaaaggtgacaagattaaaatgataaaaattaaaccaatgaagaatgtggcaaaacgtccacagggcaagtacggagaggaaaagccaattaatgcttatgcttatgtaaaaacaaaatcaggaaagaaaggttggatttacctaagtaaaaagaaatcaagctggggcaggaagatgttgtttaaaaatgttccgggctggggttgataaagattgattatgagcaaaagagaagatatttttgaaaagttagataatttaatagaacagaatcagtttgaacttgtgtcagataaggtagatgataacaggcttaaagttatttatcttatgaatgatgcggttgaaagttttattgtatttgaaaatgcaagaattacaggagaatatataaaggactatcagggagagattaataaatccctgacagttcaaaaaaatgacagtacaggcaatgatgaatatgttttggttgtacatcagaaagattcggtgtgtactgtattttttgaggatgttagtttggaagttaatttgtatgattacggaagaactgcacatttttggattgaaggttatgaatatttaagacagcttgaatacaaaatttcaattctcagggataaacttgattatttgggagaaaagtattgtaatgatttggagaaagagctggctaatcttacagattttccaccgcttaattattgcttttatccttcggtgcctgagaagtatcttgtgccaagggacaatccgtgggagccaacagacaaggcaatcagtgttatgcttaaggtggcaagagagcagcaggacaaaatgctttatcaggttcttgttttatataagcagtttaagaacagaaagcttgcaaaagttatagcaactatgttacatagaaagtctcacggaaaagttgtggaaagtcttatggaaaaaatgacagaagcaacaaagaattatccaacaagagagtttggaaaaactgcagacaatgagcataagaagattttgacaagggcaaagcaacttcagaacaagttaaaacacaaaaagataaagtcagagatattcgtggaagagccttttgttgtggcaactgattccatagaatacaaagtgtatcttatgatatggaagaaaagcctgataaatacaaaagtagaaatacaggaaataaaataaagtaaaataagaaacagaagtattaaacaattattgtattgcaaatacataacataataaaaagacagaagacttacagaataattatagaaaaaattacaggaaagatttaagagaaataattacatgaaaaattcaatttttagtaacaggaaaacggcccctttttgggcgtttttttgtgcggcaggttggtcgttggcgtatccgctgattaaattaggatatgcccagttgcatatagcctcggatgatttaggaagcaaaataggttttgcaggaatacgatttctttttgcgggaatattagtaacaatccttgcaataatacaaaaaagaaaatttaaagttgaacaaaaaagcgttgtggcgtggctattattatttgcactggttaacacagcattacattatttgttttcatatgtgggacttggttatcttccaagttcaaggtcaacaatactcgactcaatgaatggattttttgccataatattgtcctgtattatttttgaggatgataaattctcaaaaactaaagcattgggatgtatattgggatttagtggaatattacttataaatattcaaccgggacagaatttctttcagggaatttcatttagaggcgacggaatgattcttctaaatgccctgtgtggagcctttggcggaattattacaagaataatttcaaagaagatggatatgactgttgcaacaagtttaagcatgactataggcggcgcatttttatgtgtagtttcagcaataatagagcctgcagcaagatggacaataaccacggaatccattataataatgattggactgattcttatatcagcagtatgctttggagtttataatcagcttcttgcatatcatccaataagtaaaatagccatatttaatgcattcattcctattcttggagttatcttttcaagcataattcttggtgagccaatgaaagttaaatatataattgcaggttgtatggtggcacttggagtatacgtaatgaatcatttttctaaataaaatgttaataaacgagaggtaattaatatgtataagaacattgcaaagaaagaaaaattagaattaaaaagcttagtagattatcaggaaggacaggttgtaagcaagactttagttcagaatgattatgtaagtgttacattgttttcatttgacaaaggagaagaaatttcaactcatgcatcaggtggagatgccatggttacagtgctagagggaacaggaaaatttacaattggtggagatgtttttattcttaaagaaggtgaaacaattataatgcctaaggatgttccacatgctgtatatggtcaggaaaaatttaagatggaattagttgtttctttctaataaataagagtacaaacaattaggaaaagtattttagaaattagctgactaaataataaaagaaataaaataatataataaattaacaaaacgattaataaaataaaaaaataaggaaaaacagttgctaagaaaaagctaaataattatactgtgccttgtttgaaacattaagcgagacaaagaggttttgcatacacaatgtatgcagcctcttttttctttaataatccccttatgttattagagaaaaggcttaagttttaaaatataactttttacaaggaggcaggaaagtatggttagaaagggcagaagaaaagaatttggaaaattcacaaagaagattgcagcagtaggtttggcacttgcaatgacagtttcaacagctataccaacatatgcatattatggattttccggagagtttaccagaagtgaacgtttaactcagacaagagttacctcaacattttcagagaacgaattaggagtcgttaactttgaaacaacatggggtgacaaaaaggctaacatagcaagtatggatgagtatattgaagaggcagacaagaagggagtaaaagttttagttttccctgaaatgtgtgtaacaggatatgtttcatcaagtgatccaacatcaactgaatataaatgggcagttgaaagtgcagaaactaaggacggagaaacagcttctcattttgcaaaaatagcagatgaagatgatatgtggattatatatggtgcaacggaaacaattgaaaaggatggaaaaattgataagaatcatgcgtataattcagcttttgtttgttcaccggatggagatgtgacaacttatcagaagattacaccggttgaaggttcatggtgtacatcaggcgacacaccggtaattatagatgcaggtgaatatggaaaattaggcattagtatttgttatgatacatattcaacacctgaacttgaaagatattattcagcaatgggatgcaatatcttgattaatccaacagctacgggaggtggctggagtcagagtaatatgtcagcatgggaagaatattacaaagtcagacttgaaagcattgcttcaagagatggattccttatattaagttcagatttggttggaatgaatgaaacaccaagtaatccttctaaattccctggtggtagtattattatgaacgcagtgtttaacggaccttcatatttggtaggtgcagatgatgattcaaatattattacaaatcaggaaggacttcttacaaacagtaaatcagttagggcatcaacaggttctacgtgttctaatgaagattttaatcctgaattatatgttgatttatatagtgaattagctgacaagatggaagaaaacggtggagttctaagatatagtgcaaatacaacagcttcaactaagggaccaaaggcagccgttgttaatatgacaggttattggggcaataagacaaagacaattgcaaagatgaaagaatacatagaagaagccggaaagaagggcgtagacattttagttttccctgaaacggtattaacaggctatggatatttacagccgtcacaggatccgttctatcagaagtttggagtatctatgcaggtttatacagctgaaacaattccgggagctacaacaaatgaactttcaaaatatgcaaagaaatacaatatgtacattatctttggtatgactgaaaaagatgaagcgggaacaataaaagataatggtgttgaaaaagtatataactcagcagcaattctttatcctaatggaaaaattgattcttatcagaagattcatagagcaggccaggaaaataagtggtcagtaacaggtaagacaccaaagattatcgaaacaaaatggggcaagattggtgttgatatatgtagggacggacatttttatcctgaacttggacgttattatgcagcaatggggtgcacaatgtttgtccatcctacagcaacaacaggaaatgcatggtatagatcaacaagaatcggttcatatgtagaccgtgatggaatggcagcaattacatgtaacttacttggcggtgatggtatttatgtggcagacggagcttacacatacagccctgatgatattgatgaaaatggtgatttcgttggtggctcagcaatacctgaaacaatttataatcagaatgaaattgaagatgatccatactggaatagcagaaactggcttggaacaggtggtgtatttaacagcacaagttttatagcaacaaaaggttcaacagcttcaacagcattaaagccaagaattaactataacggcacaggtgcatattcagaaggcttcgaagaaagaggtaatacaagtccgcttggtcttgaaatagctgatatggaccttacaggaacaggctttagcggaacagagtcaacatttaagccggcattatatgctaaattatatgataaacttgcaacattatatcgcggtggttatgtatcaaaaataaaagataaagataatagtggcacaacactggaaacaacaactgcaaaagattctgcaacaaagactacagaaccaaagactacagaaaacaaaaaggtagcaacaaccactgtaacagtgaacaaaactttggttaagaaggctacaaaagttaaggcttctgcaaagacaaaaatttatgttaagaaagttgtaggtgcagctaagtatcaggtacaggtatcagctacaaagaactttaaaaaggttttggcaactaaaacatcaacgaaggcaacatttacaattaaaaacagtaagcttaaaaacaagaaagttttatatgtaagagtgaaagttgcaaagaaagtaaataacaaattagtttacagtaagtggtcagcttcaaagaaagttgtaataaataaaaaataattaacaagtaaattagtacaaaaaactttataaaaatctaataaaaagcgtcttatgtgagaaaaaatcatataaggcgttttttttcgacaaaataaattcaaaagagttaagttatatgataaaataaagagtatttattaatacagaggagattaaagtatggggactaaagaaaaaaataaaaaaggtttaagcattgcaaaggtttatttatcaaagcagattttaataatattatgcattgtggcagtggttcttgttgcgtggtttggcacaaggaaggttgtttcaattgacaataagactactaaattaggttttgagaatattggagaacttgcaactcaggaagcatattgcactgaagttaatgttacagatgagtcaaagcagttgtttggaatcgacattccttttactcagagcaagtatatttacagttatgatgtaaatgttaaggcaggaattgattttgaccagattgactggagcgtaaaggataagaccataacggttaaagttccaaatgctaagattctaagctgtgaacttaataaggattcttttaaggtgtatcacgaacaagaaagcatattcacaaagattactttaaaagataacaatgaggcaatgagcaagcttaaggagaatgccaagaaggatgcagaaagcaatggacttcttgaaaatgccgaaaagaatgccaagactattataaaaggttttattgaaaaagtttatgatagtagtgagtatgaaattaagtttgttgaaaaataatattaaaaagctataaaaaaactatcaaaattagcataaaaaattaataatgaaattagcataaaattagtattaaagtttggattaggagataaatatgagtgaaaaagtaagaaaacacataatcttctatggaagagttcagggggtaggatttagatattattcagtatataaatccagacagcttgggcttacaggctgggttagaaatttgtatgatggaactgttgaaatggaagttcagggagaacagctggttatagatcagttaattgtttttcttcaaaatcagagatttataatgatagaagatatggacattaagaagattcctgttgtggatgaccatgatttttatgagaggtaataacattgattatatggattgttacctgctttgcactataacaatctgtctcaatatttgcatattgtgaagtttatgcttcattgtatgttagtattggaacactgtaatcaatataattatatataaaatgatgatagatgaggttaaggttttgaaaaaaggatttgataatgagaagtatttaaagatgcaatcagaacacattaaggaaagaattgcacagtttggaaacaagttgtatttggagtttggcggtaagctttttgatgattatcatgcatcaagagtattgcctggatttgagcctgactcaaagttacagatgttattacagttaaaagaccaggcagaagttgtaattgttattagtgctgaagacattgaagaaaacaagattcgtggagattatggaattacatatgacatggatgttttaagacttattgatgaatttcagtcagtagggctttttgttggcagtgtttgtcttacaaagtttgcaggacagccggcggcagaattatttatgaagagattagaagaacttggaattaagtcatacaagcattataagattcccggatatccaagtgatgttaactttattgttagtgatgaaggttacggaaagaatgattatattgaaaccgaaagaccacttgttgttataacagcaccaggtcctggaagtggaaagatggctacatgtctttcacagttataccatgaacataagagaggaattaatgcaggatatgctaagtttgaaacatttcctatttggaacattccattaagacaccctgttaaccttgcttatgaggcagcaacagcagatttaaatgatgttaacatgattgactcattccatttggaagcatatggagagacaactgtaaactataacagagaccttgaaattttccctgttgttaatgcaatgtttgaattgatttcaggtaagagtccatacaaatcacctacagatatgggggttaatatggctggaaattgtatctttgatgatgaagcttgttgcaaggcttcaaaacaggaaattatcagaagatattatcaggctctttgcgaaaagagaagaacaggaagtacaaaaaataatatttctaagttagaaattcttatgaaacaggctgaaattacaccacaggatagagaagtggcagttgtggctcttaataaagaaaaagaaactgacaataagccggctgtagcaattgaacttcctgacggaaagattgttacaggtcgcacaactgaccttttaggtgcatcagcagcagctttgcttaatgctcttaaggcacttggtaatattgatgatgaagtagaattaattgaaaaagaagcaattgaacctattcagacattgaagactaattatcttggaagcaagaacccacgtcttcacacagatgaaattttaattgcattgtcatcaacagcagctcacaatgaaaatgcaaagaaggctatgggagaattaactaagcttaagggatgtgacgcacattcaacagttttattgtcatcagtagatgaaactacatttaaaaaattaggaatgcaacttacttgtgagcctaaatatgaagaagatggtagaaaatatcataaacactaacaaatagttcatagaatattcaaaatatgatatgaaatatttggtataatattttgatgtgaaggtatttaagaaaacggattgagatttaggtatatggcaatctgaaaattaatataggggtttttaactgacaaggagaacttatgaagaatagaacatcaaaagacaatacaatagtaagaaaaaaagttcagacaagaagatttaatgcagatatcagatatggtttaaacagtgatcaggttaatgaatattttgagaatggttggtctaacgagccggttgaaccgccgtcaaaaactgttccggaaattataaaaagtaatctgtttacgtattttaacttagtatttgcagttcttgcggcgctgttaattttggcaggttcattccgtaatttaacttttttgccggttattctggcaaacttgtttatcggtattattcaggaaataagagcaaagaatactttggataagttatcagtattaaatgccccaaaggctttagttgttagagaaggaagacagtttagtattcctgcggaagaactggtccttgacgatatagttatttttaaggcaggaaatcagatttgtgccgatgccattgttgtagatggcgaagtttcagttaatgagtcattgcttacaggtgaatctgatgaaatatcaaagaagcccggcgatgaattaatgtcaggaagctttattgtttcaggtgaatgttatgcaagacttgacaaggttggtgaggattcatatatatcaaagttaacacttgaagctaaggcaatgaatagtgaagaacagtctgaaatgattagagttcttgacaaattagttggagtagtgggtatattgattattccaattggactattactttttggacagcagtttttcttttcgggagcatcttttagcaagagtataacatctatggttgctgctgttattggaatgataccggaaggtttgtatttgctggccagtgttgctcttgttgtaagtgttatgcgacttgcatcaaagaaggttcttgtacatgacatgaaatgtatagaaacccttgcaagagttaatgttttgtgtgttgacaaaacagggacaattacagagaatacaatggaagttaacggagagattccaatggatggatacgacagtcagtctatggctccattaaagcagattattagtgattttgcttcggcaatgtctagtgataatattactatgaaggctatgaaggattactttaataagccttcaggtagaaaagcagtgtcagtaagtcctttctcgtcacagtttaaatattcaggagcagcctttgaagatggaagctatgttcttggtgcacctgagttcgtgttaagagaggattatgacaattatagagagcagattgaacagtatagttcagaaggataccgagttcttgtatttggtatttatgacggagttattgacggtaaagcattaacaggaaaggttacacctctaggcttggtatttttgtctaaccctattagaaaagaagcacctgaaacatttaagtattttgaaaatcagggtgtggaaataaaggttatatcaggtgataatcctgtaactgtttctcaggttgcgttgcaggcaggaatagcaaatgcagacaattatatagatgcatcaacccttacaacagatgaggcaattgaagatgcagtattaagatatacagtatttggcagagttacacctgaccagaaacgtaaatttgtcagagcccttaagaaagcaggtagaactgtggcaatgacaggtgatggtgtaaacgatgttttggcactaaaggatgcagactgctcagtggcaatggcatcaggaagtgatgcggcagcacaggcgtcacagcttgttttgttagattccaactttgcctgtatgccatcagttgtaatggaaggaagaagagttgtaaataacattgaacgttcagcaagtttgtttcttgttaaaaatattttctcattccttttatcactattttctgtatgctttatgataaattatccattggagccatcacagatttcgctgattagtatgtttacaataggtgttccggcatttttccttgccctacagcctaataaaaacattattcagggacacttcctatccaatgtgcttataaaagcattgccggcaggtattacagatttccttgttgtaggagcgcttgtagtatttggtcaggtatttgaagtaggtgagactgatatatcaacagcctgcacaatgttacttgcaatagtaggatttgtaattctttataacattagtaagcctatgaatgcacttcgctggtgtgtttggggcggatgtattgtaggacttttaggttgcagtatttatcttggagatttatttgcaatgcgcggtatgtctacgaaatgcattatgttatttgtggtatttgccataattacagaaccggcattaagatatagtacaatattaatcgaaaagattggtcgaaagatagtaggctggattgaaaaacgaagaaaagcaaaaattataaaataaattaggataaggacttcgtgtattcggggtccttattatattatgaaagtatacgattacatcaaatagttgagttataacaataggtgtaattaatgaaggagagggataaaatatggatgaaatggttgttttgttaataccgttgcttggaacaaccctaggtgcggcaatggtattttttatgaaagacaatattaatgcaaagattgaaaagactctacttggttttgcagcaggagttatgattgcggcaagcgtatggtcacttcttattccggcaattgatatgtctaaggaacaggggagaatagcctggcttcctgcagctgtaggctttatgcttggaattttgtttttacttttaattgacagcattgtgccacatttacatttggacagcgataagccggagggtgtaaagagtaaattttcaaaaacaacaatgatgatgtttgcagttacaattcacaacattcctgagggaatggcagtgggtgtagcgtatgcaggagcgattatgggacatagcaagttaagtcttactgcagctgttgcattgtcaataggtattgcaatacagaattttccggaaggtgccattatttcaatgcctctaaagggacagggaatgagtaagatgagggcatttaagtgtgggttcctttcaggtgttgtagaacctataggtgcatttataactatacttcttacatcaaagattattgtaatattgccatatcttttggcatttgcagcaggtgcaatgatttatgttgtaatagaagaattaattcctgagtcacagtcaggtgagcatactaatataggaacaataggtgcagcaattggatttgttcttatgatggtacttgatgtggcgttaggttgataaatgtgctaaaatatactgacggtgttaaaaattgatagggttcattagttacatattaatcaaaattgagacgaggagaaatattatgagaaaatcaaaaaaagttttatcggttattcttagtttatcaatggcatttagtatgtcacttatacagccaaattatcaggtaaaggctgataacagttattcagttttggatgctaaggacaatggaaaagaagagggtgcggaagttacacctattgatattagttcaggaaaagttcagatagactggtctaatattaaggatagttatgagtttgttggaaagagaataactccaatagtgttattatcttataaaggaaagaatttaaatcctatggctgattatacagttacgtacaagaacaatttttatccgggcaaggtaactatgattattaagggaattgatggttatacaggacagataacaaaggaatttcaaattgtaaaaaaagaaataggcaatgtaactattagaacagaatttgaaaataaacaattgaaaattactgtcaataatggtagttacgcgatgacaaaaggaactgattatgattatactgtagaaacagatgtaaagggtaagattacaattactttcacaggattaggtgatgattatacaggaacctatgttagaacaattgaggcagaagacaatcctaatgcgcctaaagaaacagaaactattgaggtttcaaaggcaaaggttaaatatgccaaaaacaaaaaaggcaaaaagattagtcttaagtgggctaagatttctaaagttacaggatataatgtaagatatgccacaacaaagaaaaagcttaaaaaagctaaggttaaaaacatcaaaaccaatactccaaaatacactattaaaaaacttaaaaagaagaaatattatgttcaggtaagagcatatagaactgttaatggcaagaagatttatggtgactggagcaaggttaaaagtgttaaagtaaagaagtaatgaattatacatagagctataatgaaatgatattgataaatgtatggaaagtaaagtataatcattgcagcaactaggaaacgagagattaagcagaaaatgaaagagaaacatttagacaattttgtaaaaggactaaaaaatggtattccaatagcattggggtattttgcagtagcatttacacttggaatacaggcaaagaatgcaggaataacggcatttcagtcagcagtggcaagttttggattgcatgcctcagcgggggaatatattgcatttactctttttggggccaacgcaaccatttttgtaatggtaatgatggaggttgtcgccaatgccagatatcttttaatgtcctgtgcgttaagccagaagattcccgcagacactccaatatggaaaagacttataatgggatattttataacagatgaaatatttggagcttcaatatctgtagcaggaaagcttgatccttattatacttttggacttgcggcagttgcctcaccggcatggtgtgtaggtacggcgctaggtgttttgatgggcaacgcattgccaatcagagttgtaagtgctttaagtgtaggtctttatggtatgtttatggcatgcataattcctgaggggaaaaagaacaaaatagtagcaggagtaatagttgtaagctttgttttaagttacatatttaatacactttctgtttttgcaggaatttcatcaggtgtaaaaattatgattttgactgttattatttcattagcggcagcaatattatttccggtaaaggaggaagaaaatgcataacatatatatatgtcttcttgcaatggctattgcaacctatgcaatcagagtgcttccgttaacattaattagaaaagaaattacaaataaatacataaagtcatttttgtattatgtgccttatgtaacattggcggtaatgacatttccggcaatccttacagccacacagagtatgtggtcaggtctgattgcattaattggtgcgattcttttggcttggaaaggtggaaatctttttcaggttgcaatagtaagttgtgcgctggtatttattgtggaattgataattgtttaagaagcaaataatttatagaagagtaggttttataaaaatatgactgtccaaagaagtcatattttatttaagaaagcatagttattaaggaaagcgggttcgttatgacaagaatagaaaagaaagaaattttgtcagatgaaaaaactaaaaaagtagcaatgcaggtgtctacagttagtattgtagttaatctgcttttgtcagtatttaaattgttggcaggtattataggaaaatcgggcgccatggtttctgatgccattcattctgcgtctgatgtttttagtagttttatagtaataataggcgttagcattgcaggaaaagaatctgatgaaggtcatcagtatggccatgatagattagagtgtgttgcagctattattttggcagtggtacttcttataacaggagcaggaattggcatagatggtgtaaataaaataataaatggaaccaatggcaatcaaacaattccaggaataatagcaatggttgcagcgattgtatctattgcaacaaaggaatggatgtattggtttacaagatctgctgcaaaaaagattaattcaggggcagtaatggctgatgcatggcaccacaggtctgatgctctttcttcaattggtgctttaataggtattataggtgcaagatcaggatttcctattcttgaccctatagcaagtgttattatctgtttattcattgccaaggcagcttatgaaatttttaaagatgcaatagataagatggttgacaagtcatgtgatgaagaagttgagagaaaaatggccaacattattttgagtcaaaaaggtgtagtttcacttgatttacttcatacacgtctttttggagcaaaaatatatgtggatgttgaaattgcagctaatggcaacatttccttatataaatcccatgccattgcacaggaagtgcatgatgcaattgaaaaaaactttcaggaagttaagcattgtatggttcatgtaaatccggctccaaagtttaaaggatatttgctttgcagtgattgtgacggtacattaacttatggggaagaggttttgtcagaagaaaacgttaaggccattaaatatttccaaaaagaaggtggaatatttactttggcaacgggaagatttcctgaatatgctgataagtttaaggatagattcaaggttaacgcaccaatagttgctttaaatggagcggttctttacgacaaggataatgagcagattattgaaaagtggccaatggcaaaagaggattgctacaaacttgtaaaatatgttaatgataactggacgaaagtttgggaatattggattaattatacagctcacgacagcaaggaatttaaaccacttgaaagtgctcctggagatggaagtcttgagaagttgtttgatagtattggagacgaagtttttaagattttatttattcaggatgaagaagttacggttgcaatgcaaaaagacttaaaggagaagtttggcaataagtttagatttgatacaagctggcctaacggtcttgaaattcaaagagtggatagtggcaaaggcatagccgtagagtatttaaagaaacactttaaccagcatattcatacaacgattggagtgggagaccaggaaaatgacatttcgttgttgcagaattgtgacattggttatgcagttggcaatgccaaggagaatgttaaaaagttggcagacagagttactgttccaaacactgaaaatgccataaaagcagtaattgaagatttagataagcaaaattattgataaaatctaataaaaatcaacaaaaaacaaagaatttttttacagtcggtttacactggctgtttttttgtgtataatattagttcgaccgacaaaaaataattttgtggtcagtttagtgtgcaaaaaacacatgtatgataaactaagtttcttagttagaaaggatgctgtattgaaaaaggaagaatttactcaaaaagtagcagaactgattgaattggctcataagaaggaagaccgacttacaattaatgagattcaggatttctttaaagatgatgatttgacagaaaagcaaaaaactgatgttataacagaattaacaggaaagaaaatcaatgtcaatatgggagtagacgtaaacgagccaaaggcacctaaagctgatagtgcaaagagtgatgatgccgataatgatttcccggaagaaggcgaggcaacagttgatcttgttgcagaacctacagatgaggatattgcaatggtagcagcagacgaaggagacttactggaacctacagacgagaattttgaaaatgatgaagaagagacagtagaatttgatgctgtagatttgctcgagggtgtaggaacagaggatccggttcgtatgtacttgaaagaaataggaacagttccactgttaacagcagacgaagaattagaacttgccaagcgtaagacagaaggcgacatagttgccaaagaaaagttaatagaggctaacttaagattagtagttagtattgcaaaaagatataccggtcgaggaatgagttttttagacttagtacaggaaggtaatcttggcttaattaagggtgtagaaaaatttgactacacaaaaggatacaaattaagtacatatgcaacatggtggattagacagtcagtaacaagagcgttagctgaccacgcaagaacaattcgtgtaccggttcatatggttgaaacaattaatagaatgtcaaagatgcagcgtaagcttacattagagttaggttatgaaccatctactaaagaacttgctacagcattagatatgacagaagaaaaagtacttgaaatcatgcagattgcaagagaacctgcatcacttgaaacaccaatcggtgaagaagatgattcaaacttaggtgatttcgtagctgataacaacacagttacacctgaagccaacattgaatcagtaatgcttcgtgaacacattgatgttttattacaggacttaaaggacagagaaagagaagtcataatcttaagatttggtttaagagacggtcaccctcgtacacttgaagaagtaggaaaaatcttcaatgtaacaagagaacgtatcagacagattgaagccaaggcattaagaaagcttcgtaaccctgttagaagtaagaagattaaagattttttgaataactagatattatttgattatgttaaaaggacttccggaagggagtccttttgttgtatctgaaaggctatggatgtgttagaccggattttgtggtgcttaataaaaaaactcactactgccgggctcgtgccaggaggatgttcactaatatagtgaaatgtgtggcttttgtatattgtaagctttataattttaagctacaggtttaatttattaaggttttcacctatccaatatatattaaataagccaaaccttaaaaaaacaagaaaaaggctaccaaaacttaattttacttgattttcatacgaaaatagtttataaaattaagtagcaaaacaataaagggtacaaagacgtacaacagttatagctgatgtagtttttgtgcccttttttgttacttacaaaataaatttttgtaaattgattactttatttattaaggttagttattatcaaacatttatataaaggaggaaaatcatgagtcaaaatgaattattcaagaaagcaaaagaagatggactatacaatccacgttttgagcatgataactgcggtattggtgctgtagttaatattaaaggtgtgaaaagtcatgcaacagtggaaaatgctttaaagattgtagaaaatcttgaacatagagcaggaaaggatgcagaaggaaaaaccggtgacggtgttggtattctgttacagatttcacacaaattctttaagaaagttaccaaatctttaggttttgaaattggtggagaaagagaatacggtgtaggtatgttctttatgccacaggatgaacttaaaagaaaacgtgaaatgaaaatgtttgaaattataactgaaaaagaaggtcttgaatttttaggatggagacaggttcctgtacatcctgaagttttggggtcaaaagcagtagaatgtatgccttgcattatgcagtgtttcattaagaaacctgaaggtttaagcaaaggtattgaatttgatagaaaattatatattgtaagaagagtcttctcacatagtaacggtggtacttacacagtatcattatcaagcagaactattgtatataagggaatgttcttagtaggtcagttaagattattctttgatgatttacaggacaaaagttatgaatcagcaattgcattagtacattcaagattttcaactaatacaaacccaagctggagaagagctcatcctaacagatttatagttcataatggagaaataaatacaatccgtggtaatgcagataacatgcttgcaagagaagaatcaatgaacagcgagtatatgaacaattcattacataaggttatgcctgtagttgacactaacggttctgactcagccatgcttgataatactttggaatttttagtaatgaatggtgttgatcttccacttgcagttatgatgtgtattcctgaaccatgggaaaagaacgacacaataagccagactaagaaagacttctatcagtattatgcaacaatgatggaaccttgggatggacctgcatcaattcttttctctgatggtgattacatgggagcaattcttgacagaaatggtcttagaccttcaagatattatattacagatgatgaccagcttatcctttcatcagaagtaggtgttcttgaaattgatcctgcaaagattgttgtaaaagaaagattaagaccgggccgtatgcttttagttgacacagttaacggtaagttaattgacgatgatgaattaaaagaatcatatgcaacaagaaagccatatggtgaatggttaaataataaccttgttaacttaaaggacattcatattcctaacgtaaaagttgaaacatatgaaaaagaagaacgccagagacttcagaaaaactttggatacagctttgaagaccttcagagaattattccaatggctaacacaggaaatgaagctacaaaggcaatgggtaaggatacaccacttgcagttttaagtgagagaacacatccattatttaactattttaaacagttatttgctcaggttactaaccctccaattgatgcaatcagagaagaaatagttacttcaacatcagtttatcttggaaaagacggtaatatattagaagaaaaacctgacaactgcaatgtattaaagattaacaatcctattttgacaaatacggatattttaaaacttaaaaatattaaagagccgggatttaagacagcagttgtacctattgtatattacaaaggtattaagcttgaaaaggctattgaacaggtatttgtagaagttgataaggcacacaaagacggagcaaacattattattctttcagacagaggtgtggatgaatatcatgtacagattccttcattgcttgcagtttcagcagtacatcagtaccttgtaaaaacaaagaagagaacaacattatcattagttcttgaaagtggtgaaccaagaagcgtacatcattttgcaacattgttaggatacggtgccagcgcagttaacccttatcttgcacacgaaacaattaagcagatggttgaagagggtatgattaacaaagatccatatgcagcaattgatgattacaatgaagcaattttaagcggaattgtaaagattgcatcaaagatgggtatttcaacaattcagtcatatcagggttcacagatttttgaggcagtaggtataagcagtgatgtaataaataaatatttcacaggaacagtaagtcctgttgaaggtattacattagatgacatagaagaaagcgttgataagcttcactcaacagcatttgatccattggaattagatgtagacttaacacttgaaagttcaggtgaccacaaacttagaagtggaaaggaagagcataaatataatccggcaacaattcatacacttcagatggctacatggacaaataactatcagttatttaaacagtacacacatatgatagatgaagaaatggcaccggtacatttaagaggcttaatggactttaattatcctgaaaacggtggcattccaattgaacaggttgaaagcgtagattcaattgtaaagagatttaaaacaggagcaatgtcatatggttcaatttcacaggaagcgcatgaaacaatggcaattgcaatgaatatgattggtggaaaatcaaacagtggtgaaggaggagaaagtatagaacgtcttacaatcggctctgatggattaaacaagtgttcaaagattaagcaggttgcctcaggacgttttggtgttacatcaagataccttgtaagtgccgaagaaattcagattaaaatggcacagggtgcaaaaccgggtgaaggtggacatttacctggaaagaaagtttatccttgggtagcaaaaacaagatattcaacaccgggggtaagtcttatttcaccaccaccacatcatgatatttattcaattgaagatttggcacagcttatttacgacttaaagaacgctaacagagattcaagaatttcagttaaacttgtatcagaagcaggtgttggtacagttgcagcaggtgttgcaaaagcaggtgcgcaggttattttagtatcaggttttgacggaggcacaggtgcagctcctgaaaactcaatttataatgcaggtcttccttgggaacttgggcttgcagaggcacaccagacacttatagctaacgaacttagaaataaggtagtagttgaaacagacggaaaattaatgagtggtcgtgacgtagccattgcagcaatgcttggtgcggaagaatatggttttgcaacggctccacttgtaactatgggatgtgtaatgatgagagtatgtaaccttgatacttgtcctgtaggtgttgcaacacagaaccctgaacttagaaagagatttaagggtaaacctgaatatgtagtaaactttatgaagtttatcgctcaggaattacgtgaatatatggcaaaacttggcattagaacagttgatgaattggtaggtagagtagacttacttaaagttaaggatggcgtaagcgaaggaaaagctgacgaagtttgtctttcaaaaatccttaatgctgattttgctgatgttagagttaaatatgataagaagaatgtatatgactttaagcttaatgaaacaaaagacgttacagtattgattaagaaacttggtaaggctcttgaacagaagaaacctgcttcagttgaagttgatgtaacaaatattgacagatcatttggtacaatctttggttcagaaattacaaagaaatacaataacacattagaagatgatatgtatacagtaaaatgtaacggcgcaggcggacagagctttggtgctttcattccaaacggtcttacaattgagcttacaggtgatagcaatgactacttaggcaagggactttcaggtggtaagattattgttaagccacctaaggaatctaagtttaagcaggatgaaaatattataatcggtaacgttgcattatatggtgcaacaagcggaaaagtttacattaacggtgtggcaggagaacgtttctgcgtaagaaactcaggtgccacagcagtagttgaaggtgtaggcgaccacggttgtgaatatatgacaggtggtaaagttgcagtaatcggaaaagttggaaagaactttgcagcaggtatgagcggcggtgttgcttatgtgttagatgaaaataatgatttgtatagaaaagtaaacaagtcacttgtatcaacagaagaactttcaaacaagtacgatgtattagaattaaaggcaatgattgaggatcacgtaaaatatactaactcaattagaggtaaggaaattttaaatgattttgaagaatatcttccaaaattcaaaaagataataccatatgattacaagaaaatgcttaatgcaattgcaaagatggaagaaaaaggattaaatccggaacaggcacagattgaagcattttacgctgcaacaagataggaggaatagcaatgggtaagccaacaggatttttagattatgatcgtgaagatgcaaaggcatcttcacctaaagaaagaataaaaaactttaacgaatttcatgaacatttatctgaagaaaagcaaaaatgccaggcagcaagatgtatggattgtggcgtgccattttgccaaaatggtaaagtaatatcaggtatggtatcaggctgtcctctgaacaatctggttcctgaatggaatgatcttttatatcatagaaatatggaacaggcatataaccgtcttcacaagactaacaactttcctgaatttacttcaagagtttgtcctgcactttgtgaaaaagcatgtacatgtagtctttatggagatgcagtaagtgttagagacaacgaatatagcataatagaaaatgcttacaaggaaggatatgcatcagccaaaactccgtcagtcagaacaggcaaaaaagtagctgtaatcggttcaggcccttcaggacttgcagttgcagatcagttaaataagagaggtcacagtgtaaccgtatatgaacgtgatgacagagtaggcggacttcttatgtatggaattccaaacatgaaattagaaaaacacgttattgacagaaaagttaatattatgaaagaagaaggaataaagtttattacaggtgtaaatgttggaaaagacattaaagcatcagtattattaaaacaatatgacaaagtagtattagcatgtggttcaagaaatccaagagatataaaagcagaaggaagagatgccaagggaatttattttgcagtagactttttaacatcaacaacaaaaagcttattggataacgatttaaaagaaggcacatttatttcagccaaaggtaaagacgttgttgtaattggtggtggtgacacaggaaatgactgtgttggtacagctatcagacatggagcaaaaagcgttatacagttagaaatgatgccaaaagcaccggataaacgtgcagaaaacaatccatggcctgaatggccaaaaatctgcaaaacagattacggtcaggaagaagccattgcagtatttggtaatgatccaagaatatatcagacaactgtaaaagagtttaaaaaagacaagtcaggaaatcttacaaaacttgtacttgtaaaacttgaagctaagaaagatgagaaaacaggcagattaaatatggttgaaatacctggaagcgaatatgaagtaaactgtcagttagttcttattgcagcaggatttttaggcagtgaaaattatgttacaaaagaatttaaggtagatataacagacagaacaaatgtggctacaaaggcaggaaagtacgcaacaagtgttccaaacgtatttacagccggagatatgcacagaggccagtcattggtagtatgggcaattcgtgaaggtcgtgactgcgcaagagaagtggatgaatcattgatggggtacacaatgctgtagtgggatgaaatatcagaaaagacataatataaaaggaacaggaccgtcagttgaaaaggctgaaaggtcctgtttttaagtttgattgaattgagtcccgtgtcaaggacatttttaaaaagtttgtagtgatttttaaattgctccatatgagttaaaagttgttcgtatggggcaaaaacaaggcttgaatacattcaaacttaacgtgaactaccccatggagtaaggcttgcgcagaatatggggcaagtacaaagcttgtatatattcaaatttaaccgaaactaccccatagagtaagagctgcgtaggatatgaggtacttttaaaagatttgtaccatatgagcagaaaatatcgtatatggtacagatatgaagtttgcccagtttgatttctaagaaatctgtaccatataagcagaaattatcatatatggtacagatatgaagtttgctcggcttgatttttaagaaatctgtaccatataagcagaaattatcatatatggtacagatatgaagtttgcccagcttgatttctaagaaatctgtaccatataagcagaaattatcgtatatggtacagatatgaagtttggttagttagatttctaataaatctgtaccatatgagcaaaaattatcatatatggtacagatatgaagtttgtctagttagatttagaataaacaaagagctatgcttagaaaaaaatcttaccattgagaagatgtaagaaatctaataggcatagctcttttgagtatttacaataacaaattaaattgctaagaagtacttaataacagttgttattgaaatattagaatttttaattttgtaatattgtccgttcaggttgaaaatagtatctcccaatcctatgcttgcagaatgattgtcagataatcctaaagttattttaaaacctccagataacattggattgtccattttttcaacatccagcatagacatgtaggaaagaatagcagaaattctattttggtcacttgtttcataaggtacatcattaatgtagtaacttatttttgaaacgcctcctgaaatataagcatcaaataagttgtttttcttgtagccctcagttggtggcagtgggcacttattggcaactgttggtgtagttactgatttatttactgttaccttgcactttaatacatatttcttgccattttgtttaacagtggcttttacaactgttgaacctactttctttgcagaaacaattccttttttggaaacctttacaattttagaattattagacttccaagatattttcgcatttttactaagctttttaatcttaagtgttttctttgaacctgtttctaatgaaatcttagttgaagataactttggagtctgttgtttagcagaaacactagtgctattaaacaaacaaaaactgcttagcatcatcatagtaacaaaaataaacataaatctttttttcatatcatttacctccttaaataaccgacctacttttggtaaatcaattataatatatttgattaaaaaatgaaagcatgttaagataaaaacatggaatatattgttgcgtaagtggaacatatacagagggaacgttaacaaagattgaagtgttcatatcttgaaataatgaaaaggaacactatcagtacggaaaaggaggaaacactatgaaaataactaaaacaaaactattgagaacactttttgttattgcattaattatgtatggaattacatttaacgaagaagtaaatgcgagaacaatcacagaagatgaaacaaatcagatatgtacggaaataacacgaaagatagaaaataaaagtaaatcagttatagagaacgactttagtaatataaagaagataaccacatattatagcgaggaggtgggtattaattcggaagaactgaaaaatatagcagttgggaaaccgtttatgatttattctttatcagattcaaaacaaagtgaattatactattatcctgctataaacaataaagaaaacaaagttgttgctatgatagaggtttataagagtgaaaataaatggacttacagtataggaacggaatatgttgagtatttaaatgaaattaattattcagagaatcaagacagatacattttttatagtagtgaaggcaaaatatacgctgatgatggaagtgattttgtaaataaatatgagattataagcgaagaagctgaagaattcaaaaaattagaattgtcgaaaaaagtaaagatgatttctgacagaatagataatcctgaatatgaaattaaaactcagtctcagttttacgatgcttataaactaagaatgggatatacacctacaatgacaggaacaacatgtcagctttacaatccggttggacagggaaactatggattatgttgggcagcttgtgtagcaacaattgctaattatagaaatggaactaatctaacagcgatgaatgttgctgatgcagcaaacattggttacaatgatggaggttcacttaccgatgttacaaatagcttgcatagatatgggttaacggattatagagaaaatattagaacattgacttgggatgaaatatatgattgcataatgaataaaagtaagccattctatatgtcatgttattacgatttttcacaatcaggacatgcagtgctttgcttaggatgtaaagaaatttcaagtaataaatatattgttatatggaatcctggactaaaaagcggagcaggtggttcgacaattttaaaatattacaaaaatgcaactactttttcatatggaaatgaaacatatgtatggtattatagcgcatctatttgtaattaagtaaatccgtgcaacgtataatatattcttgttaaaatataactggtcaacaattgatgataataaagaaatcattttatgttgaccagttttttgataaaaatataaatgttttagaaaatttttaacatacgacacagacatagcatagtaaagaaaagagaaatttttaatgcaaaagaagtaaaaaataagactggcaatacagttgtaacagtaaggggacgaatggaaatttatgtggcgaaatcttctaaaaagggctataatgtcatatatctatgttattagggagtgtgaaattttataatgaagaacttaattattacaggaagaaacttaataaaatcatacgatggaatacataatatacttagtgatgttaacattgaaatagaagcaggttctaagaatttaattataggagagagtggttgtggaaagaccactctcttatctatattagagggaatcgagcagcctgacagcggagtgttaatccttaaggattgtgatatgtatggaatgaagttacaacaatgattaaaagaatggatacagtattcgaaatcaaaaacaaaaaaacttaaaaggacagactattatgcttaaaattacaacaaaaattatggaaagacaaaaggtgtaaaatatcattttggcatttattattttaacattttctattatttcatttatatctatgggtatatcacaacagatgtacggtcaaaaacttcaattggcactaaaagaatatggtggattttcgcaggcactcattcaaataaaagatagtgaatataataaattaaaaaagaataatttgaaactgggaagcttctactgtgagaatgtttttttatttgaaaacaaaaaatatacagtaggttatgtggataatgactttgaaaagatggcgaacataaatgttcatttaatagagaatgcaaggattggttcactttttgcaagaataagtgttgtgtcagttcttgtaatgagctgcatattggtaagtggatttattccgattaatgaggcaaaggaaactgaaagctttatgcctattccgtcagttgatgttatacagttaactgatagggagcagaaagactttatgaaaaaatacaacgtgaaaaaagatgatgttgtggtatttaatggtagcggaattgatttgtcttcaatattaaatgaccaagttacgctaggaaaagttacaataaatcaaaagaaatattcatttaataagcagtctatacatataagtaaaatagtaaatcaagggtataataattctaatatatcaggtgaaggtttaataactatagttgtaccaaaaagtaatactagtattaaaagtattattagtgggtatgatgacatttttatagaagcaaaaaataacattgatatttttaatcttaaggatagcagggtaagtgaagctttgaagaaacttgacagggaagtgttaataatattgtataatttaattattgttattataatttctataatcagtcgtttggttatagttcgtagccttaacaaaatgaaggttagagactggttgagaggaaatgtgtagtaagtaaaaggaggcagattatgaatggaagtcacattgccattccaaccattcttaaggtaggaaaaggcactttaaaagatataggaacttacattaaggacagcagaattgaaaatgctgtagtttattttggaaatggtctggttgatatgtttggagatactgttcttcaatcatttcagaaggaaaatattaatgttttggaatataaggaactggattctattaaaatagaagatataatagatttggctttttcaattgacagcaaggcacagattattgtgggaattggtggtggaaaggttattgatgctgcaaaatatgcagcttatttaagaaaattacctttcattagtgtgcctacatctgcatccagtgacggcttttccagtgccagtgcgtcattacttgttaatggaagaagaacttctgtgccggcaaaacttgcatatggaattattgcagacactgatgttataaaaagtgctccggaaaagtttttgtattcaggtattggtgatttggtatcaaaaattacagcactttacgattgggtatttgaggacgaacacggatatgcggtgttaaacgattttgccatgatgattgcaaaaaaagcagtaaatagttttgtgagaactccttttgagagtataaaagatgacctgttcttaagagaacttcttgattctcttgcaatgagtggaattgccaatgaaatagcaggaaacagttctcctgcaagtggaagcgaacatcttatttctcatgctttggataaaacattggagcatccgcaacttcatggaattcaggttggaattgcaacttatataatgagcaaggttcaggaccacagatatattcgtgtaaataggatttttgaagatacaggtttctgggattatgtaagcacccttggactgaaacgtgaggattatgcaagggcaattgatattgcaccgtcaataaaaccacacagacatacttatctccatgagaaaaaatatagggagctggcaaaaaaagttctctatgaagatgaagttttaaagaaagtgtttggctgaatataagctattgtggtataatactttagttcaaatgatttatttttggaggataatatgaaagtattaatgtttaacggaagccctaaagctaagggctgtacatatacagcattggaagagatggctaaagtcttaaatgaagaaggcattgaaacagagattatgcacgtaggagcacacccacagggaagttgtatgggctgtggcggttgctcaaaaacaggtgaatgtgcgtatggtggagaagtagttgaagcagcaaagaagcttaaagaagctgacggagtcgtttttggaagccctgttcattatgcatcaattagtggaaatatgatgggatttcttcacagattatcatggagtgcaggaaaagatttaaaatataaaccggcagctatggttgtaagtgcaagaagagcaggaacaacaagtgctcttgatgaaattgcaaagatacctgagtttttccatatgccattaattaacggaaattattggccaatggttcacggaagcacacctgatgatgtaagaaaagatgaagaaggtcttcagatagtaagaaatattggacgaaatatggcttggattttgaagtgtattcaggttggaaaagaaaatggaattgaacatccacagccggaagatccagttaagactaatttcatccgttaataaaactgttacaaaatatttatctgatttataagaaagaatggtagagtactgactaagggtaagtgctaacttaaaaacggatagcgaaaggagatcttatggaagaccagactattattgacaatgaagcagagaacaaggatttacataatgcttcagaagagaaagcagaaaacaaagatttacgcaatgcttcagacaagaaagaaaagaagaaagaaaaagagaaagttgatcccaagaaggaatttttcagttgggtaagaatttttgttgtagccattgctttggcattgtgcattaataattttcttataattaatgccaacgtaccatcaggctcaatggagaatacaattatgacaggttcaagaatgattggacttagaacagcttattggttcaaggaaccacagagaggtgaaatcataattttcaaatatcctgatgatgaatcagaaaacttcgtaaagagagtaatcggtttgccgggagaaaaggtaacaattaaagattcaaagatttatattaatgactcaaaagagccattaaaagaaacatacttaaaagaggattggtactgggaaaatggttcagaggaatccggtggagagcttgtatatcaagtgccagaagacagttatttcgtcttaggtgacaacagaaacaattctaaggattcaagactttggacaacaacaaactatgtaagcaagtcaaagataattgcaaaggcagagtttgtatattggccatggaaagtcaagggaatgctggaaacagccaagtatgattagagtggattgattaatttagaatgaaattagaataagaaagattgaaattataaagaagatgaaaggtatatcgctgaaaggtggtaagccttttggttttgggggagtatacgaaaaaaattcgctttatgcaatacttttgggagcggcaggaccggtctttcggctgcgattacgtgtcgtagagcgaaaacgttatgtcacacgtaatttattcaaattttcatatattttcgtttctaattacgtgtcgtggaacgaaaacgctacaccacaagtaatttattcaaattttcgtatattttcgcttccaattacgtgttgtggaacgaaaacgctacaccacacgtaatttattcaaattttcgtatattttcgtttccaattacgtgtcgtggaacgaaaacgctacaccacaagtaatttattcaaattttcatatattttcgtttctaattacgtgtcagagaataaaaatgttatatcacacgtaagcttgcctagtcgcaggcaattacggaatatagaaccgaaaatgttgtgacatccgtaatgggtatcgtaaactggcctatactgaacccccagggcgtatacaccgccctggatgactttgtaccgaaaatgagaagagaaatcttcaaaaaaatcagcttacttaaaaggcatttctcacacaaaaatatgacaaatcaaataacttgtaagatattttgtacaccatatttttccaacctataattttcctataaaaaatgtaaaaaatatataataaaaatatttcaaattgtgttattttgtaatgaaaatgttataataatatgataaatgaaaaaaggacgagcaacataagagaatgaaaaagaaaattatagtggcatcagtgtttacagtagccttaattggcggaattataggaattaaatctgtttcaggaggacatcacacaagcggagcggagacgaagattgtacagaaaacaacaattcaggaaacaactacagcagtgcaacatgagacaaaggcacctgtagaaactaagaaaaaggttgatttgatttttcctgaaaagtataagaatgtaagtgcaataaagattgaaaagaagaaagtcaagtctgaagatgattcagatgagatggttgaaatatacgagaaggacgatgaaaagtctaaagttgtaggaatcggtgtagatggcagttatgttaagattcttaaaaaaggaaaaaaattttaccagattaaatctgacaagattacaggatatgttaagaaagaaaatgtagtaacaggcaagaaggctaaggaagttttaattgaagccaaggacgttattgtaaaggttaaagcgaagaaaacagaacttagaagcgaagataataagaaatcaaaagttttgtctaatctacaggagaaggcagaatatccaataacagatataagaaaggacaagaagtggattaaagtagagagaacatccacaatgtcaggatgggttaagactaaagatgttactgtaaagattcacaaggaatatttgtataccccggaagaatatgatgatatgcttgagcaggaatgggcagctaatgccattacatatactttggaagaaacttctcttccaaaagaaggcgaagcagcagagtttttgaaatatgcaacacaattccttgggaacagatatgtttggggtggaacaagtcttacaagcggagcagactgttcaggttttacaatgtctttgtttaaaaaatttggatatagtttaagcagaacggcagcagagcaggcttacaatggcaaagcagtaaaaagcaacaagcttaaaccgggagatttagtattttatcataccgacagaaaaaacaagaatagaataagtcatgttgctatttatattggcgacgggaagattcttcattctgcaaacaagactcagggtgtaataatttcaagacttggcaatccttgtgccgcaagacgaattttaagtggaaagtcagtaaaaaaagacaaggataaagataaagataaagagaaaacagcagttgtatcaacaaagaaagatattaaacgattaaatcaggaaacaacaactgaagaagaaagttcaactgttgaaatagaaacaacgacacaagttcctaatactacagaagtggaaacaactacaaaggtagaggaaactgaaagttgtacagataaataataaacataaaaaagagttgtactaaaaaatgtatagtaagtgagaatgggctactatctttgtaaaataaaatttgcaaagatagtggcccatttaatgttttgtggaatagtataaaagttgaattttatagattatcataataaataatttctgatgtggtaataaagttaagtttcttataaagattatatgccggaacgttttcttttgtaacgtgaagtataatattttggcatatattttttatatcatataaagaatattgtaaaagaagtttgctgtaaccattgccacgaaaagcttcattaatttcaacattatgaatgcatccacaggtttcaaaaatgcttacgaaacaggaaccaatgttgttattatctttaaaaatctcaaatataatttcatcttcattttctgttttcttaaaatcaattgaacagtcaaaggatgaaggcttttcgacaatgttgtctgtgttaataaccattgaacattcagtggtacttggataataaccattggttctaagaaaatttggagctgtcttattatcttttgcaacaggaatggaaatatagaaatcttccatttcataagaaagcttcttcataagataattgccaatgttattattgcgatattcgggcaatacaaagccacaaatttctgcagttgattcatctataagatagatggaaataaaacctacaattgttttatctttttttgcaataatgacttttgaataatcatcttctaaagtattattatcttttatattttcattcggttcattatcaatagttgtttcacaatcctcgttatcaataaaaaatgtattcttaacattatcaaatttattacatatattagcaatattagacagatcttcataaagtttatcatttatttcagatataaattcaaacgtaagattatctaaatctatttcagagctattttttgcattagaattacaattattattagaatcacaattattattagaatcacaatctgttttaaaattatagttcatattattagtctccactttcaataaaaattacttaattagagtatcataaagataaaaataatccaacaaaaatagtaaaaccttatggaatgtggtatattgttttaggtaaaatcaatataaaacagataatattaaaatcaagaatagaaagttaaaaatggtatagcatatgaaattaaaaataggttctcatgttggaatgagtggaaaggatatgcttttaggttcagctaaggaagcttattcatatggagcaaatgtgtttatggcgtatacaggtgctccacaaaatacgcgcagaaaagaaataagtgaattaaaaataaaagaagcatgggagtatatggcacatcataatatagatgaaatagtgattcacgcaccatatattattaatcttgccaatacaataaaaccggaaacttacgaaatagcagaaaagtttttggcaacagaattggaaagaacagaggcaatgggaagcagaattatggttcttcatccgggttcacatgttggagcaggagttgatgcaggaattaatcagatagtgaaaggcattaacaatgtgctaactaaggatagtaaggtatgtattgcccttgaaacaatggcaggaaagggcagcgaaataggaagaaattttgaagaacttgcaagaatatatgatggagtagtttacaatgacaagcttagagtttgttttgatacatgtcatgttaatgatgccgggtatgaccttgttaacgatttaagcggagtttttgaaaagtttgacaaggttatcggaacagaccagattggtgtttttcatattaatgatagcaagaacgtgcttggtgcaggaaaagaccgacacgaaaatataggttttggaaacattggatatgacactttaagacaaataatttacatggaacagtttgaaaatattccaaagattcttgaaacaccttatgttaaagatccggaaaacagcaaaaaatcttatgcaccatataagtttgaaatagaaatgattaagaaaggagagtttaatactaacttgcagaatgaaatcctgcaaaatggcagatagtattatggacagtttaatttatagcttaaatgctacagtacccgtttttgtggttattgtagttggatatttacttaaaagaataggatggataaatcagggatttattgaggcatccaataaaataaattttaaagttactttgccggcacttttaatacaggacatagtaaacaataactttatggaaaaatttgaattaggttatgttattttttgtgccgttgcaacaacaataagcatacttacaatgtggtttcttgcaagaatttttatgaaagataaatcaattataggagagtttgtacaggcttcctacagaagcagcgctgcagtacttggagcggcatttatcttaaatatttattcagatacgggaatggttccattgatgataattggtgcagttccactttacaacatatttgctgtaataattcttacagtggaatgtcccgaaaaaggtgcaggtcagtcaaaaactttgtcatcaacgttaaagggaatagctacaaaccctattattttaagtattgttgcaggggttattttgtcagtgcttaatgtacatttccctaaagtgcttgataacaccatttctaatttttcaaagatggcaacaccacttgcacttattgcaataggtggaagttttgagtttggcaaggcatttcaaaagattaaaccggcagttatagcaactgcaatgaagcttgttggctgggctttagtattccttccaattgcaatatggcttggatatagggacgcaaaattaatggcaatagtaattatgcttgcctcaccagcaacaccaagttgttacataatgtcaagaagcatgcacagcgaaggaactctaacaagcagtgttattgttttgacaacaatgtgttcagcattcacaattacggcaattatctatattttaagagcaatgggacttgtttaaaagaaaaagaaaggcaattcatttaggaattatgtggtattgaaatgaaaagagaagaacaaaaaatagaaaatacatggaaaatggaagatatgtattcttctgatcaggctatggaaaatgatttagacaaagccttaaaaatgatatcagaatataacaaatataaagataatgtttcgaagaataaggagacattattagaatatttgaaatttaatgatgaaataaaccttatggcagaaaaagtttatgtatattccaatcagaaatatcatgaagatatgacaaattctaagtatcagacatattccggtaaagctcaaaaattagttgtagagcttggtagtgcaacagcattttttgaaccggaaattcttgaaatggatgagaatgttttaaaggaatggttggaaaataaggaatttgccgattatagaagatatattagtgaaatactaagagcaaaggctcatacattagataagaagacggaagaaattcttgcaaaaagtaaacgtatggcaagtgctgctgacaatatttatgctatgtataatggagcagacattgatttcccaacagttaaggataaggatggcaatgaaataaagataacacatggcaattttgtgccgattttaagtggctctgacagacagcttagaaaagatgcgtttaaggctttatatggcacatatggaaaaatgaaaaatactattgcggcaacatataatgccaatgtggaacaggcttgtttttatgctgatgtaagaaattatccttcaactagagcaatgtatttggatgaaagcaatattccggaggaagtctatgacaacttaattgaagttgttcatgaacatatggacttaatgcacagatatgtgtcgcttagaaagaaagctttaggtgttgatcaacttcatatgtatgatgtttatgcacctatagttgaaactcctgataaaaaaattccttttgaaaaggctaaagaaatggttaaggcaggtcttgcaccaatgggtgatgattatattagcaagcttcaggaaggttttgataaccgttggatcgatgtgtatgaaaatgaaggaaaaagaagtggagcttactcatggggagcttatggtgtacatccatatgtgcttttaaattatcagggaacattggatcatgtatttactttggcacatgaaatgggtcatgcgttacattcatattattcagattcaaaccagagctatatcaatgccggatataagatatttgtggcagaagtggcatcaacatgcaatgagtcattattaatacactatttgctaaaaaatactgatgataaggctgaaaaagcttacttaataaatcattttcttgaacagtttaaggggacattatatcgccagactatgtttgcagaatttgaaaaaataactcataagatggttgaagaaggtgaaactcttacaagcgacattctttgcaaagtatattatgatttaaataagcaatattttggcgaagatatggtattagacgaagaaattgctttggaatgggcaagaattccacatttctacaatccattttatgtataccagtatgcaacaggaatttctgctgcaatagcattatctaagaaaataatggaacagggcgaagcaggagttaaggactacatgaaattcttaacaggcggcggctcaaaggatccaatcgatttgcttaaattagcaggagtggatatgacaacaaaagaaccaatagaaaaagcactggaattatttaaagaattattagaccaaatggaacaatcctttttatccatagatactaatgcataataacaatcctaaaggaatagtaattaatgaaaaaagggttgaaattatataatcctttctttggcacaaatgtttggaaagacaacatatgtttagtttgatgaatttgtacttgttaaaaaaacaagactgtattattctaattttatacgaaaatatagtcaataaaaataaatgattattgaaaaaagaaaagaaaacgaaaaaataaataaaaagtaagtttttataagaatgggagtgttaatgaacagagaaaactggctaaaaaatattgaaggtgctgtttttgatttagatggtacccttctcgatagctcatgggtatgggaaaaggtagatgaaaaatttttaggtgacagaggctttcaggttccggatgattatgtagatgagatttctcctcttggcgctgagagagcagcagtttatacaatagaacgatttggcttaaacgaagacaaagatgatattgtaagggaatggattaaaatggcaaaaaaggaatatgcaacagaggttgtatgcaagccttatgcaaaagaatttcttgaagaactacataaacttaatataaagatggcagtggcaacatcctcagacagagaactttttatgaaaacattggagcgtgaaggaatattaaaatattttcagaaaatagtgacagtggatgaagttgaacgtggaaaaggttatcctgacatatatgaggaagctgcaagacgaataaaagttaatccacataaatgccttgtgtttgaggatattctagcgggtgtaacaggagcatcacttggagagtttaatgttgtggcagtcttcgatgaaaagtcgaaacataactgggaaaaaatcaagagtatatcaaagtatagcattaatgattataaagaattattgtagaagtagtgataaaaaattataatataatattaaaaaatatattgacagatgtgtaaagctatgatattatttttcttgcgtgtgacgcacacgtataatgcgcgagtggctcagtggtggagcacctccttgccaaggagggggccgcgggttcgatccccgtctcgcgcttttttttacattttcaggagttttttgtgtttgtacatatatatggaaaatcttaaaattaaaacactttcctaaaaaattaatcccatatataaaaataagatactaacaaataactctttaaaagtgtataattgcaatgaatgtttaatcaaatgaaagagaggtttatgaaatgaaaagattaaagaaatttggtgcgattatttgtgccattgcaatgatagtatcttcgattacatactatccaacaagcaatgtaagtgcagcaaaaacagcaacatcattacctaagaaagtaataggacttgttgctaatagcaaaagtggttcggatacaattgaaaatgcaattatgtttgcatgggcaggagccgatgacccagcaaatgaagctggatatgatccaacagttacagcaacagtcatttatatttacaaggatggaaagcaagttacaaagattggcaacgctacaaaaggcggtgtagtaggtggactttcagcaggttcatatacagcacaggctgcaaatgtaaacagcatgggtgagggaccattatcagaaacagttagctttacagtaacaggagcaactcttaattacacatatcctgttaattgcataggtccaaaaacaccggcgggattaagttatattacaggaaatccggaagttcctgctgacaatccggcgcagaaagacaataaattaggtgttgcatgggcaccatcatcagaagcaagtattccatcagcagattcatcagttgtaggatacaatttatatttatttgatgcaaagacaggtacaccttacagacgtgtatatgtagacggaattaccaagtcaaatgttatattggaaagtgtatcggcaggtgaatatctggcatatttatcagcagtggatgcagaaggcagagagtcagctttggcggcaacatcatttggtcagtcatcaaaggttactgttaaaggtcaggttatagataatgcacagtcatttgacaaaccaaatcagccaacattaccagatggaatttcaattttaacagaaggtataaaatatggatttactattgcatggtctggtgaggcagatttaacaggtcagagattgaatctttttgtagatggtgtttgtatcaaggtaggaatcaatggaaatgtggcaagttactatgaaaacagacttgcggcaggtacatatgaagtagaagtaagatcacagtatacaagtaacaatgtagaatcatttggattaaagaaaactgtgtcaattgaggcagaccctggactcacaggaaaaacacctgcagaacttgcagatcctgcatattcagaatacaaggaaccaactacaactacaacagcagcggcagaaacaactacaacagcagcggcagaaacaactacaactgcagcggcagaaacaactacagttgcaacagcagagacaaccacaccagtggcagtagcaccaacattaaaaccaacagagaaacctacaacagtagcacctacaacaaatacaaatgcacaaacaacaactaaaaaacaaccaagtcagactacaataaaatcatctgtaaatgttggaaaggcagttgttaaaaaagcaattaaaaagaaaagtgctaagaaaataagtcttacattgaagagagttaaaggcgcaaccaagtacaaagtacagattgcaaaagataagagatttaaaaagacaatagtgacaaaaacaactaagaaattgacatatagtgtatcaaatagcaagtttaaaaaggctaaaaaattgtatgcaagagcaaaagccattgttgtcaaaggaggggaaacttatcagggcaaatggtcaaagccaaagcaggttaagataaaaaaataaaattataaacagttaaatagaagggaaagccaaaatccggttttctcttcttttttaatgcttggaaatagacaaacagccataagacaaaacgttacctcaaggattgggcttattcaaaaattatagactatcaattaaactctaaagcctttggcagtatggcattaagcgagcgtaggtcttgtgctcgaaggttggaagtctcgcctgtcggctcggtggttactttatgtattttaaatttatgcgaaaaaattgcaaaaaaatgttgacagagttgtctgattatgttaatatctttcttgcgtgtgacgcacacgtacaatgcgcgagtggctcagtggtggagcacctccttgccaaggagggggccgcgggttcgatccccgtctcgcgcttttttaatgcaaaaaaacagcatcctaaaagggtgctgttttttgcattaaacgagcccaatcctgggctcgaaggttcgaagtctcgcctgccggctcggtcgttgctcctgcaaagcagggtcatccacaggatgaccgcaacccgtctcgcgctttttataaaaaagaatctaaaagggtgctgttttttgcattaaacgagcgtaggtcctgggatcgaaggttcgaagtctcgcctgccggctcggtcgttgctcctgcgttaaatggtatttttagttttttcaagtaaatacaattgagagatattaatgtttttatgcagttttacataaaataaactatataacaaaaagtataatacttatgccacaataagtaacttttaaagataaaacagttcttattcaatatttctataaaaaacgattcatttttctttaattttatacaaactgcacttgaaaaagtatgataaaaatgatattttatagttaagtaacaaaaatatataaaggagaatgaaaaaatgagaaaattattcaagaacttaacagcaatcggtttatcagtaactatggttgttggtacagcatcaatggcatctgcagcagtagctaagggaacagatgtatctaacggaaaggcatggacatcatattctatccatacacgtgaagataacggcgtttgggaagataagcttattggagcaggacagaaatatcagaataaagagaatacatacaagagttatggtgaagatgcaaagattacaacacagacatcaagcagttttacaatgaatgttgtaagtacaggatggagtgctaaatggacaccaaagggagatgtaggacagtctaacccatggggcgtaacagcagataaggttgttaatgtagaaagaggacgttattacacaatttcatttaagattaagagtacattaaagaatgaaattatgaagagtcaggacaagaaagatgctaaaggcaacgtaattaaggatagcgaaggaaaagctatgggtgaaaatgttggtacaggtaagtacaactacgtaaaacacattcactttaaagcatttgataatacagataaagatggtgcagctcttaatctttcaaatgttaaggctacaatcggtggtaagagcgttctttcaagcacaaaggatttcagcccatttgttgcacttgacagccagaacacagcagatgacggatatgtaacagtgtcagcagatgttaagattccatcacttagatcagaatatcagaagaaaaaggctcagcctacattaggtattaagtttgcatttggtgcattcttaaaagaatacatcgatgaaagcgatatgagtggaacaatcgacgttaaggacttcaagattacggcaggtatccagtcaccttcacaggttaaggtttctaaagtaacagctaagaagaaagctatggttgttaaatataagaaagcaagcaaggctaagaaatatgaagttcagtattcattaaagaagaactttaagaaatcaaaggttaaaacaacaaaaaaagctaagatcacaattaagaaattaaaatcaggtaagaagtattatgtaagagttagaggattctttatgaacggaaagactaaggtttatggaccatactcagctaagaaggtagtaaagattaaataatattctttcataaattatttacatattaataaaagggacaatcggccgtaatggtcggttgtcttttttctcttaaaatgatagagtataaaacataactaaaaaggaaaggatgttaactcaatggcaattgattggttaattttagaaaaaatacaacaaatattcggtagtggattttgtgactggtttatgcctagaattacagttttgggaaatgcagggattatttggattatcataggcgttgcaatgcttatatcaaaaaaataccgtaaatatggagttttggttcttgcggggttattaataggactgattattggaaacggaatagtgaaaaacgttgttcaaagagcgagaccatgttggatagatactaattttaagatgcttatagcaattccaaaagattattcatttccttcaggtcacacacaggcatcatgtatagctacaacaattataacgttaaccaataagaaattcggttgggtggttattccgcttactatattaatagctttttcaagaatgtatttatatgtgcatttcccaacagatatattgggaggagcagttcttggaataacaataggtgcgttaacatatgtatatggaacaaagattttaaaaataaaaaaagaataatccacaaaattaagattttagtgatttgaaactataatcatataaagttattctaaaaaatttttaaagaaacataacaatatttatacgataattcctataaaaataatcggaattaagttgattttattgtggcgttaatgtatactagtaggagagtatttacgacagagaggtatttagagatgatgatttctacaaaaggcagatacgctttaagagttatgatagatttggctcagaatgatggcgagtcttttgtatcactgaaagatgtggcagaaagacagggaatttccatgaaatatttggaaatgattgtatcgttattacataaaggacatatggtaaagagtcagcgaggcaaagcaggcggatacaagctggtgaagaaaccggcagaatatacaataggctcaattctcaaacttactgaaggaacattggcaccggttggctgcctggaagaaggggctgagaagtgcgatagagctacagaatgtattacattaccattgtggaagaaattagacgaccagatagatgaatacttggaaagcgtaacactggaagacttagttgaaggcagagtataaaaataaattaaagtttgttaagactccgaaacagatgtgtattatcatatttgtttcggatttttatttgagaaattaccctacaatttctactaaaaaattgaaggtcagtttctgaacaaaaaaagaatcttcagaaaaactgaagattctttttttatctacttatttaaactggtgtccaccaattgttaatcttgcaccttttacatatccactaaagaataagtatgagttcatatttattgttccataagaaagttttactttcttatctccattaagaacagccttagcagctttaattgaacccttgtcaagtcgaccactgtcatataatgctaatgatctgtttaaagaaccgtttcttgccggtgtaaactgtcccggctgataaataacaccacttaaagtgttaggataacttctagaacttactctgttggtaattacaataccaactgccttcttacctgcataactctgatcaccggcttcactataaataatagaagacataagtcttaactggtctttagtgtatctgttctttacctttacattaattgttgcatataaagcactgttattcttagaccttacagtaatgacagcttttccggcttttttcgctttaatctttcctgaagaagaaattgttgcaacttttgttttattagatactaatgtgaaattttttaattttgttttatttaattttatgtcttttttaatactagcttttttgtttacctttatagtcttgttaactgtaattgatttaacatatgccggagtagttgttttggctaccggagtagttgtttctacggcaatcactgttgtagggttctcaacagtggtagtttcgttttcggcatgaactgcaattgtagtagatgcacacatcaaaaatgctactgaaagtaaacctataaatttatgtttcaaaataacctccatctgttacaaaaatgttacatagatattacggttattaataatgccaaaaaaaatgtaatttgtcaaggggggctttgtaacaatttgcaaatattaagttattacattataataaagcaggaaaaaacgggaaaaaataataaaaaaagaaaaaaagttatttacaaattaaaaattaggttatataattcctagtgcagagataggaaaaagagatttaaatatagaatggaggttactcaaatgtatatatatgcagataatgcggctactactaaaactagtcaggctgcaattaaagcgatgaatgagtgcatggaagatttttatggaaatccatcaagtcttcatagtgttggacagagagcagcagaaaagctacttcaggcgagaatggacgtggcagaatgcttaggcgcagactttaaagaaatttattttacatcaggtggaagcgaagctgacaatcaggcaatcgtttcagcagctgcatttggtgcaaaaaaaggaaagaaacatattatttctactaaaatagagcatcacgcagttctccatacattagctaagttagaaaaacagggatttgacgttacattattagatgtaaacgaaaagggcgaagttgatcctaaggcagttgaagatgcaattagagaagatacagctcttgtatcaataatgtatgcaaataatgaaataggaacaattgaaccaattacagagattggtgagatttgtgaaaggaaaggagttatcttccatacagatgcagttcaggcagttggacatgttgatattgatgttaaaaaacaaaaaattgatatgttatcattatcagctcataaattccacggaccaaagggcgtaggtgttctttatgctaataagaaggttccacttactaatattatagaaggtggtgcacaggaaagaggtaagagagcgggtacagagaaccttcccggaatagttggtatggctgtagctttaaaggatgctgtatctaatatagaaaaatcaagtgcaaaagttacaactttaagaaacagacttattgaaggactttcaaagattgaacactcagttttaaacggagcaagcgaaaacagattaccgggtaatgtaaacttctgttttgaaggaatcgaaggagaatcattacttttattattagatgctaaaggtattgcagcatcttcaggttcggcatgtacatcaggatcacttgatccaagtcatgttttacttgcaattggcagacctcatgaagtagctcatggatcattaagacttacaatagcagaagacattacagaagaacagattgactatatggttaaggaaattaaaaatgtagttgattatcttagaagcatttcaccggtttgggatgaattacagagaggagagcaaaagcatgttatatagtgaaaaagtaatggatcattttatgaatcctagaaacgtaggaaagattgatgacgcagacggagtaggcgaagttggtaacgctaagtgtggcgacattatgaaaatatatataaaggttgacaataacatcataactgacgtaaaatttaatacattcggatgtggttctgctatagcaagtagttcaatggcaacagaaatgattaaaggaaagtcattagatgatgcattggaacttacaaacaaggcagtagctgaagctttagacggacttcctgcacataagatgcattgttcagtacttgcagaggaagctattaaggctgctatagacgattataaagaaaaacataaagataattaattactgaaatatattttctttataaagaggaatcacctgaaattataaaagcgtaagcgagattaaaaggtgagaaatgattagagatattcaggaagagattcttaaattaaagaaagaaaaggatatctgtattttggcacattgctaccagaatccggaaattcttgaagtagctgactttacaggtgacagttttgcattgtctgttaaagcagcagaaacaaaaaacaagactgttattatgtgtggtgtaaaatttatggctgaaacagttaagattttatcccctgataagacagttttacttgcgaatggtgacgcaggctgtccaatggcagaaatgatggacaaggatttaattgaacaggttaagaagtcttacagtgattatacagttgttgcttacattaatacaacaagtgaattaaagactatttgtgatatttgtgttacttcatcatcagcagttactatttgtaacaaaattgaaaatgacaagattttatttattcctgactgtaacttaggtgattgggtttctaaacagattcctgacaagacatttaagttgttatcaggcggatgtccaactcatgcaagaatgagtgcagaggatgttaagaaggctaaggctgcacaccctaatgcattgttccttgtacatcctgaatgtaagcctgaagttgtggaattagcagattatgttggttcaacaacaggaattatgaactatgccaaggaaagcgatgctaaagagtttattattggaacagagaatagtattgtaactcatcttcagatggaatgtccggataagatgttttatccattatcaaaggactgcgtttgccacaatatgaaagcaacaactttaactgatgtattaaattgttgtaagggtattggcggcttagaaattaatcttgacgaagatacaagaactaaggcaaaacactgtattgatgaaatgattaggttaggataaatgaaaaaggcattaatagcaatgagcggtggcgtagacagtagtgtggctgccgtatttatgaaagaaaaaggatacgaccctattggggtaacaatgaagttatatgacaatgaggatattaacatgtcaaaggagaagacatgttgttctctaagtgatgtggaagatgccagaagtgtagcttacaaagttggttttccttattatgtttttaattttaaggcagaatttaaggagaaggttatagacaagtttgtaggctgttatatgtgtggaatgactccaaatccatgtattgactgtaacagatatttaaagttcgaagagctatatagaagagcaaaaacattaggctgtgatgttattgtaacaggccattatgcaagaatcagatatgacgaagctacaggcaagtatcagctaatgaaaggaattgatgattcaaaggatcaaagctatgttctttatcatatgactcaggatcagcttgctcatacaatgtttcctttaggagaatatactaaagatgaaataagaaagaaagcagctgaaacaggacttattaatgctaacaagcatgatagtcaggatatttgttttatccctgatggaaatcatatgaagttcattgaggagtatactcacaagaaagttggaaaaggcaatttccttgacattaacggaaaggttataggccagcataacgggtattacagatatacagtaggtcagcgaaaagggattaatgttaaccgtgatggcaagcattatgttcttgaaatcagaccggaaacaaatgaagttgtagttggacgaaacaaagatcttttcacagaagaacttgttgcaacagactttaactggatatcaggtgaagccccaacaggagaaataaaggtaagtggaagaacaagatatcaccagccgttaacagaaggtgtggcaaaagtacttgaaaacggtgatgttaaggtatcttttgatgaaccaataagagccattacaaaaggacagtcagttgtattatatgatggagacgttgttcttggtggtggaacaataaaagaatgttagaaagcctgtggaacaggtggagaataaagagctagaataccataaggattgataggctggcattgaaaagagttagaatgcagaaatgtgttctgactcttttttattccatggaattatttctagaccggctactttatttgtagtatattagactaaaacatactaaacatatatgttttagataaaaatattaaaaatttcaattttcctattgacattgtaggaaaaagatagtaatatgccactataaacaaaacctacttaacttataggaattgaatgaataggaaaggaagcggtgttatgagcagaacaaagacagcttataattacaaaatgagaaagacttactgttgcaacataagtgtaggagagacggagcgaatgtgtagcagatagttttttacaaatgattataaactacagattcaagattaaaatgatgataagagagttccaatgaactctagaacgataaaaagtgaaaaacaactaatcagtagggaaaaatattaaaagtgaaaaacaactaattagtagggacaataaaaaattagaaaatcagttaaatttggaggatataaaaatggcaaatattaaaacaagcgcagcagaacttattggaaagacacctttattagaggttaagaaatttgaagcaaaagaaaacattacagatgctaagattttagctaaattagaatattttaatccggcaggaagcgttaaagacagagtcgcattaaagatgattgaagatgcagaagaaagtggaaagcttaaaccgggagcaacaattattgaaccaacatcaggtaacacaggtatcggtattgcagcagttgcagcagcaaagggatacaaagtaattattacaattcctgaaacaatgagtgttgaaagaagaaacattatgaaagcatatggtgctgaattagttcttacagaaggagctaaaggtatgaagggtgctattgctaaggctgatgaaattaaggaagcaacacctggttcaattatattaggacagtttgttaatgaagctaatcctaaggcacacagagaaacaacaggaccggaaatttgggaagatacagatggacaggttgatatttttgtagcaggtgttggtacaggtggaacagttacaggcgtaggcgaatatttgaaatcaaagaaccctgatgtaaaggttgtagccgtagaaccaaaaacaagccctgttctttcagaaggaaaagccggagcacataagattcagggtatcggtgcaggatttgtacctgacattcttaacacaaagatttatgatgaagttattgcagtagaaaacgaagacgcttttgcaacagctaaggaacttgcaaagacagaaggtgttcttacaggtatttcatcaggtgcagcattatacgcagcagttcagttggctaagagacctgaaaacaaaggcaaaaatattgtagcattattacctgattcaggtgacagatattattcaacacctttattccaggattaagttaataagattaagaaaaaagatatttacaaaggagataattatggcagaaagaaattacaaatttgaaacattacagttacacgtaggacaggaaaatccagatcctgttacagatgcaagagcagtaccaatttatcagacttcatcttatgtatttagaaattgcgatcatgcagaagcaagatttggcttagcagacgcaggaaatatttatggacgtcttacaaacccaacagaagacgtatttgaaaagagaattgccgcacttgaaggtggtgttgcagcattagcagtagcatcaggagcagcagctatcgcttacacaattgaaaatttagcacagaagggtgaccatattgttgcagcaaagaacatttatggtggaacatataaccttttagaacatacacttccggcttatggaatttcaacaacatttgtagatccatttaactttgatgaagttgaaaatgcaattcaggacaatactaaggctgtatttattgaaacattaggaaatcctaattcagacgtagtagatattgaaaaaattgcagaaatcgcacatgcacacaagattccacttgtaattgacaatacatttgcaacaccatatcttgtaagacctattgaacacggtgctgacattgttgttcattcagcaacaaaattcatcggtggtcatggtacaacaatcggtggtgtaatcgttgacggtggaaaatttgactgggaagcaagcggaaagtttgaatcacttacagctccaaacccaagttaccatggtgtaagctttactaaagcagtaggacctgcagcttttgttacaaagattagagcaatccttcttcgtgatacaggtgctacaatttcaccattccatgcatttattttccttcagggattagaaacactttcacttagagttgaaagacatgttgaaaatgctttaaaagttgttcagtacttaaagaatcatccacaggtagaagcagtacatcatccatcagtatctgatgatcctgtacagcaggaattatacaagaaatacttccctaacggtggtggatcaatctttacatttgaaataaagggagatgacagaaaggctaaagactttatcgataaccttcagttattctcattattagcaaacgtggctgatgttaaatcattagttattcacccggcatcaacaacacattcacagatgacagaagaagaacttttaggttcaggaattaagcctaacacaattcgtctttcaatcggtacagaaaatgttgatgacattattgaagatttagatgaagcttttaaagctgtcaaataaatatcttttttcttaaagagcttaccttcgggtggctctttttaagtaattttgttaaaacaaaattaaaaacttgattttgttctataaatgtttaagattataggtatgacaaaacttatttggaaattatttaaaattgtattgactttattattggcgtttttaatgtatgtggtaattggtggcgttgtgccatttttacaccatcctgatgtgtcgcagacgaaaaaggaggcagttgaaagcacacagttttatagtgatagtgtaggaccggatagggcaactattattgaagataatgaggaagcgttaaaaatgcggcttagagtaataaaggatgcccaaaagacccttatattgtcaacttttgattttagaagtgatgatgctggaaaggatattttggcagctttattaaatgcggcggacagaggtgtaaaggtagaaatttttgccgatggatttaattcggttattcaaatggagaataacgactatttttatgctttgtcgtccaacaaaaatataaaaattataatttataatcaggttaatatccttattccgtggaatgggttaggacgaatgcatgacaaatatgtaattgcagatgacagtttgtatattcttggcggacgaaatacatttggttattttcttggtgattatgcaggccacaagaattatgacagagatgtacttgtttacaatacaggctcaaaggccagttcaatttatcagattaaagattattacaagaaaataacgtctcagaagtgttgttcggtatttcactgtaatgaaagtcttggtgaaaagaatagtgtaaaaaaggctgaacaggagcttaaaaatagatatgaaagtcttgaaaacaaatatgataagtttttagcaggaaattatgattataaggctaatacttatgagactaacaaaataaatcttttaagtaatcccacatctttgtatacaaagcagcctacggtttattatggtttaatgtatttggcaaaaaatgcaaagaaggaagtaaagattcatactccttatataatttgtaatgactatatgtataaggaacttaaaaatataaaagttccaacaaccattatgactaattctgcagagaataatggaaatatatttggtgcagtggattatcttaatcataagaaagacattataaacaccggagttacaattaaagaatatgagggtggaatttcttatcatgggaaaagtatgaccatagatgatgatattgccattgtaggatcttttaatatggatatgagaagtgcatatattgatacagagcttatgcttgttattaacagtaaggatattaataaacaacttaaagcaagtatggaagagtatgagaagaaagcagccactgtaaaaaatgaaacagagtatagccatattcctgagggaatgaagatgaaagaattgtcagacaaaaagaaaaacattaaagcgtggtttggttgggcgatgaatggattaagatttttgttttaaagtggataaatatcataagggattaaaaacagttgtctataaaaacagacattaatagggataaatcttggaaaagaggacattaatatgttggcaaacagaaaaatagtaataataggagcagggcacgtaggctcacattgtgcatatgctttggcaatacagggaatatgtgatgaaattgttttggttgacaaagaccggacaaaagctaaaagtcatagtatggatatagctgacagtgtaagtttttttaatagttcagtaattgtcagatgtggagattatagcgattgcaaggatgcagatattatagtaataagtgcaggggttccaagacttccgggacagacacgacttgatgtgttagatggttcagtggaatgtgtaagggacattgtaagcaacttaaataaaatagaaataaaaggaataattataacaattacaaatcctgcggacataattgcagactttgttagaaaagcaacaggattgcctaaaaaccgtgtgtttagcacaggaacatctcttgacacggcaagaatgagaagaacagtagcagacctttgcaatattgcaccacaaagcgtaatcggatttgcaatgggcgagcatggtgattcatcaatggtgccattttcaaacttaacaatatttggaaaaaactataaacatctaagagaagaaaatcccgaaagatttggaaagctaagcgaaaaagttataacagaccaaactcacatgagaggtatggatattatagaaggaaaaggttcaacagaatttggtataggcacagcattagctgatatggcaaaagctgttctaatggatgaacacagaattcttccggcatcaactctattagaaggggaatatggacaaacaaatgtccacgcaggagtgccatgtataataggcagaaacggaatagagcagataatagaattaaagctaacagatgaagaattaaaacaattcgaaaattcatgtaatgtaataaaacaacatatggttgaataatcacaaaatttttgttttctccgctcatcaggaatattctatcgcaaacacgttgattttatcattttgctccgccgcctattgtaaaacaaaaatcaaaactcgctgacgctcagacagttgatttttgctttacgctatgctcgcaaaatttcaaaaatctgcctattgtttgcttctagagttttcctgatgagcggaataacaaaacaaaatattttgcgatagaatgaagtgttgtaaatataagaaaggaaactaaaaataaaatatggagaattacagtatacaccttccaagttattcaattggaagcaaagtttatgataaaataccggaaatttgtgagccatacggaactaaagttatagccattggtggtcacaaagctattaatgcagcaaaggacaagataattaaggcttgtgaaaaatctaatctggaaattttggattttatttggtatggaggagaggctacatacgaaaatgtggaagagttaatgaagaatcctttagtacagcaggcagatatgatttttgccataggtggaggtaaatctactgacacaggcaaatgtcttggaattaaagcgaacaaaccggttttttctttcccgactattgcatctaactgttcagcgtgtacaagtgtttcaattatgtactatcctgacggaagatttaaggaaccattcttctttgcagcaccaccggtacatgcatttattgatacagagattttggttcactcaccatcacgttatatgtgggcaggaatgggtgatacttatgcaaaatattttgaaagcactgtgtcttcaagaggtgaagcgttaaatcattatacacagatgggcgttacggcaagcaagatgtgctacgagcctattatgagatatggaaaagaagctatggagtcaaataatgaaggaaaggtttcatatgcttacgagcaggttgttcttgcaattattgtttcaacaggaattgcttctattttcctcactgcagaacatataattgattataatacagggcttgcgcatgctattttttattcacttacttcatatccacatattgagaagaatcatcttcatggggaagtggtaagttatggtgtgcttaatcttttacttgtggatggtaatgaagaagacttcaaaaaagtatatgagtttagtaagagtgtaggacttccaactaaattaaaagacttagagtttgacagctcacagcttgaagaaatagcaaaaattgccgttgaaatgaaagatatagaccacaatccatacaagataacaaaagaaatggtggaagagtctattagaaaactggaagccatgtaagaatataaaaaacagtaatataatagtttacttagttttgtgttaaaaataatcaaaatatatattaaaattgtgggttgacgtataaaaaatacagagttataatcttcccatagtttacagaaacaattaaagatgaccattagaaaccgatgatgcggaggtaaaagtgaatcgtgcacttacagagagtaggggatgctgagaacccacagaacgcagctcacataaatggaccgcagagggcatagaacaaagcgagagataattaatcaacggctgatagttcaggaaagtttgttaataactttaataattatttcagaattcgttagtattttatgacgtgaaggcatacgttagttgcacagagtatgatagtactcgttgagagtgtgagattttaatttcacaaatcaaggtggcaccgcggaatatattttagtattttcgtccttgatgatagcatagaagattatgctattgtcgaggatttttttatgcaataagaaattcctttggaattcgtgttacataaaaagtactttactctataggttatcagaattgctcaaactttaaaataagtagtataaatactacaaataaaaaggagaaagaatatgagaaagatgaaaaaagttttaagtgttttagcaacagtagtaatggtagcaacagcattaacagcatgcggaggaaatggaaagtcaggctctgcaacagacaagaaagataccaatggtgacggagaagtaaaagttggtattgtatctatgattgaaaacggagcttttatggatatgaaagagggaatcgttgcagaattaaaggcacagggttatgaagattcacagatagattataaatgtgcagcaggtgatgcatcagcactttcaacaatcgtaactaatatgacagatggcacatacgatatgattttttcaattgcaacaccacctacacaggcattagttaacacagaaacagatacacctgttttcttctgtgcagtatcagcgccaacagcagcaggtatacttacagatatggataagccggacaagaatgcaacaggaacatctaatgcaattccggtttcaaaaattattgacttggcacaggctacaacacctgtaaagaaaatcggtcttatttacagcggtaatgaagataacgcaacaaacacagttaagcagtgcgaagaatatttaaaatcaattaatgttgaatatgtagaaaaaacagcagcttcatcaaacgatgttgaaacagcaactaacgctttaatcgctgaaggggcagaagcaattttcgtaccaaatgattcaattattcaggatggagtaagcaagttaacagagatttgtaatgaaaagaaaatcccaacatattgttcatcagcaacaacagtagcttcaggatgttttgcaacacttgccattgatgataagggtattggaaagaaaacagttgatatcgcaatggactatgtaaacggaaaagaagttgcagatattcctgcacaggtagttggcattgattattgctcagtaaacaagtcagcaatgaagacattaggaattagccaagaccatattaaaacagattacaaacttaacgttattgaaaactaagaggaagagaaatgatagaattacaatattatttatccaatgttccggattgcttaatttacggattattggcaatgggaatttatatatcacttagaatattggatataccggatttaactacagaaggaagcttcggtttcggagctgttatatcagttttggtggcacttgcaggtcatcctattcttgcactttttgcaggaatgatagcgggaggttttgcaggagtaataacaggatttttacagacaaaattaaaggtacatcctgttttggcagggattattacaatgagtgggctgtattcaattaatcttgtgtgttattcattaacagaaaaaggtgcaacaaccaacttaagctataataagattacagtttttgaaaaaataaagcagttacttttaataagaggtcagtttgaaacaagtatggttaagactgtagttagtctgattattgtaattatagttttgttaatagttatttggttcttcaaaacacacattggactttgcattcgtgcaacaggtgacaatcctgacatggttagagcttcatcaattaatgtagacagaacaaagattatcggattaatgttagctaatggtcttattggactttcaggtgctttatcatcacaaagtcttggctattcagatgttaatactgctaacggaactttgatttatggcttggcagcagttattatcggtgaagctatttttggaaaaagaggagctactattggacttatttcagcagtaacaggttctgttatttataaattaatagttgcatttgttataagagaaaatcttttcggagaattaagtagtaaccttatgaagtttacatgtgcgttaatcgtggcaataacacttgcagttcctgcaattaaacagaaaatggcagagaataagcaaagaaaggcggcaagataatgttagatattcagaatatttcaaaaacatttgaaaagggaacagttaatgaacatgtggcaattaataatttaagcttaaagcttgaagacggggaatttgttacagtagttggttcaaacggtgccggaaaaagtactttgtttaatgctatttgtggaagctttatggtagatgagggacacattttcttagatgatatggatattacttataaaagtgaacattcaagagcaaagatgataggacgtgtttttcaggatccaatgaagggaacagctcctaatatgacaattgaagaaaatcttgcattggcatacacaagagcttcaaagcagtcgcctttttcaagagcaataacaaagaaaaagattcagttctttagagaaaatctcgcccgttataatatgggaattgaagatagaatgaaaacaaaaatcgggcttctttcaggtggtcaaagacaggttgtaacattattaatgtgtacattatcaattccaaaacttttgcttttggatgaacacacagctgctcttgatcctgcaacagcagaaaaagtaatggacattacaaaaacaattgttcaggaaaataatataacaacaatgatgataacacataacctgaaacaatcccttacaaccggaacaagaacaataatgcttgattccggcgaaataatacttgacctttcaggagaagaaagaaagaatacaacaatggaagacatgataaaaatgtactccatgaagaagcagaaagaatttgataacgacagaatattgttaagtcagtagaaagcaatttcaccacaacattttaaaattgattagaatgttgtggtatttttttgtgaaatttagttggttaatattacatagaccataaagaatagaagtgaacaccacaacatattcattttaatacaaaatcatacctacaaaatcaaacatatgtctaaaaatactacaaatatataaaatgtacattgatataaaaaagatacagtgatataaaaaagatacagtgatataaaaaatatacagatgtataaaaagtgcaaaaaacacattttaaaacttgcaggaggagaaagatggcaaattctaatattacaaaaaaagctttggcacaaagcttaaaagaattaggctcaacaaagattttggataaaatcacagtggctgacataacaaatcattgtggtgttaacaggcaaacattttactatcattttaatgacaagtatgaattattaaattggatatatacagaagacttattcaagcctttaacaaaggatttggatttctttaattggggagacaagttagttggattattaaagtatatgaagaatatgaaaccattctttatgaatacaatcaagtcctctaacaattttttcgctgaatatatggacaaggttttaattgaattaatgcacaaggcaataaaagatttggacttatacaatcatttaggagaaaaagaaaaagatatatatgcaagattttttgcatatggattaacaggtgtaattgttgactggacaatggcaggcatgaaagaagatgaagaagaattatcgaaaactcttcagtcaatggttattaatactgaacgtataggatacgaattttatatgcaacgtaaaaaagagaaagaaggaattaaataattctcaatcaacaaagttttcaaagtgattaattttataatacaacaaaaaaaggagtaagcagtcatgaaaaagtgtgtgaagaaaagtataggattaatgcttgtagcatctatgacagttagcagcttaacaggttgcggaagtacagcagaggaaagcaaagatactacatcgaaaaacaatgtggaaaaaacagacaattcaaaaacaagcaatgtagaagaaattttgacaaacaagatggatacttcaaaagactcagaaaagaaggaatccgtatatgttgaaatggatgcagaaggtaatgttacaaaaacaactgtaagtgatgaattaaaagtaagcggaagtgaaaacattacagattattcaaacttaagtgatataaaaaatcttagtggagatgaaaaatttacaaaatcagacgatggaaaaatcgtatgggaaaacaaaggtgaaaacatttcttatcagggtacaacaacagaagcaacaccaataaatgttaaagttacatattatcttgatggaaagaaaatttctccaagcgatttagccggaaaaagtggtgaagtaaagattgtatacaattatagcaacacagcaaaaacagaagatgggcagtttgttccatttcttgctttaacgggaatggttttggatgacaacttcagcaacgtaaaagtagataacggtaaagtcgtaagctatgatgactcaaacattgttataggttatgcggcaccgggacttaaagatcatcttttaaatacaatcaataatgcagaagattatattaaagatgctgatattcctgaagaggtaacagtaacagcagacgttaaggacttctcaatgaatatgacattaacagttgcaagttcggacatgggggacatgaacttaaaagatacattagatttgtcagatgttcagaaacagatggacgaattacaggatggagcaaatgatttagtggatggtgccaagcagttaaatgacggcacaactaagttaaagacaggttcaaagaagattgatgagggggcaaaagatttatcaaagtacacattacagttaagcaatggtactaaggaaatggcaacacagtatacagtatttaacaaagctttacttgccggtgtaaaatcagcaaagagtggtgcagataaattatatgcaggaactaagagcataaaaacagctacaggaacacttgataccggagcaaaaggcttaaagaaaggcattgctgatgcaaaatcaggttcttcacagatttcatcaggattaaagagtgcaaaagcagcttttgaagatacaaagaaatctcagggacttgtaaatggttcaaaaacacttgcagcaggaacaaaggaagcatcaggtggtgtagataagttagtagatacattaaaagatacacctgattcaattcaaaagagtatagatgatgtaatcgcaaatgttagtaaggcatcaggtggtgcaattgcatcagaaaaggctttaaatacaacagtagaggcaataaataatgcagttacaggtggaatggagttatcacaggttcttgcagccaataatttaaatattaaaacatattatagtctggttcaggcatattatagtgttcagactttggaacaggtaaaaacacagttcacaaagcagattgcaacaagtgcttctgatattaagaaattaacagacggtatggatgcattgaaaacaggttcatcagcacttagcacaggaattggaacactttatgcaggaatcaaacagttatcaacaggagctgacagcttagattcaggaatgtcacagcttaagacaggttcaacatcacttgcagaaggcacaggaaaacttaagacaggagcttctgatttaaacgatggaatgaagactttaagtgaaggtgcaggaacactttcgaagaagattggagatgcaagtcctaagattaaggcaggaatcggaacaatcgatacagcagcatcacagattagtgatggagcaaaaacacttgcaagtggaacaactgaattaaaagacggtattgttacattagcagatggaacaaaagaattaaaagatggaacaattaagttaaatgacgaaggtattagtaagattactaagacattcaaggaagacgcacctgatgcaattgataaaattcaggaaacattgaataatggaaagaagtataattcatttagcggaatcgataagaatatgagcggaaacgttaaatttattcttaaggttcaggaaataagcaatgataaataatgagaggccaggtgcataatatgaaaaaatttggacaattagttgttaaagccagatatgtgattttgataataagtattttgctattaatacctgcagcttttggctatgttaacacaagagtaaactatgacttattgtattaccttccggatggaatagacacaatgacaggtcaggatattatgttaaatgattttggctcaggagcatttggtcttgtgcttgttgatggaatggatgatgaaaatacagcaaaattaaaaaaagaaattgaaggcgtagatcacgttaagaatgttctttggtatgatagttttgcagacttaaaaattccaaagagtatgttaccaaaagatgtttacaatgcttttaataaagatggaagtacaattatgatggttatttttgatgacacaagttcaggtgacggaacaatgagtgccattgaaaacataagaacattaacaaaacatcaatgcaaggtcagtggtatttcggcagtagtaacagatactaagagccttgttgaaagtgaaatggcaatatatgttattattgcagttataatttcaataatagttctttcaatacttatggactcatggttgatacctttgttctttatgctaagtataggaatggctattgtttataacctgggaagtaacgttgttatgggagaaatctcatacttaacaaaagctttggcagcggtacttcagcttgcagttacaatggactattcaatattcttatggcacagctatgaggagcagaagaaagtaataccaaatgacaataacaaggccatggcaaatgccataacagccacagtttcatcaattgtgggaagttcaattacaacagtggcaggatttatagctctttgctttatgacatttacattaggacttgatatgggggttgtaatggcaaaaggtgttgtatttggtgtaattgcctgtgtaacagtattgcctgcaatggtattaatatttgataaagcattggtgaagacaaaacacaaaccattaatacctgattttaagaaacttcctaagtttattacaaaacattatccggtatttataattatattcttattgttagtattccctgcatactatggtcagaagaatactaatgtatattatgatttaacattaagcttaccaaagagtcttgaaagtgttaaatctcagaatataatatctgaagattataatttaggttcatctaatattgtattaattagttcaaaaacacctgattacaaagtatctaagttattagatgacattaagggagttgacggtgttcagacagctttaggcttacagacagtattaaacggctcaatacctaattcatttatacctgatgatttgactaaagagttaaagacggataagtatgaaatgcttatatttatgtcagaatacaagacaggatcagatgaggcaaataaccagtgcaacgaaatagaaaagataattaagaattatagcaaagatggtatgcttgtaggtgaagcagcatgtacaagagacttaattaagataacagataaagactttacggttgttaactcagtttcaattgttttggtatttattatcattgctttagtatttaaatctatttcaataccgattgttcttgtagcacttattgaatttgcaatatttattaatatgggtattccatattatacgggagcaaccttaccttttattgcatcaattgttattggtacaatccagttaggtgcaacagttgactatgcaattcttatgacaaacagatataagtcagaaagaagtgccggacatgaaaagaagattgcagcaacaaatgcacttcaggcaacaatgaaatcaattatcattagtgcatgcacattctttggcgcaacatttggtgtaggtgcatattcaaatattgacatgatcagttcattatgtatcttaatgtcaagaggagcatttatcagtatgttctgtgtaatatgtatccttcctgcattctttataatttttgataagttcattataaaaggaagttataaattccttgaaaaataaaagatgcttaaaataaaacacaattaaaataacactaaaaaagccccttttaactttaaaaaaaggggcttttgtgatagaataacagtatatttaaatagattggggtatggagcaaaataaagttagtatttccacaggcattgtatggaacagcagaatcgaagatatggaagaaactttgaaagaagctgacagatgtatgtatgtggaaaaagataaatatcataaaatgacaggaggtgttgtgctatgaagcagattattattgcaatcggaagagagtttggaagcggtggacatcttgtggctaagaaattggcagaacattacaatattccattatacagcaaggaactgttagatgaagtagctaaggatggaagatatagcaaggaagttcttgaaagattcgatgagaagccaatgaacttcgcttttattcctgttcctgcagggggaacaactatttcacttgaacaggacatagctatcagacagtttaactttattcgcaagaaagctaatgaagaaaaagaatcatttgttatagtaggtagatgtgcagaagaaatcctttcagataatcctaatatgattagtgcttttatcttaggcgataaagatacaaagactaagagagttatggaaagagaaggagttgacgaaaagacagctcttaatatgatgaagaagatggataaaatgcgtaaagtttatcacaacttctattgcgaaagcaaatggggtgattcaagaacatacgatatctgtataaaaataggcaaggttgatgttgatacagcaacagatatgattataaaatatattgattcaagagataattaaaatgaaagtaaatttaaaaggagacttacatgggagaactaacatttaaagggctaaaggttgacgaattggaccttacaaacaagattgaaggacaggtagaattagatatttcacagagagcatcatttaatgtgaagtattctaatgacaaccttcattgtatggctaatcttacaattgatatgatggagaaaacacatccaatggatttcaattttaagattagtgctacagcattatttgactgtgaggaaggaatggacaagaaggaaattcataagaaagcatatgatgaaatttatccacatgtgcgtgcacttgtcattacatttatggttaattcaggacttccgccaatcgttattccgaaggttaagatggatgaatctaatattaagatagaagaaaataagaagattgaagacaataatttgtacagctagtatcaaaatagagtcaaaaaaccgttttcatcacttttttgaaaattgaaacacagtaaaaattaaaaaaacaaaataaactatacaaaatgcacaaatacaaaaaaagcaaagtcaaaaagtaactgaaaagtgtacactttcaacaaaaaaacaaaaaatatttttgtattgttgcaaaaaacgtttttaatttttaaactataagagtattagatttttaggtaacataataatctaaaccctttcaattttgtggcacctcagattgaggtgccattcctgtttttacgattcaaattcgtaattttccaaaatcttaatatttgaatccacaaagaataagtgtataatggcaacatagattaagaaaaaggataaagcctaagatgaaatacaggaaaataaaaaaaggaaattttatagaaagacctaacagatttattgcatatgttaatgtggaaggggaagagaataatccgcagatagtacatgtaaagaatacaggaagatgtaaagaactattagtggataatgcaacagtatttttggaagaatcagacaatcccaacagaaagactaagtatgaccttgtaaaggtaataaaaaacggcattcttataaacatggattcacaggcacctaataaggtggttaatgagtggcttcttaatgatggtttgtttaagaatactgaattggtaaagccggagaaaacatttgagaaatcaagatttgacttttatgttgaaggcgatggcaagaaagcctggattgaggttaaaggcgtaactcttgaaaaagacggtgtggccatgtttccggatgctccaagcgatagagcagttaaacatattgaacatcttataaaagccaaaaacataggatatgaggcatatattatatttgtaatacaaatgaaagggattaaatactttataccaaacagggaaacacatgccgaattttgtgacgctttggttaaagctaaagaatcaggtgttaatatactagcatacgattgtattgtgactcgagatgaattaaaaatagaccaaccggtaaaaataaagttaaaagaaaacaagtaaaagattactaaaaaatttacttaaaacgcaggaaaatattaccaaaataatggacaaaaaattgttataattgtttataaaataaagcgtgtagactgttgactaaaaaagactaatagtggtattatataggaaaaatggggttaaaaaaagctaaaaattattaatttataaatttatttagaagaggttagatattatgaagaagttaattttagtaacatctccaccggcatgtggaaaaacatttgtaacaaagaaattagcaaaggctatgcctaactgtgtttatcttgataaggattcacttatcgtattatcaaaacagatttttgttgtagctaatcaggaatacaacagaagctcagatttctttgaagaaaatatcagaaactatgaatacgatgcaatcatggaagttgcaagagaagcattagaatataatgatacagtattcattaactcaccatttacaagagaagttagaactcctggttatatggagaatcttagacaggatcttttaaagattggtgcagaattagttgtagtttgggtacagtgtgatgttgaagtttgcagacagagaatgatagcacgtaactcagacagagatacatggaaacttgaaaactgggatgagtacattaagaagattaatttcacagtacctgatggaattaagaatttattcttatttaataattcatctgatgaagctttcaagaagtcattagacgaagcagtagaatattttaaaaatttaaaatagtcttttaagacagtttacttaaaaagagaagggacgcctaagtttcttctcttttgtgttataacaaaaaagtaacaatttgttaaaataaagtctattgaaatataaaaaataagagtaaaataaaaaatatcaaacgaagaggagtttgattagcgtttggtttttgatatccaaactaaataaatatggaaaacaaatttaaatcaaaaggagggatttcattatgaacataagtaagtttacacaaaaatctgtggaagctattcagaactgtgagaaagttgcaactgaatatggcaatcaggagattgaccaggagcatttaatctacagtcttattacattagacgacagtctgattattaagttaattgaaaagatggaaatccagccggagcattttagaaatagggtagaagattatatagcaaaaaagcctaaggtgcagggtgggaatccatatgtaagtcaggcacttaataatgccttgatttatgccgaagatgaggctaaaagaatgggagatgaatatgtatcagttgaacatattttcctttcattaatagacagacctaataaagaagtggcagaactatttagagagtatggaattaagagagaaagatttcttggagcgttggagactgttagaggtaatgtgaaagttacatctgataatcctgaaagcacatatgatgctttgtctaagtatggacaggatttggttgaaagagcaagaaatcagaaacttgatccggtaatcggccgtgatagtgaaattagaaacgtaatcagaatactttcacgtaaaacaaaaaataatccggtattaataggtgagcctggtgttggtaaaacagcagcagtagaaggattggcacagcgtattgtacgtggtgatgttcctgaaggactaaaggacaaaaagatatttgcccttgatttgggagctcttgtagcgggagccaaatacagaggtgagtttgaggagagattaaaggcagttcttgaagatgtaaagaacagtgatggaaacattatattgtttattgatgaacttcatacaattgttggtgcaggaaaaacagacggagcaatggatgcaggtaatatgttaaaaccaatgcttgcaagaggtgaacttcattgtataggtgcaacaacattagatgaatatagacagtatattgaaaaagataaggctttggaaagaagatttcagcctgtaatggtaaatgaacctactgttgaggatacgatttcaattttaagaggtttaaaagaaagatatgaagttttccacggtgtaaaaatccaggatggggcattagtaagtgcagcaacactttcagatagatatataacagatagatttcttccagataaggctattgacttagttgatgaggcatgcgctttaattaagacggaaatggactcaatgcctactgaacttgatgaacttagaagaaaagtaatgcagttagaaatagaagaggcagcgcttaagaaagaaacagataatctaagtaaagaaagattagttgaacttcaaaaagaattggcagaaatgcgtgatgagtttaataacaagaaagcacagtgggaaaatgaaaaagattctgtaacaaaattacaggatttaagagaacaggttgaaaatgttaagaaggacattgaaaaagcccagagtgaatacaatcttgaaaaggcagcagaacttcagtatggtaagttaccacaacttcagaaacagttagaggctgaagaagcagcagttaagaataaagatttatcattgcttagggaaagtgtaactgatgaggaaatagcaagaataatatcaagatggacaggaattccggtagcaaaacttacggaaacagaaagagaaaaaacacttcatcttgataagcaacttcacaaacgtgtcattggacaggatgaggcagtaacaaagattactgaatcaattatcaggtctaaggcaggcataaaggatccaagtaaacctatcggttctttcctattcttaggacctacaggtgttggtaagactgaattggcaaaagctttggcacagaacttatttgatgatgaaagtaatatggtcagaattgatatgagtgagtatatggaaaaatacagtgtgtcaagattaatcggagcgcctccgggatatgttggatacgatgaaggcggtcagcttactgaggcagtaagacgtaaaccttattcggttgtactttttgatgaagttgaaaaggcacatccggatgtatttaacgtacttttacaggtacttgacgatggtcgtattacagactcacagggtagaacagtagactttaagaatacaattttgattatgacttcaaatattggttcatcatatctgttagaaggaattgatgacaatggcaacattaagcaggaaaatcaggaccttgtaatgaatgatttaagaaatcatttcagaccagagttcttaaacagacttgatgaaattattatgtttaagcctttaacaagggataacattggcggaattgtagatcttgtaattgacagtgttaacgaaagattaaaggatagagagttacagattaagcttactgatgcagcaaaaacttatgttgcagataacggatatgatccggtttatggtgcaagaccattaaagagatatttgcagaagaatgttgaaacattggctgcaagagttatccttgaaggtaaggttagtatgggagatacaataacctttgatgttgttgacggaaagctggcagttgtttaaagagaactgattaattttaattacacggattgctttgtgctttgcactcccgcaatccgtcaccggcattcgcatatcgtgaaacttccgtttcacttttatgctcgtgttggggcgtgtattaagttcatttttctaatactgtgcaagcacaggtagaaaaatgaacttgtacactgtaattaaaataatatatttttcatataatgattaataaaatattgtgtgaagagtattgaaaagaatattaaataaaaaaattttagttggaatattattaataggaatgttaataataggaatggcatttatttacggcaactataggaacagtgaagttgttcttactaatctaaatattacaaatgtaaatgatgccatccctaaggtggctttgacttttgatgacggtcccagtagcgtttatacaaaaatattgcttgacggacttaaggagagaaaggtaaaagccaccttttttcttgtgggagagaacgtggaaaataacaaaaagctgacaaaaagaatttcaaaagaaggtcatcttatcggaaatcatacatattcacatgcagaccttgcaaggactaattacaataaggcatcggttgaaattaataagactaatgagattataacaagtattacaggaacttctccaaagtatataagaccgccttacggagatgtgaacaagaaacttttggaaaatacaggaatgaaggtagttctttggaatgttgacccggaagactggaaggaccagaatgcagacattgtcgttaacagaattataagccatgtaagaccgggagacattatattgcttcacgatatttttaaaagttcagttgaggcagccttaaagactgtagatattttgcaggataagggatatcagtttgttactgtggataaattaaataacagtacaataaaataaaagttgaaaaaatagatttaataaataaatgtaattgagaaaagttatggataatgatatacttgtcaggaacttgtgtgaaaaattagataattaggagaattaaaagaatgaatttattaaaacattatattatgattttttttgtttcaatggttcccattgtagaacttagaggagcaataccaatttctcagggctttggcttgccattgttacaatcatatattatttgtgtaattggaaacatgcttcctgtaccggtaatattcttttttgcaagaaaggtacttatttggggaaaggataaaaagtttattggaggattctttacatggtgccttgacaaaggtgaacgtggaggcgagaagcttaaagaaaaggcaggcaaaggcttatatgtagctttattattatttgttggtattccacttccgggcacaggcgcatggaccggaacattggctgcaagctttttggatatggactttaagaagagcgttattgcatgtatgggtggagtattgttagccggcgttataatgggcgttggaagcgtggcaggcgtttcattctttaatgcattgttttaaagaatgaaaacaattatggaatttttattataaaaatgaaagagaacataggatgagtaatacaaaaaacaagaattattatggatttaaacagaataaacaggaaaatccttatggacgttatacaccgggtacagttggaaagattgccattgcagtaacagtaccttcagctataattgcttttgtgtcagtaatgattgcacttttgacatctatgattcaggcacttatggttacattgataacatttattatatcttttgtgggaagtgtaattcttgcaatagatatagtaatattcaatagaaaacagagcaaaaaaagtggcacatcagaccagcctaagcagttagacataatgagaatcgtgcatttgatagttggcattggtgtgggaattattatcggatatttaatctggggaaacaaataaagaagttggatatggacaatgaaataaaggagacagacatgaacaatctaccaaaagatcctgtaatgcttctaagcgtagtaaatactaatcttcgcgatttctacagtaatttagatgaattttgcaaagcaaaagacgcagataaacaggaaataatagagaagttaaaaatgattgagtatacatatgatgaagaaaaaaatcagtttgtgtagagaataaatgaattaaaaaatccttgcagattcagaaaatgaaactgcagggatttttttgttgctattatcaaaatgaaaaatatctaatctatcttttatcaagtggcacataaacagccttttttgcaacgttcttatatgcaggacgtatgattttgccggcgttgattaattcttcaatacggtgtgcacaccagccggccattctggcggaagcaaacattggagtgtaaagtccgtcaggaagtccaagcattgaatatacgaaaccgctgtagaagtcaacgtttgccccaacacttttctgtctcttatgagcttttgaaatcacttcaggagcaagtctttctacgttttggtataatgcaaattcatcaagacgattcttttcagcagcaaggtcttttgtgaaagctttaagaagctttgcacgaggatcggaaatggcgtaaactgcatgaccaataccatagattaaacctgactgatcgaaaatacgcttctcaagaagagcatttaaataattcttaatttcgtcatcatcattccagtcattgattgtttccttcatatgatcaaacatatgcttaactttaatattagcaccaccatgtttaggtccttttaatgaacaaagggcagctgcaatagccgaataagtatctgttcctgaagatgaaacaacatggtctgtgaaagttgagttattaccaccaccatgttcagcatgaagaacaagagctaagtcaaggattttggcttcaagttctgtataagagctgtcaggacgtaaaagtcttaaaatgttttcggcagttgacaggttaacatcaggattaataatatataaattatcaccatgatgataatgtctgtgagcctgatatccgtaaacggatataagtggaaccctggcaataaggcttaagctctgtcttaaaacattaggaattgaagtgtcatcaggattttcatcccatgaataaagtgagagaacacttcttgcaagaaggttcatcatatctctacttgtagctttcataataatatcacggacaaaacttggtggaagagttctatattcggcaagaactttgttgaaattagcaagtctcttttcagatggaagttcgccgaagagaagaagataagtaacctcttcaaaaccaaaacgattctcttttaagaaaccatgaacaatatcttctacatcaatacctctataaaaaagctttccttcaacgggaacaactttaccgtcaatagtttcatatgaatgaacatcaccgatttcagttaaaccggtaagaacacccttacctgtatttctatcacgaagaccacgcttaacatcaaatttatcgtagagattcggatcaatacatgaattattaatacatctgtctgcatatttattaatctgaactgtaagtggatcgtcgaactgttcttctttttcatttaataacataagaaaacctcccttttatgagtgtaaagtctaccacataacttaattttctacaataaaaccatatctaaacataataaaataaagtaaatagtatattttgttaagacgaaacattaaaaaattaggcgaataataatgtgaatgttttttaaaaattaatgcataaatatttgcaatgagcatatttgataggatgatattaacaataatctgtactatatatctatagcagtaaagctatattagtgctaattatttagaatttaattttatctattatacaaaataaatgtgaaatgtggtagaataaaaaccaaatatgttgttataagacagttaatagaggtttaatagatataatggatatttttgattacgcaagaagcgttaacagtgagaaggaatcaccgttagcaagcagattaagacctaaaactttagaccaggttgtaggacaggaacatataataggaaaagacaaattactatatagagcaataaaagcagacaaaattagttcaattattttttacggccctccgggaacgggaaagactacattggctaaggttattgccaatactacaagtgcagattttatgcagttaaatgcaactgtggcaggaaagaaagacatggaagacgtggttgcaaaggctaaacagaatatggcaatgagtggtaggaagactattctttttgtagatgaaattcatcgctttaataagggacaacaggattatcttcttccttttgttgaagacggaacggttgtacttattggggcaacaacagagaatccatattttgaagttaactcagctttaatatcaaggtcaattgtttttgaattacatcctttaagtgtggaaaacattaagacacttatactaagggcagtaaatgacaaaactgacggaatgggaatttataacggagtaatcgatgatgatgcggttatgtttttggcagagatttcaaatggggatgcaagaacagcgttaaatgcagtagagcttggtattttgactacagatccggcacaggatggcaagatacatattacattggaagtagcacagcaatgtgttcagaagagagcattaaaatatgacaagtcaggagataatcattacgatacaatttctgcatttataaaaagtatgcgaggttctgatcctgatgcggcagtgtattatttatcaagaatgctttatgcaggggaaagcgttgactttatatcaagaagaattttgatttgtgcggcagaagatgttggcatggcaaatccacaggcgttagttgttgccaatgcagcagcccaggcagttcaccaggttggtatgcctgaagcccagataatattgtcggaggcagttatttatgtggcttcatcgccaaagagcaactcagcctgcaatgcaatttttgcagcaaatgaagtggtaagaagtactgttacagcaaaggttccggtacatttacaggatgcacattataaaggctcagccaagcttggtcacggaatcggatacaagtacgcacacgattatccaaatcattatgtgaaacaacaatatcttcctgacggtttggaagatagcaggttctatgaaccgggagatttaggatacgaagtagaagttaagaattactttaaaaagataaaggaagattagtgtaaaatatccaaatccggattaaaaggattgtgaactgttttgcatttccataatcctaagagagttaaaatcagaggtgaaataattgaagactttaattgacaagttagcagcaggagtttcaacatatgaaatgcctgatgcggaagttttagaaaacagaatagccgtagagctggaaacaggggattacaaacgaggagaattaaacataaaaagcaaaaacaatcttcctataaaaggagttgtattttctactgataatcatataactttcgagaacaatcagtttaacggcattaacaatgtgattagatatagcgtaagcagtaagaatctggagcagggacagatctgcaacggaacaataagcatggttacaactgcagggggttttgacattccttttgcaataacaataaagaaaagagagctggaatcaacaataggaatgattggaggttttaatgacttcttaagacttattaatgaaagttatgacgaggcattaatattattcctttcaaaagaatttaaggagtttttcctaaaaaacgatagtttcggctctacattgtatgacatggtgcttcataacagtaaccgtggaattgcaatggaagagtttcttgtgggaatgggattaaaaaagagagttgccattagtacaaaggagaattatagagaatattccaatattaaagagaactatgcagacacgattaatcttgaaagaagttgtcttggatatgcggaaataaatgttacagttgaaggtgatttcctttataactgcaagtcacaggttaagggcgatgattttaatggcaaagttgcagaatatgagttttatattaatgcagccagacttcacggaggaagcaaccacggcagattaatttttgagacaactaacgaaacaattgtttacgacattgtaatagtaaatgaaaaagacgaaattaacgattacatagaagaaaagaagaacaacataggtcttataaagaactatcttgattttagaaccggtgttattgatggtaaaaaatggattaatgaaatgtcaaaaatggcacaggaacgactggaaaagaacgaagacgaccttgttggtattttggttaaggctcaggtggcaattgccgaaaataatacagaggaagctacatcatatcttgacagggcatctaagcagatggcaataaaggacaaaaataatgtagaagaatactgttactatctgtacttaaaaacattacataaaaataatcctaattatactaacgaaataaaggcagaaatcaagaaatactttgaaagtggtcatgacacatggcagttattgtggcttttattttacatggatgaaagatatgacgaaaatccgagcttaaaatatacaatgattaagcgaatgtttggagaaggatgtttcagtccggttatgtattttgaggcggcaaatattttaattaatcagcctgaacttttaagaatccttaacagttttgaaattcaggtattaaactttgcggcaaaatacaaaatcgtgacaaaagaccttgccaagcagacagcagagctcatgattaaggacaaggcatataatgaaggatactttaacatacttgcaagattttatgagcagactaaggaagaagaggttcttacatgtatatgtacaatgattattaatggcaataagttggaccacagctattccaagtggcttacagaaggtgtcagggaagaacttagaattactaatttgtatgaatattatatttatacaattaatacttctaattataagccattggagaagtcagcatataagtatttttcttacggaacagatactttaatgtataacaaagattatttctacgcaaatctgttaactaacattagtatgttagaggatgaatatttaaaattccgtgacggcgtggaaaaatatgcaacagaacaattacttaaaggcaacaacaatgaccatttaagactaatttactctaagttaataacagatgatttccttgtaggtaatatgcagcaggcaatgccacaggttcttaatacttacaagataacagtaaaaaatgaaaaaataaaaacagttgttgtacgtcataaagaaacagaaaatattattacatcaactgtgaataacggagtggcttacgtaagattatatacaaagaatcctgttattttatttatggataacaagggcagatttatttgggagtctgactatcagataaaacatttaaaaatcgaagctccaattacaaaaaaaggaagcagtaatcttactaagcttgtggaaacagaaaagattcttgaacatcctaatatgtacaaaggtaaggttcaggaattaaaggaaacagtggaaattcctgaattatcaaagcaatatcgtgattcactaaaggaatttattgtggattattattacaaaggctacgatttgggagaaatggatatttatattatgcagtttaatctggcagagttatccaaagtttcccgaaagaagataatggagattttaatagaaagaaatcttatggaaatggtttatccacatattgccaagtatggttatgaaagtataaaggtaagcttgcttgaaaaactttgtgtggaattggttaaagagcctgagtttgacaaaaacgaaattcttatagagatgtgtgccgaatctttcagaaatggttgcagggatgagaatgttcttaagttcttaggcaagtattatgattcaggttcccttgaattatatcagatgtttttggcggttcagtcaagaaatattaatgataatacattggctgaaaagttgttggtacagcttatttttgaaggcagtgttgataagtctatttatgaaatatatgaagaatacattaagggaccaacatcttcagttataagaagggcattttacacatatgtttcttataattattttattaaaaaagttcaatgtcctgaaagagtatgggaaatagttgaacaggaattggaaaacggatttgatgtaacattaattacaaaaatcgcttttgtggaagtaatgtcacagaaagataagcttactgaaaatcaaattaaaataacaaaggacttaattgatactttagttaagagcaatgttaattttgaattttataagaagtttaataaatggtacaagattccgtttaatcttttagataagacaattatagattttagaactaatccgaaacatagggttgatattacttatgagattaaaaatcaggaaggaaaaaccggaaaagttacagaagaaatgggaagcatttatccgggaattttctcaaaagaagtaataatgttctacggtgaggaaatagattacagtataaaggagtattctaatgaatatccggaaggtaaggttgttgataactattcagtgagaatatcagagaagaatgcttacaacgacgaaagccgttttggaataattaacagtatgatgatttgcaaggctttaggcgaggatgatgcagcaagagatatgatgcagacttacgaactttgcaaggaagcaggaagaaaattatttagattattgtaatcagggcagacaatataggaggatgaaactttgggaaaaggaataatattgggaatcgatttttccatagactttacgcaaatggctgtgttggatgatgaaattaatccaagatccattagtataggaacagaagataattttttgataccgtctgttgtatgttataacagcgaattaaatgaatggtcagcaggtgatgaggctgttaacaaaagcagattaaataatagcactgaatatagaaaattgccggagattttaaagcagaactatggggaagatttaacaaaacagattattacaacgtatatgtcatatctgctaaaggttgcagtaaattacagcaatggcaaattaatcaaaaatgttcttgtaactttaaatgaagttacaccggaaatgattgaattaattacaaccgcttttactaatttaggttacaatgcaaatgatattaagataataagtcattcagaaagttttgtatattatgttttaaatcagggaaaagatatttggattaatcaggtttacttccttaattttgacagaaatgatttttcctgcagaaagcttaatgttataaaaggcaagcaggttcatgtggcagatgttacagttgaagacttaaatgacaggatgacatatgattcggtaaagaataacatggatatggcagatgaaattgtggcagattatatggaagaccagcttaagaaaaatgttgtatcaggtgtgtttttgtcaggtgaaggtttttatgcagaaggctgggcgaaaactttacagactatatgcagaaacagaagagtttttaagggaaataacttaattgtaaaaggtgcagcttacggggcaaaagagttcttttatatgaaaacccttaaggattacattatttcatgtaagggcagaacaagagtaagagttacaatgtctgttaaacataaagaaagagacagtatggtaacattgtcagatattggtgattattggtatcaggcaaaatcaaaaacagaatgtataatggaagaacctacagaagctgtttttgaaattcataatattatgaaacatacaacagaagagtttagaattgatttgacggaatttccaaaaagaccaccgaaaacaacaagaatcagtgttgattttaaatatttaacagaaaacaaatttcagattacaattacggatttaggttttggagagttctttaaatcatcgggaatgtcagttacaaaggaaatagagattggctaaaggagtaaatgaatatgaatgacataacattatgtacaatgcatacggaaaagccttattatattaaagaaattaacaagaatatatattctatagaagaattaagttattacttatttaattacctttatttaattgatgaccagtttttcagtgaaggcttaattgattatattgaaaacgaacttaagcaacctcacattgcatcaggtataagacagattaatgccaacaaaggagctttgggagaaaagatttcttttcttataaaaaacgccggttactatactgagcgtgaagcagaaaaattagaaaaccatcttgttatgcttagttcaaaaacagcagcagaaagaattaaggctaaggcagatattttgatggaaacagacaagtataatatggcaattaattactataatagtattttaagtaagtccattaatactgatttgcctgaaagattttatggtgatgtttataacaatcttggtgtggcttacgcaagattgtttgaatacgaccaggctgcaacagcttttagatgtgcttataggcttaatgcttcggcagagtctttggaatcaataataatgtgcgaccttattactgataatgagaagcgactaaaaatggataaggacaaatatggtgtttccgacactgttatcaacagaattaagacagaaataattaagcttaatgctgaaattaaaacaggttggaacaaaaaacaggaagatcaatatatgcagcagtgcaagaaagaatatattgtagaaataaacagttaaatgttttgtgaacatagttgacaaaccaatttaaaattattattattagttcatatatggaaatgcgtagaagaaaaggagtagcagataaccttttaaagagagagagggacggtggaagcctcttaaagcagtgtctgtgaaggtagttttggagcagagatgatgaattgagtagttgtctacggttcgtccccgttacaggatatgataagtgaaagataaaggtggtaccgcgagcaatcgccctttatgcggtaccggcattatacataagaaagtcgtgctgatactgcaaaggagagcacgactttcgtgtttgttcacgaaaatccggtgcagacaaaaatgataataaattaaaaaaataggatatggtatgttaataacattcctatgaaaaaggttacgattggagaagaaagatgaaagaaattgaaaagaattacaatccggcagagattgaagacagattgtatagtaagtggcaggaaaagaaatacttccatgcagaagtagacagaagtaagaaaccatttactattgttatgccacctccaaatattactggacagcttcatatgggacatgcccttgacaatacaatgcaggatattttaattagatttaaaaggatgcagggctatgaagccttatggcttccgggaactgaccatgcatcaattgcaacagaagctaagattgttgaaaatatgcgtgaagaaggaattacaaaggaagatttaggaagagaaaaattcttagacagagcatggcagtggaaagcgcagtatggtggacgtattgtttcacagcttaagaaaatcggttcatcatgtgactgggacagagaaagatttacaatggatgaaggctgttcaaaagctgtaaaagaagtttttgtaaatctttacaataaagggcagatttacaagggcgaaagaatcatcaactggtgtccacactgcttaacatcaatttcagatgcagaagtagaatatgaagatcaggctggtaagttctggcatttaagatatcctttaacagacggttcaggatatattcagcttgctacaacaagacctgaaacattacttggtgatacagcagtagcagtaaacccaaatgatgacagatacaaacatttagtaggaaaaactcttacacttccattagttggaagaaaaattcctattgttgccgatgactatgtaggtattgactttggtaccggtgtagttaagattacacctgcccatgaccctaacgattttgaagttggacttcgtcacaatttacctgttattaatgtattaacagatgatgcaaagattgttgacgattatcctaagtatgcaggtatggacagatatgaagcaagaaaggcaattgttgaagatttagacaaagaaggcttccttgttaagattgaagaccatgagcataacgttggtacatgttacagatgtcatacaactattgaacctagagtatcaaaacagtggtttgtaaagatggacgaacttgcaaaaccagccattgatgctgttaaaaatggtgacactaaatttgtaccgggatattttgataaaacatatttccattggcttgaaaacatccgtgactggtgtatttcacgtcagttatggtggggacatcagattcctgcattttattgtgacgactgtggagaaatggttgtaactaaagaagaccatgctacatgtccacattgtggaaaagaaatgagacaggaccctgatacacttgatacatggttctcatcagcattatggccatttagcacacttggatggcctgataaaacagaagaaatggattacttctatcctacaaacacattggtaacaggatatgatattattcctttctgggtaatgagaatgatgttctcaggacttgaacatacaggacaggttccttttgatacagtattaattcatggtttggttcgtgattcccagggacgtaaaatgagtaagtctttaggaaatggtattgatccattggaagttattgataaatacggtgctgacgcattaagatttacacttattacaggtaatgcaccaggtaatgatatgagattctactgggaaagagtagaagcttcaagaaactttgctaacaaagtttggaacgcatcaagatttattcagatgaatatgcctgaagaaggtattgatgtgaagaacaaacctgaaaatcttacagatgcagataagtggattttatcaaaagttaacactttagccaaagatgtgacagaaaatcttgataaatttgagttgggtatcgcagcagacaaaatttacgaatttatttgggaagaattttgtgactggtatattgaaatggttaagccaagattgtacaatgatgatgacgatactaaaaaggcagcactttggacacttaagaaggtattaatcgatgcattaaaacttttacatccatatatgccatttattacagaagaaattttctgcaatttacaggatgaagaagaaacaattatgctttcaaaatggcctgaatttacagaagaatatgatttcgccaaagaagaaaaagcagttgaaactattaaagaggcagttagaaatattagaaacatccgttcagaaatgaacgttgccccaagtaagaaagctaaagttttcgtagtttcaagtgaagaagaaattaagaacattttcgaaaatggtaaagtattctttgcaacattaggttatgcaagcgaagttattattcaggatgacaagtcaggtattggtgatgatgccgtatcagtagttattccaaaggctactatttacatgccttttgctgaattagttgatatttcaaaggaaatcgaacgtcttaataaggaagttgaaaagcttaataaagaattagcaagagttaacggtatgttaagcaatcctaattttgtaagcaaggctcctgaaaagaagattaacgaagaaaaggctaaacaggctaaatatcagcagatgatggatcaggtaaaggaacagttggcaagattacagaagtaggaggaaacgaccatgataaattttgaagaggaaatcaagaagtttcacccaagtctagaaatagaagaagcagaggatgccatttacaacaataacatttctgacattacagatgttatgattcagatggttgaggaacttaaaggcgacaaataaaaggcaaaggatgggtgtataaatgatatgctacaattgtggaaatgtcttaactaacagtgattattgcagtcattgtggtatggacgtaagcgtatacaaaagaatagtaaaattatcaaatacctattacaatgccggtcttacaaaagcaaaaaacagggatttgtcaggtgcagcagatactcttagaagaagtgtaaaacttaacaagagaaacattgatgcaagaaatctgttaggtcttgtttattttgaaatgggtgagactgttcaggcattttcagaatgggtaatgagtacaaatattcagccggataataacccggctgagaaatatcttgttgcaatacagcaggataaaggtaaggttagcgaattaaatcatacaattaagaagtttaatattgctcttgattatgccaaaagcggtacagatgacatggcaattattcaacttaagaaagtattgaatcagaatcctaactttataaaagcataccagttgttggcactgttgtatttaaaaggcggacaatatgagcgtgcaaaaaaatccataaaaaaatctatgaaaatagataaatgtaatcctcttagcataagatatttaagagagattaacgaatatatggatgaagagaagaaaactgatccggacaagcgaatggaaaggagaagaaaccttcgtggagttatggtggacagagaatatcttagcggaaatgatgttatcattcctaagaataactttaaggaagccataacaggagcacagagtattcttcatattgttattggtttgcttttgggtgcggcattggtttactttattgtaacaccggcaagaatgtcacatctgacagatcaggctaacaatgtaggcgttgaatacaatcagaagattgcaataaaaaattcaacaatatctgaattagagaatcaggttgatacattaaaaacagaacagaagaaacttaagtcagacttggcacagtatacagacacaggaaatacagttgcatcaaactacagtaacctgttaaaatcagtaaattattatttaaatgatgactataagaacgcggcaacagctttaagtgatgttgatagtaagcttaagatggactctgaagactttacaactgtttataaatggttaagcagtaaattatcaaaacgtatttcagaagaagcttacaatgcaggaatgacagcaagagataaggcagattatgacacagcaattaagcagtttaagaaatgtattgaagctgactcaggtaatgtagacgcaatatactatcttgcatggagttacaaaaacaaaggcgattcaaagaatgccaataagtacttcaaagagatatatgataacttccctaattcatcacactatgacacagcaaagagccagcttaacatagatgacagtagcagtagtggagataacggagacaacggcgataacggagacaacggcgataatggagataatggcgacggtggcacttcagaataagggataaagattacaattgataatactagaatctagttagattttagaaaagatttacgaaagagaagagcgaaagctcttctctttctgcgtttaagaataaagggggatttatggaagttttatatgaagtaagaggcgagaatcttttgatttatctgccggaggaacttgatcatcacaatgcgaaaacaattacagagcagtcagattggtatattgtttcaaaccagattaaaaacataatttttaattttaagcgaacaatgtttatggatagctcaggcattggagtgataatgggcaggtataagcttgtaaaaaagagaggtggaagcattacagttacaaatattaacaattcaattgacagaatttttactatttcggggctttacaaaatagtgagcaaaacggaaacacccagcttggtgaaatggtaattggagggacacatggaaaataaaagtaaggaaaacaatatgactttggagtttgatgcaaagtccgaaaacgaaagtctggcaagaattgcagttgcttcttttttaacggagattgatccaaccgttgaagaaattaatgatattaaaacggcagtatcagaagcagtaactaattcaattgttcatggctacaatgagggaccggggaaaataactttaaagtgcaagcttgtatgcaatcagtacgaaaagcaggatacatatacggttagtagttttattaccattgagataaaagatttgggagttggtataacaaatattgaaaaagcaagagagcccttgtttaccacaaaaccggaatttgaaagatccggaatgggatttatgtttatggaaatgtttatgaataaagtagatgtgatttcagagccggggaaaggcacaacagttataatggagaaaaaacttaaaaaagttatagaaaaaaacagcataaaaagtagtcaatataatagtaagttgatgaaccacactaattctaaatccattgggctagttaatttgaaagaaaagtccggccagagggcataatggatacgctaactttgataaacagggctcatcagggagataagttagcaagagataaaatattaattgaaaatacaggtttgatatggagcattgtcagaagatttttaaacagagggcacgaaggcgaagatttgtttcaaatcggatgcattggaatgctaaaagcaatagacagatttgacacagaatttgacgtggctttttcaacctatgcagttccaatgatagcaggagaaatccgaaggtttataagagatgatggcattgtaaaaatcagcagaaaaataaaagaaaatcaaatgaaaataatgcaccaaagagaaatttatataaatgaaaaaaagcaggagccaaccatagaagagcttgaaaaggtctgtgatttgacaaaagaagaaatagtaatggcgatggatgcctcaagaaatgttgagtcaattgacaaagaaatgtattcaaaagactcagcatacactctaatggatttggcggaggatgacactaatatagaagaaacggttttgaataaaattatggttcaacaattaatggacatgctggaaagtaaggagcgaaaaatcataaatttgaggtattttaaaaataaaactcaaagtcaggtagcaaaagaaatgggaatgacgcaggttcaggtgtcaagactggaaaagaaaattttaaactcaatgagaaatgaaaaaagtacataaacaaaaaatagttgttattgtaaaacgaaaaagtgcagtgaaagtttagaaatcaaatgttcattgcactttttatttattttagaataattaaaataaaaaattgcataataaaagcatagaagtttaaattttctaaaaaataaaaatttttggaggtctaaatgaaagtattaaaaatggtggcaataatagcagtgataatagtggcaataggcattggcttctacatgtgcaacgacacatatcaagtggaagaaatacaggaagcagtgatgatataaaaggttgataagattatatttttaaaaaagtaataatccatattaaacaatatgggatagaaaggacataaatgagtgacacattatatataaaaatggaccaggcagtggagattacgaaaaagcaggtaacagttggagatgttgcaaaacttcaatgcaaaaacaaaaatataacaaacagactaaaatcaatgaaattgttggaagatacaacaaaaggaaaaaagcgatatatagtttcaataatgaaaattatcgaaatggcagatcaaacatttcagaatgtagatatacaaaatataggggaaacagaatgtgttgttgaatttaagacacccaaaaaagatgacggaccaatgtcaataattaaaacagcaataatatgtttgattttgtttttcggagtgggattttccataatgtcatttaacaacgatgtgtcaatagatgatatgttttcaaaaataagcaagcaatttacaggggacaaagagcagggcagaaaaatacttgagtattgttattcaataggattgggtgtgggaatcatcatcttttataatcattttggaccgaaaaaattaaccaaggatccaacgcccattgaggttgaaatgagaaaatacgaaagagacataaaccagactttaatagatgggcataacagagatgacggaaaggtggatgtaaaatagaagcagtggcgaaatatgaaaggtagaattggaacaaaatgataggaaaaataattcttgcaattacaggaatcggggcaggtttcataatctctgcaggagtttttgcattaataacatcaacaggaataataacaagatttgcagacaaaactcatactgcaaaaagtatacaattatatgaaacaatagtaattgcagggggaatactttggaatatattctggataatggaatcccatttcaaattcacgggacagccggcaaaaatatttcagggaatcatgggactatgtcagggtatattcgtaggttgtcttgcagtggcactggcggaggccctaaacggaacagcaatctttgcacgaagggcaaaactgcaaatggggctaagtttcatagtgttatcagtagcggtaggcaaagtccttgcatcgttgctccaattctacaacgattgggtgaactaatgcttttgaatatgctgttgtgccggaaaattatttctcgcaaaatacaaccgttggtgagcaagctctccacgtctgtatttcgtcctaaatacgcatcgtttgtaggaacgcgtaaatatataatttaatggagaattgatatggaaagtgaagaaaagaagaaggcgtacaacgaatacgttgaaagaattacgccaaataacagtttgacaaaggatatgtggaatgctttttggataggcggtctgatttgtgttatgggacagatttggcttgagctgtttatgtattttggaatggataaggaggacagcgcaagttacactactttgattttgattttggaaagtgcaattctaacggggcttaatgtttacccgaagattgcaaaaaaaggtggcgcaggctgtcttgtcccaataacaggatttgccaacggggttgtgtctccggcaattgaatttaaggcggaaggtcacatattcggaattggagcgaagatttttaccatagccggaccagttattctttatggtattttttcaagttggatagttggaattatttatttgattttgaaggggatagggatagtctgaccggatgttaaaaaattaaaataaaaaatagtcaattaaagttttgtgtcataaaaaaactaaagaaaaatgaaaaataatactgatagtattttattagttgaacaattaagtctttgtgatataatgatgaagaattgtaaagaaaaggttaaatttaaataaagaatataaattttattgcaataaatatttagatttaaacgttttataaaatgtattccaattatatggaaaaatgaaaaaaattaaaggatttgttttaattaataatttagtttaattgttttcaatattagaatacggaaatcaggagagtgaggaaaacagatgaagaaaaagaatgtgatgggggaaaacatggaagcaggaacaaatgcagaatcagatgaaaaagcaggaacaaaaataaataaagaatcagatgcaaagaaaagtaagaaatttagaaaagaattccttagtcagaaacagaaagacacagcttttcttgtaattaagattatcttagtttgtatgtttgcaggtgcatattcaatgctgtatatttgggatttgtatacttttaagggaaaagtttatcctatgagaattgtagttccaacattgttgtttgtaagttcttcagcattaatgtttgtaaaaataaaagttaacagatgggttaattttgtcatatctattttggtaagcttaattttagtatatggaaactttgtaatgttacagaagtctcagggatacgaatataagcttgaaggggattatgttaaatacaatattatggttttatttatgatttttatggttatatttgcagttactaacagttttaaagttgcaattataacaatgaacattgtaaatattgttatgggacttgcaaatttctatcttgtacagtttagaaactcaggatttttggcagcagatattgtaaatataaagactgcagcaaatgtggcaggcggatattcttatagaatgaattatagagtgtatctgttccttataagttccattgcaatatgtttttttgcaactaagttaggcaagaacgtggtaattaagaagttctggagacttattcctatggcattggcacttttaatggtgattaatgttaatgacttagttcagtcaaaggaatatgttaaaatattgaaagtcaaatattttaagccacaggaaacatttaatactaacggtttttacataacatttgcaagaagtattaacgaccttcaggttaagaagcctaaggattattctgttcagaaagttgaaaatctggcagagcagtttaagggtactaaaactacagtttctaatgataagaaacctaatattataatgataatgagtgaggcatacactgattttatgtcttttgcggatgtacctttaagcgaagacaatatgcctttcttccatagtttaaagaagaatacattaagcggtcagatgtttgtatcagtttttgcaggaggaacagcatcaactgagtttgaagccttaacttctaactcaatggcatacattcctaatggcataacagcatatactacatatatcaactcacctatgacttctcttgcgtcaactttaaaggcacaaggatatggtggaataatagcaatgcacccttataagggaacaggatataagcgtaacaaggtttatcctttattgggattcaacaaattccttacaatggatgattttgcagaagacacagaaacatacggacttcatatttctgacaaagcagatatggaacgaattatttcagaatatgaaaactataagaagaacaacgataaaccgttctttatgtttaacgtgacaatgcagaaccatagtccttttgatgcagcaggagtatctaaagatataaaacttggttacaatattaacgcaccacaggcagttcagtacttaaatatgttaagaaagtcagatgatgcattaaaagaacttgttacatattttaaaaatgtaaaagagccaacattaataatcttctttggtgaccatgagccaaagatagaagaatcattctatgaggaaatagaaaaagactataagcttgatgaaatttatgagaacctaatgaagagaaacactcagttcgttatatgggcaaactatgatatgaaatcagataacaatatgtatataagtgcaaacagaatgagttcacttgtactggaaacagcaggactagcacaaaacggatatcagcagttcgtatcagagtttagcaaaaaagtgccaatcataacaaaaaaaggctacattggtgaagatggaaacttctacaaaacaggagacaaaacatcaccatactatgaatggatacataattacgacatcatacagtacaacaatatttttgatacaaaaaacagagtacaggatctatacaaaatagcacaataataaaaaacagagttcttaaaaacaaaaagaactctgttttttgtcacatatatattaattgtcaatagacgtaaaattatacttgtgatacaatgtggaactatagcacaaaaatgtaaaaaataaagaacaaaaaaacatacaaaacaaaataaaagtataagaatcaactgaaaaagagattgtgatattatataaaaaaatactcttattacgaagctatttatttaaataatgaagaaaaaggagagttttaacatgaaaaaatccttccagatttttaaacgtgacataggcagattatccaaaaacatagttgcactaatagttgtaatcggcgtgtgcataatcccttcgttgtatgcatggtttaacatagctgccaacaaggatccatatggcaacacagctaacataaaaatagccgtggctaataatgatgccggaacagaaaatgatatgcttggaaaccttgacgtaggcggtcagatagttgatacattaaaagagaatgacagtttaggctgggtttttgtaagtgaagacaaggcaatatcaggggttaagtcaggagaatactatgcagcaatagttattcctgataattttagtgaatcaatggtaagttttttgtcaggaaaaatagaacagccggagtttgattattatcttaatgaaaagaagaatgccattgcaccaaagataactgacacaggtgcaaatacaattcagcaacaggttaatacagagtttgtgtcagcggcggcaggcacagttgcggacatacttaacggttcagtttcaggaattggaactaagcttgatgacgttcaaaatgacattttaacaaagattagcacagtgtctgataatcttaaagaatatgaaaaggcactggattcttttaacaaaacagtggatagcagtaacaagctaattgaaaaatcaaaaaaatcaatggctacagtgaaaagcgacgctaattccggtgtaaatagcataaagaatggaacagacagtttaacacttgtacgaaatgacatagcagattttgcaaatgatttaggtacgggaatatctaaggcacagaatagtttggcaaaggtaaatactaaatcaggaataaatcttggaaaaataagttcaaaaactgaaagcattcacggacagtttcaggaaatgataacttccgtagaatctattattgataaaaatagcgaaatgcttacaactttaaaggaaattaacaagaaatacccttcagattcattaactaatcttattaatgaattagacagtcagaatagtaagtacaagactattttacaaaaattaagaacaggaagcgattctataaatgatgctacaacaacatctgttaaggcagtagaatctatttctaaaattatcgaaaagaatacaaaagacattcacagctcaaaggtaactgttgaaaacggaataatgacaggtctaaatacaagccttgatactttttcaaacattcagggtacactttcaggaattttaaaaggtgttggacctgcaacagataatgttgtaactttaatggaccagttagagaacagccttgacagtgcaaagaaagcacttagttcaacaggttcttccattaagaaagttcaggaaagattagacaaggctaatgtggacattagcgttgttaaaacttcaaagatatatataaaacttaaggatatgacaaatttagactcagataaggttgcatcttttatgtcatctcctgttaaattaaaaacagaaactttctattcagttgaaaactatggaacagcaatgacaccattctatactaaccttgcaatatgggtaggtggaattgttcttattgctattttcaaaatggaagttgataaaagtgaaaaaattaaaaatttcactccaacacaggcttattttggaagatggatgcttttcatcttagtaggatttgtgcaggcgttaattatatgtttaggtgatatttttatcttaaaaataaagtgccagcatccggtactgtttgttgtggcaggattagtagcagcatttgtatatgtaaatcttatttatgccctgtcattaacatttaagcatataggaaaagcagtaagtgtaattcttgtaattttgcagattccgggttcagcgggaacttatcctattgaaatgacgccgggattcttccaggcaattcatccgttacttccttttacttatggaataaatgccatgagagaagcaattgcgggaacttacggacattattatgtaaaaaatttagttattcttttaatctatgttcctattgccttgtttataggacttgtccttcgtagattattgttgaatttaaatagtttatttgacaaaaaaattgaacagacaggacttatgatttgtgaagaggaaggaataaccagggaaagagtaagacttttaactactgtgaaaatacttgcaggagaaaagcagtttagagatgagataaataagaaagtcgagcagtttgaaatatgttatccaaaactaataaagggtggattttttgcaatagttattataccgattgtatttttgattttaatgtttagtatcacatcaaaaatggtatttcttgtattgtggatagtgtctattatattaatcgccctatatttgatttgtgttgagtttatccatgagaacctgcttaacaagcaaaaaatggctgaaatgaccggtgatgagcttatagagcagttaaagaaacgtggtagaaagaacagtaaggaaggagatgaggactaatgctgaatatttttagaatatttattggggatttgaaaaaaatcagcagaaatgcaatagcgtggattgtagtgttaggacttactgtagttccatctctttacgcatggttcaatattgctgcaagctgggatccgtacagcaataccgaccagttaaaagttgcagtggcaagcgttgataaaggctatgagggtgacattattccaataagcttaaatcttggtaatcaggttatatcagctcttcgtgaaaatactcagcttaattgggtatttactgataaagaagatgcaattgacggtgtaaaatcaggaaagtattatgcttcaattgtaattccaaagaattttagtactgatatgatgagccttttctctgataatgtttctcattcggatattatttattatcttaatgaaaaggaaaatgccattgctccaaagataactgacaagggagcaagcgcagttcaaaagcagattgatcaggtttttacaaagacagtttcagagatttcaataagcgtgcttgatcagttgtcagatgttatggatgatgatacaacaaaaactgtaatgaacaaggttcagtctaatgtgcagcagattgcagatgacttaaatgatgcaaaacagactgtttatgcttttgctgaccttacaggttctttggaagaaatgttagacagtacatcaacattattaaaaacgtcaggagacagcacaaaggatagcgttaatactttaaaaacttcaagtactgatgtaacagatttgaaagatgccttaagtggaacaactgatggaataaacaaggcgttaaatcaaagcgtatctgcatataatcaattatcaaaagaagtggataatatttttgactcagtgtccacaagtgcagacacagcatcaaaaggtttaagtggtcttgcaactcaggtagatgacataacaaagaagtacactgaatttaaagaaagccttcagaaagtgcagaatgcattgccggcaaatgagaaagtgttaagaactgaaattgacaaaattattggtaaaatagaccagtcaattattcagcagaaggaaattagaacaaaattaaaagacgcttctgatgatataacattgacatcaggaacgacaactttatatagaaaagacttaaagaaacagataaaacaaagtgcaaaggatatatcttctattcaggattcttatgagaagaaggttcagactaacttaactaagttggttaattcacttactgtaaataatggctcagtatcaaaagttgtaaacaatttaaatcagggaacaagtgatgtaagtaagcttgcaggagattcaggagcacaacttggacagttaaagaagattcttaaaaattcaggtaaagcacttggaaaggcatccaaaaatgtaagcaatatttcatttaaattaggcaatagtgaaaacagcgatgcaacagaattgcttaaaaacatattaagcaacagccctgacacattaagtgcattcttgtcatcacctgtaaagatgaacacaaatgttatatacaaagtagataattatggctctgcaatggcgccgttctactcaacacttgcaatatgggtaggtggtattgtattagtagcaatgatgaaagtaacattagagaaagatcgaaagaaacaactattcaatgtgaaaaactatcagatatatttaggacgttatattttgtttatgataataggattgttccaaagtggattaatctgtttgggagatttgtatttcttaaagatacaatgtgagcatccgttcctgttcctattggcaggctggatatcaagcatagtatatgtaaatataatctacacattaacagtatcctttggtgatataggaaaagcaatctgtgtaatacttcttgtagtacaggtagcaggttcaggtggaacattcccaatagaagtagcaccaaaattcttcagaacagtatacccattacttccatttaactacagcatgggagcaatgagagaaacaatagccggaatgtatggaaacacatactggacagaaatatccaaactactattattcctcataccatcactgatactgggattgatactaagaaaaccaataataaaactaaacaacttcgtaatagaaaaactagaagaaacaaaactcatgtaactcaccaacccccggaacttccaggacacctgtgcttgcacaaaggtgtcttggaagtttcgggggtgccttattatgagcataaaagggcgacgaagtcgcgcgatatgcgaataatgaggacagattgcgggaacgcgaagcgtgtagcaatctgaggtgagttataagtagtagcaaggaacatacacctgtgcttgcacaaaggtgtcctggaagtttcgggggtgccttattatgagcataaaagggcgacgaagtcgcgcgatatgcgaataataaggacagattgcgggaacgcgaagcgcgtagcaatctgagtgagttataagtagtagcaaggaacatacacctgtgcttgcacaaaggtgagattttagacgagaatgttttaacggattttcactaaataaaggtgagaattggtttgatgcttcatcagttactagttttacgatattaaaaaaattttatttcatattatttatatataatcatatgcgagaataaagtgtcaactattatgatacaacatcacattaaaagtggcataataagattgacagaggcaaaggctgttttcccaacaaagttagatacgaaaagcccatcaacaacactgtaaatagatgtaaaaatcatcataacaattgatggtagtacgaatctaaataatttttttcttgactaaatatataaaatagtatatattacttaaataaatagttcacaaagtgaactactttaaaaagaaagaaataggaaataacagaaaatgaaagataaaaaatggaaagacatgatagaaaaacatggcgagcttagattctttagtagtatggcaataaagaaagcacacaaaggtcagggtacatcagcacaggaattggacatgctgtttagagtcgccttgtccaaagaaaaagtaacacccggttacttaaaagacgcaatgggcataagcaaaacaattataagcagattaatagaacaactggaaaacaagcagctcatagaaaaaatccgcacaaatgaggataaaagaagttatacattgataataactgaaaaagggaaaaaagaaattgatgatatgtattactactatttaaaccctctatatacgttaaagggaaatatgacagcggaagattttgaacaactatttaaattaataaggcaggcaaacaagatattggcaaaataaaccgccaacaatataaaatcgaaaatataaacaaaatctgcagctaataaaaattaaagaaagtgcttggaacccgtcggttcatcaaggcagcgtagtcggcttgatagaaccgctacgaggtggaagcagcgggagcgtgctttcgtaattttattagccgcagattagttaaaaattgtttaatataaatgaaaggaacagaagatgacgttttatcaggaattacagttaagctcaacaggctcaaaacaattaataaaaaacacaacagacaaaaaagaaaaaacaagacacattttaatttacaatttcaaagtatatttagttgtggcattttgttttttggtagtaacagcatttagtatgatttttggaaatgacaatagcgtgccgggagttgtggtactacttgcaatacttgtgttgcgacaggcagattttggcataaaaacaacccacggtctaatctcaatagccgggatatttgcaattttaatagtaggaccaaggttaagcaacatagttgatcctttaacagcatttcttattaacattgtttgcatatttttactaatgatgtttggatgtcataatgtaataatgtataatcattcaacttttgtactaggatatttattacttcaaggttacgatgtggcaggaaaaagttatcagttacgtgtagtcagccttgttgtaggtatgctaatttgtatgggggttttttataaaaatcagaaaaacagacctcataaaagaggttttatggatatttttagagaattcaatatacactctgctagaaataactggtatttaaaattaacacttacagtttcaacagccatgttaattattaatcttttaaatataccaagggcaatgtgggtaggaattgcctgcatgtcagtgtgtgttccgttttccagtgacattgcaccaaaggcaaagaaaagagcaccatttaacattgtgggcagcctaatatttgttgccctttactacgcacttcctaaatgggtacatccatacattggaattataggtggaattggtgttggttattcagccggctattcctggcagacggtttacaatacatttggagcgttgtatattgcctctggaattttcggtgtaaaaacagcagtattgttaagaattggtgcaaatattttcgctacattatatacagttatgtttaaccatgtatttaataatgtatttgcgtttataaaaaacagaaaagaaaatttaataacagaatagtaatgcttaaaacaaaaaatatagatgcataactaagaaatttaagagaaaaattctaactgcaatacataatacatctttcagtgggggcagttggcggacaaacaatattttggagtccaagcctaaaaggaaaagccccatatattgtaccgacctccaatcgttagatttttaggtctaacttttgggggtcggtacaatctcaggggcttttaatattaaatattatttattttcattatcttccttaggaacaactgtttccatattttttggaagaacaagatttaaaataattgatacgataaatactacagcaacacagttttctgcaaatacattttcgataatcttagggaaaatgctaaagatttcaggaacctgtgtgaagccgataccaatactaagtgaaagtgcggcaattgtaatattacgctgtgagtaaccgcagttgctaatcatctgaagaccgctgattacgattgtaccaaacatcataagtgtacatccgccaagtactgcgtcaggaagtgttgcaagtaaagcaccaaagattgggaagatacctgcaataagcataataattgcacctgttgcaatagcaaatctgttaactactttagtcatggcaacaagacctacattctggctgaaagatgtaattggtaaacatccgaaaacagaagataaagcactaatgaaaccgtcacaggcaatagaacctgaagtttcttttgttgttacgtccctatttaagcctgaagctgcaagagcagaagtatctccgatagtttcagtagcagaaactaagaaaatcaaaataacagagaaaattgcgttagcattaaattcaggtttaaaaggcattaatgaaggtactgcaacaatagaagttcctgaaagtgaagaaaaatcaacaactcccataattacagcaacaatatatccaacaataagtccaaacaaaacagaaagctgtttgaaatatgattttgccaaaatattaaaaataatacatgaaagcaatgttatagttccgagaatccagtttgtagctgaaccaaagttttcgcttccgcttcctccaccgaaagagcttgctccaacagagagaagagaaaaaccaatggaagtaacaacgctggctgcaacgataggagatataagtttaatccagtattttgcaaaaagaccaagaacaccttctacaataccgccaacaagaacagcacctacaatggcattatatccgtaagttggtccgatataacaaaaaatagaaacaaaagtaaaactaatacccataacaattggaagacctgaaccgattttccataatgggaataactgaattaaagtaccaatacctgcaataatcattgcactctggataagacgtgcagtctgcgcagatgaaagaccgctggcaccgccaacaataataataggagcaatattggcaacaaacatagccaaaatatgctgcaagccaaaaggaatggcttttccaacgggaacttttccgttaagtttgtaaatgttttcaattgatgaatttgagctactcattagtaaatgtcctttcataatttaaatatattgtgtaatcgcaaaacaaaatatttatgttttattatattaagcagaattgtatgaaagcaaacaataggcagatttttgcaattttgcgagcatagcgtaaggcaaaaatcaactgtctgagcgcaagcgagttttgatttttgtcttactataagcggcggagcaaaataagaaaatcaacgtgtttgcgttatacaattctgtgaaatatagggaaaaattttgttttgcgattaaaaatataaactataaaaaacgtggtgtttctcatagtttataattttttactgttcacggaatgtgattgttccgttttctgcatccatgctatcaacgatagcaagtgattccaagtgatatccaaggttacggattgtacgtccgcctgactgaaatcctttttcaattgcaatgccgattccttctacagtaccgcctgcatttgatacgatggagattaatccctgaagagcacaaccgttagcaagaaaatcgtctataataagaacgtggtcatcaggacctaaaaatttcttcgatacgattacctggtttttgcatttatgcgtaaatgattcaacttcagcaacatacatttcaccatcaatgtttatactttttgatttctttgcaaaaacaactggtgcatcgaagtattttgcaacgatgcaggcaatgccgatacctgatgcttctattgtaagaattttgttgattggggcattagcgaaacgacgtttaaattcttcgcccattttttcgaaaagtgaaatgtccatctggtggtttaaaaagctgtctacttttaaaacatttccttctttaacgataccatctttttgaatacgttcttctaaaaaattcatttttatctcctttgtaaaaattaattaccttttcagactccgctcacgcagaaatttctaaaaggaaacaataggcagagttttgaaattttgcgagcatagtgtaaagcgataaacctactgttcgagcctttaggcgagtttaggttttcgctttacaataggcggcggagcaaaataataaactcaacgtgtttactttagaaatttctgcgtgagcggaatgaaaaagtgctttgtttttatttgattaataattttttattgattcaaattcgtctacgatttctttttcaggtgcaggtgtaagtaagcttactattacgatgaagattgaagctacaatgaatgcaggtaaaagttcatagattccaagtacgccacccattggacgaactaagaatttccatacgaataccatgattccaccggctaccattccgctgattgcaccgtatttgtttgagcgcttccagaataatgcaaagagcattacagggccgaatgtggcaccgaagcctgcccaggcaaatgatactatctggaatactgagctgttaggattgctggcaagaaacatagcaattattgaaatgataattactgaacctctggcaactacgatttttactcctgctgaaaggtttaaacttaacacgccttcaagtaagttttctgaaacacttgaagatgcagcaagaagctgtgaatctgaagttgacattgttgaggcaagtatacctgcaaggataacacctgcaattatggcaaaaataatgccgtgtgtacttaatacgtgggctatctgaacgatgattgtttcagaatcctttaggttaggaataactccttctgctgacattgcataaccgattataccaattgaaactgcaacagacattgaaataacaacccaaacactggcaacacgtcttgaaagttttaatttctttgtgtcttcaatagccataaatcttaaaagaatatgtggcataccgaagtatccaagtccccaagcaagtgttgaggcaattgaaagaacactgtaaggcgttgctgtattagttgcaccatcatgtgttgaagttattgaaaggaatcccttaaggtcgccaacgtgagctacgactccgtcaaatccaccaacggaaataattccataacttaaaactataactaaggcaattgacataataatactctgaataaagtcagaagtacttgcggcaaggaaaccaccaagagtagtatatgcaacaataacaattgcactaataatcattgctgttaaataatcaactccaaataaagaattaaaaagtttaccacatgcagcaaatcctgaagctgtatatggcacaaagaaaataataataattatagcagatacacactttaacattttaggatctctatatctgttagcaaaaaagtcaggtatagtgattgcactgcaaacgtcactgtaagttctaagtcttttggcaacaataagccagttaacgtatgttccaacagcaagtccggcagctgtccagaatgcatcacaaacacctgtaacataagcaacacccggaagtcccattaataaccagctactcatatctgatgcttcagcactcatagcagtaacaagaggaccaagctttcgtccaccaaggtaaaaatcatttgtggtactgttttttttggcaaaatatacaccaataccaacaacgccaaccatataaacaatgatggcaattaaaattccaatttctgatgtagtcattttttttcccttcttattatatgtaatttttgaatttccttcctattgtataaaaaatatgtcaaataggcaagtaaaaacgtatacatatttataacaaaaaagtaaaaactaagaaaaaaggaggatttttatgggacgaatgattggtagtagcagtatttcctttgataagccaccgtttattattgaaggagcttcaattgtaggtcaaaaagaaggtgacggacctttaggaaaattgtttgatgttgtggaacaggatcctatgcttggacaggaaacgtgggaagaggcagaaagtttgttgcaaaaagaggcaattcagaaacttctatttaaagcagggatgagcaaggaagaaatcagatatatttttggtggggatttacttggacagttaattgccacaacttttggaattttggagttcgaggttccctttttcggattgtacggagcctgttcaacaatgggtgaagcgttaagtcttggggcagtaatggttgaagcaggaaatgcagacaatgttattgcaatggcatcaagtcattttgccagcgcagaaagacagtttagatttcctttggcttacggaaatcaaagaccttatgcggcaacctggactgtaaccggttgtggggcagtaataattagcacaaaaaaaggttttgcaaaaataacaggaattaccacgggaaaaatcgttgattttggagtaaaggatgctcaaaatatgggtgcctgtatggcaccggctgcggcagatgttatttatcagcattttaaggattttaacagcacaccggcagattatgacaaaatcataacgggtgacttgggattaataggaaaaagtattttgtttgaactacttaaggaaaaaggctacgacatttcggcggttcatatggattgcggcgtggaaatgtttgatgccagtgaacaggacactcacgcaggtggaagtggctgtggctgtagtgccacggttcttgcaggctatgtttttaaacagctaaaaaaaggggcatttaagaagattctttttattccaacgggagcattaatgtccccggtaagttttaatgaaggaaatagcgtgccgggaatagctcactgcgtggtgattgaaaagaattaatgattgcaattaaagaaaggaatttaagatgatttttttaaaagcgtttattgttgggggaataatctgtgctcttgttcaaattgtaatagacaagaccaaggtaacgcctgcaagaattatggtaagtcttgtttgcattggggttgttcttggtgcgattggaatttatgagcctttgactaagtgggcaggttgtggcgcaacagtgcctttgcttggctttggcaacaatctttggaagggaatgaaagaagccatagatgagtcaggttttttgggattgtttaaaggtggttttacggcaagtgccgtgggaatttcaggagctttaatattcggatatttgtctgcattaatttttaaatcaaaaatggaatagtaaaaattaactatgttttaaaaattcagcctgaacttaatataattaagtaaaaacaactttatcattacaaaattaagaataacactactaaaggttgataaaattaagaagatactatataatttctttagtgtattaaagtgttagtgcacttgtttaagtgcggcctttttaggagaaatatagaggttcgcgcaagttgtgattaagaaaaatatatttaaggagggctacaaaatgtcatatgtagacgaagtattagcaaaagtaaaagaaaagaatgctagtgaaccagaatttttacaggcagttgaagaagtattaaattcacttagacctgtaatcgatgcaaacgaggacaagtatagaagagaagctttacttgaaagaatctgtgaacctgaaagacagttcaagttcagagttccttgggtagatgataagggacaggtacaggttaacacaggttatagagtacagtttaactcagctatcggaccatacaagggtggtttaagacttcacccatcagtaaatattggtattattaaattcttaggttttgaacagatcttcaagaactcacttacaggccttccaatcggtggtggtaaaggtggttctgatttcgatcctaagggtaaatcagatagagaagttatggctttctgccagagctttatgacagaactttgtaaatatatcggtgctgacactgacgtaccagccggtgacatcggaacaggcgctagagaaatcggatatatgtttggacagtataagagaatccgtggattatatgaaggtgttcttacaggtaagggacttacatacggtggttctttagctagaacagaagctacaggttacggattactttacttaacacaggaattaatgaaagaccatggcgaaagcatggaaggcaagacagtagttgtttcaggtgccggtaacgttgctatctacgctattcagaaagctcatcagatgggtgctaaggttgttacatgttcagattcaacaggttggatttatgatcctgaaggaatcgatgttgaccttcttaaagaagttaaggaagttaagagagctagacttacagaatatgctgctgcaagaccttcagctgaatatcatgaaggacgtggagtatggcagattaaatgtgatatcgctcttccatgtgctacacagaacgaattacttatcgatgatgctaagcagttagtagctaacggatgtaaagctgtttgtgaaggtgctaacatgcctacaacaattgatgcaacagaatacttacaggaaaacggcgtatggttcgttggtggtaaggctgctaacgcaggtggtgttgctacatcagctcttgaaatgtcacagaacagcgaaagactttcatggacattcgaagaagttgacgctaaattacagacaatcatggttaacatttaccgtaacattagcgatgctgctaagagatacggatttgaaggtaactacgtagtaggtgctaacattgccggatttgaaaaagtagcagaagctatggaagctcagggtgtttgctaattatagttatagttaataatcaatatataaaggtgtatctcattatgggatacaccttttgtgatatatggaatataaattctaaatagggggaaaatatataggtagtcttgtgaaaaatgttaatattgtttataataagtcagggattggaaaactattacaatattatttaataattattttatggagaatagaatggacgagaatttaaagaaggaaatagaaaacagacgaacatttgcgattatttcacatcccgatgcaggaaagactactttaacagaaaagtttttgctctatggaggtgctattaatacagcaggttcagtaaagggaaaggccaattctaagtatgcagtgtctgattggatgggaattgaaaaagaaagaggtatttcagttacatcttcagcgcttcagtttaactatgaaggatattgcattaatattttggatactccgggacatcaggacttctcagaagatacttatagaacgttaatggctgcagattcagcagtaatggttattgatgcttcaaagggtgttgaggcacagacaattaagctttttaaggtttgtgttatgagacatattcctatttttacttttattaataagatggacttggaagcaagagatccatatgaacttcttgaagaaattgaaaatgttcttggaattaaaacatgtcctattaactggccaattggttcaggtaaaagatttaaaggcgtgtatgacagagatactaagaagatttcaatgtttaaggcagtttcagttggtggttcaaaaagtgctgcggaaacaacatatgagttggacaacgaaaactttaaggcagaaataggtgatgaattgtatgaccagcttgtagatgacactgaacttcttgacggagcaagcgaaccatttgatcaggaattggttgataaaggtgaattgtcaccggtatttttcggctcagcgttaacaactttcggtatagaaacatttttggaacatttcttaagaatgacagaatcaccacttccaaggatgtcagatcagggattaattgatcctattgaagaaccattttcaggatttgtatttaagattcaggctaatatgaacaaggcacatcacgatagaattgctttccttagagtttgttcaggaaagtttgatgcatctaaggatgtgtatcacgtacaaagtggtaagaaaatgaaactttcaagacctcagcaaattatggctcaggacagaaaggtaattgatgaagcttatgcgggagacgtaatcggtgtatttgatccgggtattttttcaataggtgatacaatctgtacaccgggcaaaaaatttgtttatgaaggaatcccaacttttgcacctgaacatttctgcagacttgtggcacttgattcaatgaaacgtaaacagtttatgaaaggtgttacacagattgcccaggaaggtgcaattcagattttccaggattacaatcttgaaatgtcagaaattattgtaggtgttgtaggtacacttcagtttgacgttttgaagtatagaatggaaaacgaatatggctgtgatgtgagattggagccattgccttatggacacatcagatgggtaaaagatacaacaatagatttaaataatgttaaatgtccaagcgatgccaagagagtaaaggatatgaagtgcaatccattagtattatttacaaaccagtggtcaattaaacttcttttggaaagaaatgaaggcattgaatttgaagaatttagcagaaattaattttgtacaagattaaatatagaagggaatgagttatcatggaaagaaagaatgcatggaatacttatggcaagagagaaataagtgagttggaagaattaaattctaactatattgatttcctgtcagactgtaaaacagaaagagaatgtgttaaggaaactgtaagacaggcaagggagaaaggctacaagtctttagaagaagtaattgaaaaaggccagcctttaaaacagggagacaaagtttatgctgtttgtatgaataagacagtagcactttttaacattggaaagattccaatggaacagggaatgaatattttgggagcacatattgattcacctagaatggacattaagcagaatccactatatgaaagtaataatatggcataccttgatacacattactatggcggaattaagaagtatcagtgggttacacttccacttgcaattcatggcgttgtagttaagaaagacggaacaaaggttgaagttaacattggtgaaaaagataccgaccctgtattttgtgtaaccgaccttttaattcatcttgcaggacagcagatggaaaagaatgcagctaaagttattgaaggcgaaaaccttgatattcttgttggaagcattccacttgaagacaaagaaaaagatgctgtaaaagaaggaattataggtattttaaaaaacacctatgaaatggaagaagaagattttatgtcagcagaattagaagtggttccggcaggaagagcaagagaaatgggatttgacagaagtatgattatggcatacggtcaggatgacaaggtatgtgcttatacttcgttagcggcaatgcttgaaacggacaagattgacaagacagcatgttgtttattagtagataaagaagaaattggtagtgtaggtgctacaggaatgcagtcaaaattctttgaaaatacagtagcagaattgttaaatcttaatggtgattacaacgaacttaaacttaagagatgtctagcgcattcaagaatgttgtcatcagatgttaacgcagcttttgatccattatattctgatgtgttcaaaaataatagctcatcattcctaggttcaggcgttgtatttaacaagtttacaggttcaagaggaaagtcaggttcaaatgatgctaatgctgaatatcttgcagtattaagaaatataatggataatcataacgtacattttcaaatgtcagagcttggaaaagttgacgcaggtggtggcggaacaatcgcttatattatgtcactttatggcatggaagtaattgattgtggcgttgcagtattaaacatgcacgcaccttgggaagtaacaagcaaggctgatatttatgaaacatacaagtgctataaagctttcctaaagaatgcataattaaggaataagattacaaaggaatccttcggagagaatattagtgaatatattcttttcgggggatttttttagattaaacaaatgttgatagaaagtaggattacaatataatcagaaaaaacaagaaattctatgtaatccccctacaagataatgcgcaaggcgaagaattgcaataaaaaagcagaaccctcatcagagaatcctgctttcaaaaagtcgtacatattaaattgtatatataaagttcttataataacaaactataaatgcttagctattttcctgaagttttaccggagtccttagaacttgatgatcctgaacttgatttgcttgttttagaacttcctgaatcggttctacttgaacttgattttgaactattagaacctgactttgaattgccggagcttgagctaccggattttgagccagagccatttgattcggaactacttgaacttccggatgaacttgaactgtttgaatagcttgaactcttttttgaaaaagctgaatgataagtacattttgcaggctgtgtacccttggcaaaatattctgattttgatgtaggacaaactcctttaattgcaacttttcctgaagaagagcagatatcatatttcttaacatctttactcattttaaaacttttagctttgtatttcttgactgagtcaatttgattcattatcttagcccagagtctttcgtgatacgcctggtcaccgctaagagatacgttttcatcataacctgtccaaattgatgctgtaagatatggtgtatatccacagaaccaaaggtcatattcacttgatgttgtaccggttttaccagatacgggcattttgccatcaagtttagcacttgtacctgtaccttctgtaataacgcttgtcataccctgtgtaagaaggcttgcagtagaagctttcaaaacagtatgtgtagtaggagtagtgttatcaagaaggacacgtccattgctatctataacctgtgaataaaaaacaggtcttgtataagttccctgatttgcgattgttgcatatgcagcagtcatttctaagttagtaacaccgtctgtaataccaccaagtgccaaagcctgctgaatgtcagatgaaacagaaccatttttttcaacacggttatcaactaaagtagtaataccaaaattgcaaagataatcatatccaagctgtggtgtaatatctgtaagtgtttttacagcacaaatattcatagaatcagcaattgcctttcttactgtaactttgccacgataaccactgtaccagttcttaacagctcttccgttagaataactgaaaggctcatccacgatagtagtggtaagtgtgtaacccatagtatcaatggcaggtgcgtaagctgataaaattttaaatgttgaaccgggctgtcttgttgagtctgtagctcggttaagagaaagactaacattcttctttccacgaccaccaacaacggctttaacatagcctgtgtactggtccattacagtaaatgaaacctgtggctgaggattgtaataaagattttcgtattgggcgtagcctttatccttatcaattccttttttgtaatacttgttcataaggtgcattttgtatgccttaacacaagcttttgcttcttctttagaactaaaaatcaatttaaaacttgattccttcaaagaatttctatgataattcaaaatatctttttcactgtaattgtcaactgaaccgtcaggattttgaactgaccatgcccagttaattgagtatttaatagcgtaaggatagttggctgagtcagacaattccttatcacatattttttgaatatcagaatcctgagtagtataaatctttaaaccaccgctgtatacggcattgtaagcctgagtataagtatagcctttctgttcctgaaggtctgaaagaacctgctttacaacctcatcgacaaaataagaatatacctgatcatcgctttttgtaagcttgttgttgactttttttatacgggcataaacattatcactcatggcttcgtcatactgttcttgagtaatatgccctgcatctttcatgttagtgagaatcttttttctacgtttggcattttcgtcaggattagtaataggattataaagtgacgggttctgagttatggcagcaataacgcctgcctcagaaactgtaatcttactaacatccttattaaaatatctaagtgaagcagccttaacaccaagggtatttgaacctaagttaatagtgttaagatatgtttcaagtataacgtcctttttggtaactttttcaagctgaacggcaaggtactgttcctgaatctttcttttaagagaagaagtaagggaatcttcttcagtccagcttgtaaatacgttgttctttagaacctgctgtgtaatggtactggcgccttctgacggattaagggtagtaagtgctataaaagccgcacgaccgataccctgaatgtcaataccgttatgttcataaaaacgtgcatcctcagtatcaataaaagcccatcttaaatgttccggaatatctttcaaatcagccttaatacggttagagccggaagtgataagcttagcaatctgcttattattggtgtcataaactgttgttgaatatgacgatggaacaatagaaatattttccacggaaggagcacttttaataatgccgtgtataacaccaagtccgaaaaaacctccggtaacaatggcaaggcatataatgtaaagaaatactttaagtgcagaaaccaaggacttagaaacaaccttcttttgtaatgaaacaagttcacgttgtttgtctattgtttctttatattcaaaattcattggcaaacctcctattcttttagattataacaaaatgcagtaatttaataaaggggaaaaatgtcgcagaaaatgtaagacacagaatcttcaaaaaaattgatacttatgttattctatatacaacgcgtttggttggtaagggggacaattaaaatgaaagcgtgcttttgttgtttttcttctctacacaacaaacaagaaagggatagaattggaaaaatttataataaaagaaggcggtcagggcgaaattgttgagaagaagtccagatttattgccactgttttgccaatagatacagaagaagaggcattacaatatattgaaaggataaaaaagaaatactgggatgcaaggcacaattgttttgcatttgtaataggaagtaacaatgaaattcagagatttagtgatgacggcgagccacagggcacagcgggaaaacctattttggaaacattgctaaatgagaatttgcataatactttgatagtggtgacacgatattttggtggaactctccttggaacaggcggtcttgtcagggcttacggccagtcatccaaggaaggtattagaaattcggttattcagaaagtttgtgaaggtataagttttaaacttacggtggattataatagtatagggaagattaagtacattatggggcagatgggaattacggatgctcaggaagaatacggtcagaatgttgttttaagcattttaatgaaaaaagatgaatataatgaatttaatacgaaagtaacagatgccacaggagggaaagctgtttttgaggatgaagaagacagggagtacagagaagaggtgaaagaaaaataattttattgaaaacatatcatctatgtgataaaatgaacatttgtgaagctataaacaagtattttatgattatttaataggaaagagaagaaatgattagagaagacgtaagaaatattgccattattgcccatgtagaccatggtaaaacaacattggtagatgaattattaaaacagagtggtgtattccgtgaaaatcaggaagttgctgaaagagtaatggactctaatgatattgaaagagaaagaggtattacaattctttcaaagaacactgctgttacttataagaatacaaaaattaatattattgatacaccgggacatgctgattttggtggagaagtagagcgtgtacttaagatggttaacggcgtagttttagtagtagatgcatttgaaggtgcaatgccacagacacgtttcgttctaaagaaagctttggaacttaaccttcctgttattgtttgtattaacaagattgacagaccggaagcaagaccagaagaagttattgacgaagtattagaattatttattgagttagatgctaatgaagaacagcttgactgcccatttgttttcgcatcagctaagcagggatttgctaagttaaatatggatgacgaatcagatagtatgcagccattatttgaaacaattattgactacattccagctcctgaaggagatgagaatgcagatactcaggttcttatcagtacaatcgattacaacgaatatgttggacgtatcggtgttggtaagattgacaatggtaaattaaaagttaatcaggatgttgttttggttaaccaccatgaacctgacaaacagaagagagttaaaatcagcaagctttatgagtttgatggtttaaataaagtagaagttcaggaagctacagtaggtgctattgttgctatttcaggtattacagacattcatattggagatacaatttgttctcctgaaaatcctgttgcaattcctttccagaagatttcagagcctacaatttctatgaactttatggtaaatgacagtcctcttgcaggtcaggaaggaaaattcgttacatcacgtcatcttcgtgaaagacttatgagagaattaaatactgacgtaagtttaagagtagaagaaactgaaaacatggattcatttaaggtttcaggacgtggagaacttcacctttcagttcttattgaaaacatgagaagagaaggatacgaatttgctgtaagtaaggcagaagttatttacaaagaagacgaaagaggtaagaaattagagcctatggaaatctgttacattgatgttcctgatgaattttcaggtgcaatcattgaaaaattaagtaacagaaaaggtgaacttcagggaatggcaccaattaacggtggatttacaagacttgagttttcaattccttcaagaggattaatcggatacagaggtcagtttatgacagatacaaagggtaatggtattatgaatactgtatttgatgattacggtccatttaagggagaaattcagtacagaaaacagggttcacttatcgcttttgaagccggtgaagcaattacttatggattatttaatgcacaggaaagaggaacattattcattggacctggcgaaaaagtatattcaggtatgattgttggtcagacaggtcgtgctgaagatattgaagtaaacgtttgtaaaacaaaacatctttcaaacacaagaacttcaagctcagatgaagctttaagattagtaccaaagaaagtattaagtcttgagcaggcgttggaattcattgatactgatgaattacttgaaatcacaccagaaaacttaagaattagaaagaaaatcttagatccaactcttagaaagagagcaaacattcgtaagaacaacaaataagaggttggaaagaagatattttggaaaaataaatatattaaaaaataaaaaaagcttccttctaaatgcaggttaaattggaacttgcaatttaggagggagctttttttgataaatctatactgaatggaatccctttccaatgatttcgcttgtatttgaaatcaataggaaggctccaggtgagttttcttttatgaagtttctaagttttactgcctgagacggacttaaaactgtaaggattatgtatttgttgtcgccggtaaatgagcctttggcgtttacgattgtggctccacggacaaggtttttttcaataaaattgcatattggcttaggatcggagcaaaccacatgaaagtattttgagcggttcaaactttcaataaagttgtcaataagtgcagaacgcataatcaaaccaagcaatgagtaaagtcctgtttttacatcaaatacgaaaaaggcgcaaagcgtaaatagaacatcggaaatcataagtccacgaccaatatcaacacttgtgtatttcttaagaaccattgcgataacatccgtaccaccacttgatgcaccaatattgaaaaggattgctgagccaagtgcaggtaaaagaattgcaaaaataagctcaagcaaaggttcattagttaaaggatggctcattggataaacacgttcaaacaatgacagagtcacagacaaaagaattgtgctgtaagctgtttttgcagcaaaacttttgccaagaataatccatcccactacaagtaacagaatgttggctacaaaagaaaaatcactggctgaaagaggagtgaactttgcaaccaaaactgcaaaacctgtaataccaccaaaagtaaagttgttggcgaatttaaagaagtaaataccaacagccataatcaaagtactggctgtaagcaataaaaaatttttaaaatttgctttcataattttttccctttaagtatattttttacaaaaaaattgtaacgttgtgagattgtaaagtcaatgagtatttaaaggaaaaataagcaattaagataaaaacataaaaataattaataagttaatttagcaaaaaacaattccaagcacagcggaaaacaaaatcattaaaataggtgtcaaagtttttttgaaaaaatgtttgcttaaaaagtgaacagctatcaaaatcacaaatatcaaaacaaagctgtaattaattgaaaaaccatgacctaaactttcgaaattaaacaaagttgaaagtcccattattacagcagttgcaagaatcattgcaacaacacaaggtcgtacgccggacagaaaagctttggtaccggaatatttcattagattttttagaactgccgcaattaaaagaagaataataaaagcaggcagaactacaccaagagttgcaaaaaaagcaccaggaaaaccgccctgagaggagccaacaaaagttgcaagattaactgcaagaggtcccggagttgactcggcaactgcaacaaaactcatgaacatatcctcagaaagccaatggttggataacacgatttccctcattaaagaaatcattccgtaaccgcctccgaaagataatgttcctattataagaaaattgataaaaagctttaaataaatcattttaaactcctgttaactaaaaaagaactatttcaaatagtaaaaattatttgtaaagttaaagttattaactatcgctgaatgtttttcttaaagaaatatactatcacgccaacgcccccgcaaatcaaaatataataaattgatgaaaaagaagttgctgtaatggaaaaaataaccataataattgtaacaattaaaataatcaaagtattaaacagattcctctccaaattctttaacattcgaatacctgcagtaagtattaaataaaccacgcaaacttgaatgcctttaaaagcacaggtaatataatgtagacttaaaaattgattaaaaaataatgaaatacaataaattacaatgaaagaaggaatgcatactgcaagggttgcagcagtagctccgtaaaatcctgcaacatgatatccaatataggtggcgctgttaactgccataggaccgggcgtggattcagcaattgcaatcatattaagaaaatcatctttttcaatccatttcttcttatatataaactcactttccaaaagggccaccatagcgtaaccaccaccaaaggtaaaggcaccgatttttagaaaggtcaaaaacaaagtaagagttttatcaaaattagaatgtttcataaaacctccgaaataaaaagtccattaaaatatttaataaaaatttttgcaattaacatcgagatattaattactacttaattcaaaacaccataagtataccatacataaaaattagaaacaaacaagtgtgaaataaaaaaaaaattaaaaaaattagcactcaccccttgacagtgctaac

SEQ ID NO: 12764 - DNA, 142079 bp, Unknown
  gut microbiota DNA sequence
agtcagaacgaaggaagagataaagatttaaagaaataattaaagattcaagctttaaaatctaaatcaaattcgttagttcagataatcaacacctcggatttctccgatagtgcaattacaaaatttatatctattagacgaaaggagatatgacttatgatgatgcctagtatttttggagaaaacttatttgatgattttatggacgatttttcattccctacattacctgatgtagacaaggaattgtatggaaaacatgcaaagaacctaatgaaaactgatgttaaggaaactgatgacggatatcaggttgcagttgatcttccgggatttaagaaggacgaaatcaagattaaacttgaaaatggtacattaacaattaatgcagccaaaggtcttgacaaggacgagaaggataaggaaggtaagtatgtaagacgtgaacgttatgcaggaagtatgagcagaagcttttatgttggtgaacatgttacagcagaacaggttcatccaaagtatgagaatggtattttaaccttcgaaatacctaagaacaaagaaccaatcgaagaaaaagaaaagttcattgctattgaaggataacatcttaacaaaataaagaaatccccatatcgacttagtgttggtatggggatttttctgtgttataattagctacaaataattatgttagtatgattctaaaaaaatatgtagaaattgggaaaatagtgtgttagaagcacggaggtgaaaaatgagtcaatttaggaatattgttaaaaaagcagtagttataggactttgcatttgcactttttctgttcaggtaagcggtgctacaccatggtcatcagccaatggaattttttatgatggaaatggcaatgaaataaaaggtgcaatagctaaaggaattgatgtaagttatcacaacggtgacattgattgggcaaaggttaaggcggcagggattagttttgctttgcttagatgtggatatggaaatgatgaaagaaatcaggatgacataaagtttgtgcagaatgtaaaaggttgtgaggacaatggcattcaatatggagtttatttgtattcatatgcagttgacaatgacaaagaaaagactttagaagatatggctagaagtgaggcagaacacgttcttagaatgatagaagaagccggagctaaacctacaatgcctgtttattacgatatagaggacaaatctcaggttggaatgactgctaagcagtatggggatatggctgaaattttttgcaatattgtaaaaaatgccggctataaggttggtgtttattctaactattattggtggaccaatagacttactgatttaagatttgataattggggaaaatgggttgcaagatataataacacaagtgaatacaacaaagaatatgatatttggcaatatactgagtcaggcacggtagatggcgtgggaagtggaatggatgttaatattttgctttcaagaccttgcagtattacaggacatcagtatgaattttatcaattagtgtcaaaatcaacaaccacaataaatggaaaagctacatataaatgtaaaacctgtggtcacattaaaacaacagacatagcaaaaattagtcagataacaatttcaaaaacaaaatatgaatatacaggaaaagcctttaaacctacagttacagtaaaagacagcaacgggcaggtaatttcaactcagaattataatataatatattcatctaacaaaaaggttggaaatggcactgtaaagattgtttttaaaggcaattatagtggcacgattacaaaaatatttaaaatagttccaaagaaagtaagtcttacaaaggcaaccaatattaaaggcaaaaaagtcaaattgggttggaaaaaggtatcgggaatatccggttacgaaatccagtatggcacaaataagtcttttaagaaggcaaagacaacaacagccaagtcttctttgaaaacaaaaacaattaaaaaacttaaaaataaaaagaaatattatttcagaatgagagcttataaaaaagtatctggaacaaaagtttatggagtgtatagttcaaagaaaacagttaaaattacaaagtaattattaaagccggtgcagaaacatgtttaaaattagacgcgatattaattgataatgttgatatttttgttataattaaagaagcgggaattaaatttttgaacgggaatcaaagattttttagacggaggaattataatggaaattaaagaaattttaagcaaggtggatcatacattattaaaacctgaatctacttgggagcagattaaggagatttgtgatgacggaatcaaatatgaaacagcatcagtttgtattccaccatcatttgtaaaacaggctgctgattatgtggacggcaagattgcaatctgtacagttattggtttccctaatggatacaatactacagaaatcaaatgtgcagaagcagcacaggcagttaaagaaggcgcagcggaaatcgatatggttattaatattggatgggctaaagaaggaagatgggatgacattttctgcgaaatcaacaagataaaagaagcttgtgacggcagattacttaaggtaatcgttgaaacttgtttattaactgatgaagaaatcgctaaggttgctaatgtagtatcaatgtcaaaggcagatttcattaagacttcaacaggtttctcaacagagggagcaacattccatgttgtaaaaatttttgcagacaatatttctaacggaacaaagattaaggcagcaggtggaatcagttcattagaagacgcagaaaagttcattgagcttggcgctgacagacttggaacaagtagaattgtaaaaatcgttaagaacgaaaatgcaggtgccaatgagtactagaaacttttgtggttctggcaatattggagtggttgcttatagtgaaaataagcaaagaaaaataaagactgaaattagaagagattgtactaaaatggtacagtctctttttttgactcaaagttgataaaaaaatgtgttgacttaatacaatccgtatgatataacttgaattgtattaattgtactagttgcaatagtacaatgaaaacaaaatagagagtaggggagaaaactatgctagagacaagaaatttgaaaaaggtttataagaccaaaaagggtgtgtctgtaacagctttaaatgacgtgtctattaagttccctgaaaagggtttggtttttcttttaggaaaatcaggtagtggtaaatctacattattaaaccttttaggtggacttgataaatatgatgaaggtgaaattattattaagggagtttcatctaaagactttaaacagagtcattttgattcatatcgtaatacatatgtaggatttatttttcaggaatacaatgtattagaagaattttcagtaggagctaatattgctttggcaattgagcttcagggaaagaaggctacagatgaagaaattaatagaattttaaaacaggttgatttggagggctttggtgacagaaaacctaacgaactttcaggtggtcagaaacagagagttgcaattgcaagagcacttgtaaaacagcctgaaataattatggcagatgagccaacaggagcacttgattctaacacaggaagacaggtatttgaaacacttaagaatttatctaaggataaacttgtaatagtagtatctcatgacagggagtttgcagagcagtttggtgacagaattatcgaacttgcagatggaaatgtaattgatgatgttactcgtaaggttgggtatgaaaaacagggtgaagaacttaataatggtattagttttgaaaatgacacaatgactattaagtcaggataccatttaacagaagaagatagagaaagaataaatcagtatattgacggtattggaacagacttaaaggctataattaaaaaagcagataggggaagtttccagcagactaacgaggaagatattgttcataagaaaggcgattttaaacttattaagtctaaattacctttgaagaatgctttcaaaataggggcaagtggtttaaaacataagaaaatcagacttgtagttacaattttactttcatttgttgcattttcattatttgctttggcagatacttttggaaactacaatcatattaaaacatgcactaattcaattaaagatacgaacataacttatgcgtcagttattaagtcattaaaaatcggttcaggaatgaacgcatactggagcgattatggcaacagcattagagaagacgaaataactaagttaaataaagatacaggacttgattttacaggagttgtcgttacaaatcaggatatggttttacctaattataataaggaagttgaattaacaaagaatggtgatatgtgccattatgcaacagatttttcaggctatgctaatttgacagaagcaaaaatcaaggaaatgggttacaagattgttgcagggaaattgccaaaagacaacaatgaaatagcaattagttcttatgtttatgaaacatatgccaaagcaggatatatttcagaagatggtacaaagtctgaaataaaatattacaatgacttagttggcaagaaacttaaaattgccaagaaggaatttactgtagttggtattgttgatacaaaggttgatatggatagatataagtctatttcagaggacagcaagggcaaaacatcagcacagaatttgactgattttgccttaagtcaggaactggcacatattcaacagtacagtttggcttgcgatatttttgtaagcgaggtaatgcttaacagcatcaaggaagaatatcctaattatgtacagttaattactaactatatgtacgtgtcaagtgatgatacatatattgattcttcaagaattgcgtcattaagtgaaattgatacaaaagatgtaacatgggtcgatggtgaaaagactaaacttgctgataatgagattatcatagatatcaatgcattatcaaaaaatgatgaagaaggctattcttacagtaaaaaagaagcgttgaagattttgaaagacagccagtacacattggattattatattgataatgaagataaatcaattaatggagttaaggtagttggtgtgctaaatgcagatggaaaagcagataaatattcagacctttatgtacttcctgacagtctttataatttaaaatggactgaaggcaagggcgaatattcatatgcagttgcaacaatgccaacaaacaaggcagatattgaaaaacttgtaaaatattgctacacagaacagggcaatatgaaatatcagattgaaaactcagtaacttttgaactggacacagttaatgaagttttgaaagtaatgtcaaaggtattcttatacattggtattggttttgcagtatttgcaatgattatgttatctaactttattgcaacaagtatttcatataagaagcaggaaatcggaattcttagagcaatcggcgcaagaagcaatgatgtatttagaattttcttcttagaaagttttattattgcaatgattaactttgttctttcaacaattggaacaggtgtggcaacagcaataatcaacggtatgtttagaaaagaagcaggaatacttattacaatacttaattttggaccaagacagatactacttttacttgtaattagtattggagttgcggcagtggcaagtttcataccggtttacaaaattgcatcaaagagaccaattgaggccattagaaatagataagagttaaaggattaagtgtcgtttagtgcggcactttttctttttttgtttatgttataagtttctgttatgagtgtaatctgagcgaaaaatttctgctttaagtataatctgagttataaatttctgttcccggtgtaatctaaaaaatgaggagttgagttttttataccttactatatctacagacaataaatattagttatacaaacaatttgacacttgaaaaacatatagtggaattttataatgaatacatcgactacatattctataatgtcgcataatgtcagggggatacattcatgacatacgaacagtttatagaacaggtaaagtgggaagtagaagatatagcaagagagtcttttgatgacgtgagaacagttgtaagaacggttactaagaataacaatgttcgaagaaagactataagcatttttaaagagggacagttggctacaccgacaatttacctgagagattattatttggattataagaaaggaagaagtatcgaaaacataggcagagaaatctttatgatttattctgaaggtacaaaaagatttacttttgatgtgaatcagttttctgatttttcgaaagtaaaggacaaaatctattataagcttgttaattacgaaatgaacagacaggcgttaaaaacaatgccacattttaaatttttggatatggcaattgtgtttttcgtttcgattatgggcaatgagaaggagcaggggacaatagcaattcagaatgcttatgttgaaaagtgggggattagtaaggaggagttaagaagaacggcaataaataatacttggaaggaatacccgcctgaaattaagaagatggaagatattatatctgaaatcgttttggggcaggttacatcagaagatgatgacgaggacggattaatttcagaagaaatcagttatggtgaatttagtattgataatgttcgccaaatgataaaagaagaagttgataaaatgcgggcacaggcagaaatggatatgtatgtgctgactaatacatcacgtaactttggcgctgcatgcattacatatccgggagttttaaaggaatttgcaagagaacacaatagtgatttctacattattccaagttcagtccacgaagtgatattaattctgggagaacagatgtctgtggaagaaatgaatctgatggtggaagaagtaaatgaaagagaagttgattccatagatgtattgtctaaccatgtttatcagtataagagagaactggaagagataatatactaggattatgttgaaaaatggcttattgaatctgtggttatgcagatgtggaagacattggaacacactcggatataagtataaaagtggagtgtaagcttaataatatgcgaatattcgtgtagtcaagatttaggtgtcttaacatctaagtttattagaaaacaacttcgaaaatgaaaaagctgtggctttggcaacacacaatggttgttggagtgcagcttttttgtataaggaatcctcccaactacgcctagtccctccttatctttacgggtggcagacgcatttaaaacgaacttcgttcgtggcgtctgctaaagtcataaggaatcctcccaactgtgccgggttccttcttatctttacgggtggcagacgcatttaaaacgaacttcgttcgtagcgtctgctaaagtcataaggaatcctcccaactatgttgggtccctccttatgacaaatacgcacctggcgggaatcgaacccgcattttcgtctccggaggacgacgttctatccattatactacaggtacaactccctaattatacattaaatggactaaggtatcaataagaagatatgtagaacaatgtcagtgcaattaaatttaaaatatatcatagtaaatatcattgaaaatgtcagttagtttattgcaagtttatagttgtcttaaaactaaagttgaatttataaatgatatttgataaactaatggggaattatttttgagtacaaaaagaaaagattaaatatagggtaaggagaattaaagtggaaactgaagagaagaagttaacaagttcagaaatagaccagatgcttgaagaagcggcagcgtatcacgtggagtctaaagagccatctaataaaaacaaaaaaaataagaagaaaaaaaagaaaagaaaacaaataagatttgacattatcattgccattgttttggcagttgtagttgtagtgggagcagtttttgcaattagcaagcttgcaggtaagtcttcatcagctagtaagaagagcaatgtggagaatccacttgaagatgacaaatatgatgaaattactgacgttgtaaacaattatcttaacgcatatttagttgaagattcacagaagagattagatattcttgcaagatacgttgacaatattggagaccttagcgaaagtgatgtagcacagaagaagtacattacaagctattcagaagttgaatgttatacaaagaatggtccttatgacaacacttatgttgtttacgcatactaccagacagaatacaagaacatttcaactaaagtaccaagccttacaacatattatgtaattagagatgcaaaaacaggaaatgtttacattcataataagtggagtgatgaaataaaagattatatttcaaaggtttcaaaagatgctgacgttcagaaattaatttcagatgttcagaaagaacttttggaggctgaaaagtcagatgctaacttaaagaagttccttgatgctctcacaggaaaaacagaggaaacaactacagcagctcagaaagctactcaggcaactacacagccggcaactgccaagcaggaacagaagacaacacaggcaactaaacaggctgccacaactaagcctacagttactcagaaggctacaacagctaagcctacagaagcacctacaacaacagctgaggcaagaattaaataagaccaaggtcttaaggagattaatagttgaataagaaatgttatatagttggtgccggagataattccggcaccaacttttctaaaggaaaagatgaatatgttatagcggcagacggtggacttgctactcttgaaaagttgggaatacagccggattttattttaggagattttgattctttaggctacgtgcccgatggaaaaaacatagaggttcacaaggtcgaaaaagatgacacagacatgatgctatcagtggaaagagccgtagaatcaggttacaatgaaatagagattttcggtggcacaggtggacgaatagatcatacagtggcaaattttcagacaatgctttgggcatctaagcaaaatgtgaaaatcaaaatgacagacaaaaatcacgtttattttatgattacaaatgatacactggaaataaaaggaaaagacggagcagatttgtctgtttttgcttttggaggggacgctaaaggtgttacaataaaaggtggaaaatatcaggcagagaatgtaactttgacaatggacaatcctacagccgtaagtaattcttttattggtgaaaaagtcagaatttcagtggaaagtggaagcctgcttgttattgtggcaaaataaaaacatataaaatataaaaattgtttaactacttaatatgtttgaaaacaatcaattaaaaatgaacaattataaaatattgaattggtgtaaaaatggaacaaaatattagattaaaagaaaaaaagtcagcggacgaacagattagattgaataaatttttaagtgatgcaggatattgttccagaagggaagcagacagacttgtggagcagggcgttgtaaaagttaacggaaaaactgcagtgatgggacaaaaagtgaccatcaatgatagtataatggttaaaggtaagaatatttcaagagaagaagaacagattcttatagcactgaataaacctgttggaattgaatgtaccacagatttaaataacccggacaacatagtggattttattaattttgataagagaatttatcctattggaaggttggataagaactctcaggggttaatacttttgactaacgacggtttaattgttaataacatattgaaaggctcaaattatcatgagaaagagtatgttgttacagttgataagccggtaacagacgattttattaagaaaatgtcaacaggtgtacggattcttgatcaggtaacaagaccgtgtaaggtaactaaggtgaagaagcatgtttttaatattattttaactcaagggttaaatagacagattagaagaatgtgcggagaacttggatataatgttcaaaagttgaaaagaataagaataatgaacattgaattgggtaatcttcctgtgggacaatatagaaaggtcaccgacagtgaattaaaagaattaatgagaaattttaattgattttaacaaaggttcaaaaagattaaagaataaaattatagaaaattaattttaggttaggtggatataatggataagtcagaaagaattaaagatcttgtagaattattgaataaagctaacaaggcatattatcaggaagccaatgagataatgactaactttgaatatgataagttgtatgatgaattggttggcttagagaaagaaacaggcatggtgttgtctaacagccctacagttaacgtaggttatcaggttgtcagtcagttgccaaaggagcaacacaacagccctatgctttcccttgataagactaaagaagttggagcattggcagattttgcaggagacagaaagtgtcttttgtcttggaaaatggacggcttgacagttgttcttacttatgaaaatggagaacttgtaaaggctgtaacacgtggcaacggattggttggagaagtaataacaaacaacgccaaaacatttaagaatataccgatttcaataccttataagggcagacttactcttagaggggaagcaataattaaatattctgactttgaacagattaacagagagattgaagatgcagattctaagtacaagaatcctagaaatttgtgctcaggttcagtgcgccagttaaatagtcaggttacggcagagcgaaatgttaattttgtagcgtttgcacttattaatgcagatgatgtggactttggcaattcaattgagcaacagtacaaatggatggaaagtcagggatttcaagttgttgagtacagggttgtaacaagaaattcaatggaggatgcagtaaaatattttgctggaaaaattcagacttacgattatccttctgacggattggttcttatgtttgatgatattgaatatggtttgtcacttggaactacagccaagtttccacgaaacggaattgcttttaaatgggaagatgaacaggcagaaactacgcttaaatatattgaatggagtccaagtcgaacaggacttattaatcctgtagcagtttttgaaccggttgaacttgaaggaacaacagtaagcagggcaagtgtacataatattagtattatggaagaattagaacttggctccggtgacagaattaaagtttacaaggctaatatgattattccacagatttcagagaatctaacaaagagcggaatagatgatttgcctaaggaatgccctgtatgtggtaatgcaactgaagtgaaggcagagaatggaataaagacactttattgccctaacagccagtgtccggctaaacacgttaagttatttactttgtttgtgtcaagaaacggaatgaacattgacggattatcagaggaaactttggagaagtttattgacgcgggctacattaaggaatttgcagatattttccatttggacagatattatgaagaaatagttgcaacaccgggatttggacagaaatcatatgataatcttatggattcagtggaaaaagccagaactgttgaactttcagcgttgatttatagcttgggtattccaaatattggttcagccaatgccaagcttatttgcaaggcgtttaacaataacattgaaaaaataagaaatgcaagtgttgaagagttgattgaaatagatggtataggtgaaataatggcagagaagttctgtcagtattttgcagacgaagacaatatcaaaaaacttgataatcttcttaaagaagtaaatattgcagaaccggaagaaaatacaactcctcagaacatggatggtttgacttttgtaataacaggttcagtggaacattttgctaaccgtaatgaactaaagtcgtatattgaaaagcatggcggaaaggttacaggctcagtttcagctaggactaattatcttataaacaatgatgcaatgtcagcatcttctaaaaacaaaaaagctaaacaattaggtgtggaaattgttacggaagaagtttttttagaaagatggtgtaaagatattgaacagtaggtcataatatggtaaatatgatacaaggataaaagttggcagaataatcagatataaagtcagatgaaaaataatataaataaaacaaaacaaacctgacagaaaacagatatgaaagttatatttttatcctatgtatgaacagtattaaatttctaaataagtatttcaggaggagttagttatgagaaatgatatagtagaaattttatgcgacatcaatccactgttagacccggacgatgaagacatgagcatagcagaatttttagaatcaaaacaattaatggagttaatggcaagacttgaagaccacttcgacatcgatattccatatgacgatagaaatgaagacaacttctacagtgttgacacaataatcgaattgctagaaaggttgcagtagaacttcaaagaattaagaaattaaaaaatcgctcataaaagtttgaagacaaacatatagctattaaacttttatgggcgatttgcaataaataaggagtatgaccaattggtagtactccttatttttgtgcaaaatttcaaaagtcatatttgcgggaaacacacatctaaaatccaactgattttgtacaatatatgattgaatttgtggtagatgtaccccgatattttaaaaacttcgttttttgaggtacgcgtcctaatttctagtagttattcacttgactttttttcctgttgcagatactataataattgtattagttgtagtagtacaattatagtgaaggggaaagaatatgcttactgttaattttcaatcaagaacgccggtatatcagcaactttatgatgatgttgtaagactggcatctcttggagtgttaaaaagcaataccaaattaccacctgtgcgtgttttggcaacagagcttggaattaatcctaacacagtgtcgaaagcatataagatgcttgaagctgatgggtatatatattctacagttggacgtggaagttttgtatcagataagttgtgtcaggatgaggctgaaaaaattgccgcaaggcaggaactgaaaagagctttgaagaaagcgtataaaaaaggtgtcacaaaagaagaaatagtgaatatgatagaacagataatagagggagtagacacagaatgatagaaattaagaatttgactaaaaaatttgattcaaatgtagccctaaatagaatggattgttctattagcgaaggcacaatttttggattggcaggtagtaatggaagtggaaagagtacgttattaaggacgttatcaggtgtttatgaaccagatgagggtcaggttataatagatggagagcctgcattcgataatcataaaataaaagagcgttgttattatattgcggattatccgtttttctttaacgacagcacagttgagaatatggggaaattattgaaaaatatttattccacatgggaccagcagagatttgaagaattatgtgaaatgttcccaattgaaagaaaaaagaaaattataaatatgagtaaaggaatgcagcgacaggcatcacttattcttgcttttgcggcaaaacctaaatatttgttcttagatgaaatttttgacggtttggatccacttataagaaaaacgcttaagacacttattattcaagatgtgacagacagaaatatgacatgtattattgcatctcataatttaagagagattgatgacatatgtgaccgaattgtaatgttgcacgatggttcacttttgactaatgaggaaacagatagccttaaaaataaaatacataaaattcagatggcttttaagaatagtccaagtgtaaaaacacttacagaaatgaatgttcagattataagtcaggttggaaactactttagcgtaatggcacgaggagatatagatgaaattatggaaaaacttaattctttaaaccctgtgtttatagaaactatgccttccacattagaggaagtatttattaatgaaatggagggcgcaggatatggaaaataatagtttaagtaataaatctaaggcaatagcattatttaaatggactaatagaaaatatctttcagtttccatagcatattggattttgttatttctagcctatcctttggcagaaatatttataatgattaccagcatatctgcagatgggaagtataattattatgtagacagaatgcagacttatggagtgcttataccgtccactttgtttgcggcaattgcaataggatattcaattgtaatatccttaattgcattttcgtacatgcataataagagatgtgttgacttatttggcagctttccggtaagcagaagaacattgttcttttcaaggtttgcctcagttatattttcaacattgatgcctgttatagttattggtttaataggtatgattttatcgtttgaacataaagcttttatagccggagcttcaacaataggcttattgtgcttagtattaattggcaacatatgttttatagcaatcatctctctttgttgtggaacaactattgatgttataatttgttatggggcaattaacgtgtgctatcctatagccgtatttttatgtagctattatccaggagaaattttaccgggagttggacaaaaagacctgccgtcatcactttatacgttactttgtccaattatggcattctttacatctgcttttggagacggtttggcattacatacaatatggtggattggatttataatagttgtcacaatcgtttgttatcatttgtgcaaaaagagaaaagctgaaacagctcagaacggatttgcattcgcaattgttgaaataattataaagtttttaacatgctttacatgtggacttgccattggctttataatgtcacagcttggaaatatttacagcagtgttttggcatcttatatttggcttgttgttggaattattattggaatatttgcttctaatattttacttcatttggcatttcacagaggattgtcaatgtttaaaagtagcttagtggaaagtctggttgtttttgttacaacagggatttttatagtgattattgcaaccggaggtcttggatatgacactacaattcctaaagagtcagaagttgagagtgttattgtaaaggaagcagacagagagtattttattattaacggcaaagatattgttaattcatatcaaggcgacgcgaaaagaattaagaagactcttgaattgcataaagaaattattaacaagtgcaaggctaaaaaacaccatggtttttatgcactgacacgacagtctgatgatgattatggttctgtttcggatgaagatgaatatgagtatacagttagtcctatggggataattatcaaatataagcttaaaagcggaaaaataatcacaagacagtatagaagaggtgaagtgccggttagtcaggatgagaatgttaaggatttggtagtaaatgatttgactatgattacaaagataccggttaaatatttgtcaagttgttatattctggatatgcaaaaaggcggatatagcagtacagataaagatttaaacaaaaaactggtagcggcacttattgaagaccttaataatgtgaaaaagataaaaaaagacgaatataattatagtatagatattaactatactgatagtggagacaactataattatagaaatggaacagagataagtgtaaatatttacagcgaatataaaaatacacttaaggttcttaatgacagcggagtacttgcgaagctggaagaatagtagtatattagagaaagcgaccgagtgaaggacgaaaagcctattattcgatatgctggctaaaaaaatatcacacggaggatagaattatggacaagaaaaatattgattgggccaatataggttttggttatgttcagacagataagagatttgtgtctaactttaaagatggtaaatgggatgacggtcagttaactgacgatgcaacagttgttatcagtgaatgtgcaggtgtattacagtatgcacagacatgttttgaaggaatgaaagcttacacaacagaagatggacgtgtagtagtgttcagacctgacttaaatgcaaagagaatggaagattcagctaagagacttgaaatgccggtcttccctcaggatagatttgtaaaagcaatcgaagaaacagtaaaagctaacttagcttatgtaccaccatatggttcaggtgctacattatatattagaccttacatgtttggtagttcatcagttataggtgtaaagccggctgaagaatatcagtttagagtatttacaacacctgtaggaccttactttaagggtggcgctaagcctatcacaattaaggtaagtgattttgatagagcagcacctcacggaacaggtcatattaaagcaggtcttaactatgcaatgagtttacatgcaatcgttacagctcacgcagaaggttttgatgaaaatatgtacttagatgcagcaacaagaactaaggtagaagaaacaggtggagctaactttatttttgttacaaaagataatacagtagttacacctaagtcaaacagtattcttccatcaattacaagacgttcattaatgtatgttgcagaacattatttaggacttaaagttgaagaaagagaagtttactttgatgaagttaaagacttcgcagaatgtggcctttgcggtacagcagcagtaatctcacctgtaggaaagattaatgaccatggcaaagaaatttgcttcccaagtggaatggaagaaatgggacctataacaaagaaactttacgatacattaacaggaattcagatgggtagaattgaagctcccgaaggatggatttacgaaattaaataattaaagataggatagagtatgtggaatagagcagatttaaaagcaaatgctaaaaagatttttttcgggaactattggaaagcagttttagtaacgcttattttgacaattattcttggtggtgcaacaaacacaataacaagaagaatttcaaataatcagtcaacagattggtcaattgatcaggatttttccggtgtttcaagttatgatgaatggtcaaatgatgaaatattgaacattggaaacagttcattgtatggttcagaatatcagacatatcttagaatttacaaccgactgaagaatatacctggatcagtatgggcaatgttgggaattgctgtagcagtaggaatagttgttggtcttttaatttccattttcttagtagcacctttacaggttggatgttacagatggtatatcttaaacagaacatctaatccaccaatgggagaattattaaattcatttagaaatggatattttaacactgctaagattatgttttgcatgggtttgtacacaacactttggagtttgttgtttataataccgggaattatcaaggcgtatgaatatagtatgattccatatttgttggctgagaatcctaatatgtcaaaacaggaagcttttgcaataagcaaggaattaatggatggaaataagtttaatgcatttgtactggacttatcgttcatactttggaattttgtaggtgcattagcatttggtttacctggaatattctttgttaatccttatgttcagttaactaatgttgaactttatgtaaaattatgtcagattagagcagaaagacataattcaacatataatcaggattacaaccggaattttaatcagaatgatttttcaggttatacacaagtataaaattaagtaaaagtaatgaaatgactaataaaataaaaaaaatggcggttttcgccatttttttttatattgtactagacaaagatattataatttgttaaaattataacaatcttaataatattattactagaagtgggaattttacaaaattgtaacagaaaagtcatctgttttttcttgcggtgaaatagtaaaaatggtattatgagagtatgtgagcaagcaggtgaaattatacataaaacctgttaacatatcaaaaaaatcatggaggatttatattatgtcaaagaaagtagttatcgcaggcgcatgccgtacagctattggaaaaatgggtggagcattaagcacaactccagcaccagttttaggatctattgttattaaggaagctcttaacagagcaggcgttccggctgatcaggttgatcacgtatatatgggatgtgttatccaggcaggacttggacagaacgtagcacgtcaggcagcacttaaggcaggacttccaattgaaacaccagcagttacagttaacgttgtatgtggttcaggtcttaactgtgtaaacatggctgcacagatgattcaggcaggagatgctgatatcgttgttgcaggtggtatggaaaacatgtcaatggctccatatgctttaccacaggctagatttggttacagaatgaacaatggtacacttgttgatacaatggttaacgatgcattaacagatgcattcaatcactaccacatgatgattacagctgaaaacgtagctgaacagtggggacttacaagagaagaattagatgctttctcagctaactcacagcagaaatgtgaaaaggctatggctgaaggtaagttcaaagatgaaatcgttcctgtagaagtaaaacagagaaaacagacagttatcgtagatacagatgaaggcccaagagctggaacaacagctgaatcacttagcaagttaagatgttgttcaggtaagcctgatggtgttgttacagcaggtaatgcttcaggtatcaatgatggtgcagcagcagttgtagttatgagcgaagaaaaagctaaagaattaggtgttaagccaatggctacattcgtaacaggagcacttggtggtgtagatccatcaattatgggtgttggacctgtagcttcaactaagaaagcattagcaaaagctaacatgacaattgatgatatggacttaatcgaagctaacgaagctttcgcagctcagtcagtagcagtagctagagacttaaagttcgatatgagcaaagtaaacgtaaacggtggtgctattgctcttggtcatccggtaggagcatcaggttgtcgtatccttgtaacattacttcacgaaatgcagaagagagacgctaagaagggtcttgctactttatgtatcggtggcggaatgggatgtactacaatcgttgaacgtgactaattttaaatataaccagggctggtagtaaaactgccagcttttatggtgttaataaacactttttataattaagtttcaatacttaaaaagttatttttattaaggagaaaaaacaatggaattcattacatatgaacaggaaggattcgttggaattcttacaatcaatcgtccaaaggctcttaacgcattaaacagccaggttcttgatgaattaaacgaagcaattgatgcaattgatgttaatgaaactagagcacttattttaacaggtgccggagacaaatcttttgttgcaggcgctgatattggagaaatgtcaacacttacaaaatcagaaggtgaagcttttggtaagaaaggtaatgatgttttcagaaagcttgaaacattagaaattccagtaatcgcagcagttaacggattcgctttaggtggcggatgcgagatctcaatgagttgtgatattagaatttgttcagaaaacgctattttcggacagcctgaagtaggtcttggaattacaccaggtttcggtggaacacagagacttgcaagaatcgttggacctggaatggctaagcagatgatttatacagcaagaaatattaaggctgacgaagcttacagaatcggtcttgtaaatgcagtatatccacaggaagaacttatggatgctgcaaagaagttagcagcaggtattgcaaagaatgcacctatcgctgttagagcttgcaagaaggcaattaatgatggacttgatgcagttatggatgatgctatcgttatcgaagaaaaattattcggaagctgcttcgaaacagaagatcagaaagccggaatgggtaacttccttgaaaaggataaagaaaagaaacttaaagttgttccatttaagaactgctaatagtttgtaattgtgctttggcacagctaatattgttttaaataccggattttccggttttaaccgtgggaagaatttcttcacacatatttaaggtaatggtttaatccattacagaataaataagcgacaagttcgcaaaagtatttttggaggaaaaaagatgaaggtaggagtaattggtgccggaacaatgggccagggaatcgctaaggctttcgctcaggttgatggatacacagtagcattatgtgacatcaagcaggaatgggctgaaggtggaaaagacaagattgctaaaggttatgcaagacttgtacagaaagaaaaaatgacacaggagcaggttgatggtattcttgcaagaatcacaccaggtcttaaagaagacttatgtgctgactgcgatttaatcgtagaagctgcttttgaaaatatggaagttaagaaaacaacatttggcgaattagacaagatttgtaagcctgaatgtatctttgcttcaaacacatcatctctttcaattacagagattggaaatggtcttacacgtcctatgattggtatgcatttcttcaatcctgcagatagaatgaaattagtagaagttatcgcaggcgttaacacacctgacgaaacagtagaagaaatcatcaagatttcaaaagaaatcggcaagacacctgtacaggtaaatgaagctgccggattcgtagttaacagaatcttaatcccaatgattaacgaagctgctttcattaagatggaaggtgtttcagacatcgctggtattgatgcagcaatgaaacttggtgcaaatcacccaatgggacctcttgaattaggagatttcgttggtttagatatctgccttgcaattatggatgttctttacaatgaaacaggagacagcaaatatcgtgcatgtccattaatccgtaagatggttagaggtggaaaccttggtgttaaatcaggtaagggattctacgtttataacgcagatcgtacaaaaacaccagttgatgctcagtaattagggcaaacaataaatatggaggaaagataaatggattttactttaagcaaaaaacatgaaatggcaagaactcttttcaaagaattcgctgaaaatgaagttaaacctcttgcacaggaaacagatgaaaatgaacagttccctgttgagacagttgaaaagatggcaaaatatggtttccttggtattccagttcctaaggaatatggcggacagggatgtgatcctttaacatatgctatgtgtgttgaagaattatcaaaagtatgtggtacaacaggtgttatcgtatcagctcatacatcactttgtatcgatcctattatgacattcggtacagaagaacagaaaaagaaatatgtagttccacttgcaaagggtgaaaagttaggtgctttcggtcttacagaaccaggtgcaggtacagatgctcagggacagcagacaaaggctgtttttgatgaagctacaaatgaatgggtattaaacggttctaagtgctttattacaaatggtaagtacgcagatgtttatatcgtaatcgccgtaacaggtaaagttgaaaaacgtggtagaatgatgaaagaaatttcagcatttatcgttgaaaaaggaactcctggatttacattcggaacaaaagaaaagaaaatgggtatccgtggttcagcaacatatgaattaatttttgaagattgccgtatcccagctgaaaacttacttggtaagaagggtaaaggtttcaatatcgctatgcatacacttgatggtggacgtattggtattgcagcacaggctcttggtcttgcagaaggcgctttagaaacaacaattgaatatgttaaggaaagaaaacagttcggtagatcaatcggacagttccagaatacacagttccagttagcagatatggctactaaggtagaagctgctaagttgcttgtttacaaagcagcaatggctaaggctacacagaagacatactcttttgaagctgctcaggctaaattatgcgcagcagaagttgcaatggaagttacaactaaggctgttcagttacatggtggttatggttatatcagagaatatgacgttgaaagaatgatgagagatgctaagattacagaaatctacgaaggtacttcagaagttcagcgtatggtaatctctgcaaacttattaaaataataggaggtactaatcgtgaaaattatcgtttgtgtaaaacaggtacctgatacaaagggtggagttaaatttaacccagatggtacattagatagaggtgcaatgcttacaattatgaaccctgatgataaagcaggtcttgaagctgcacttagattaaaagatcagtacggcgctgaagttacagttcttacaatgggccttccaaaggctgaagatgttcttcgtgaagctatagctatgggtgctgacaatggaatcttagtaacagatagagttttaggtggtgctgatacttgggctacatctactacaatcgctggtgcaattagaaatattaaagattacgacatcattattacaggacgtcaggctatcgatggtgatacagctcaggttggaccacagatcgctgaacatcttggaatccctgtaatttcatatgctgaaggtattgaagttgaaggagatagcgtaattgttaagagacagtatgaagatagacatcatatgcttaaagcaaaaatgcctgtattaattacagctctttcagaattaaacgagccacgttacatgactccaggtggaatttttgatgcatgtgatgctgaaatcacaacttggggaagagcaaatcttgttgacgtagaagatggagaccttggattaaagggttcacctacaaagattgctaaggcttctgacaaagttcgtaagggtgctggagaaaaggttactcctgattcacctgatgaagcagttgattacatcatggacaaattattaacaaagcacgttatttagtagagaggagattataattatgcagaacattaatttagaagattataaaggcgtatatgtcttcgctcagcaggtagataacgaattaagcggtatcgcattcgagttacttggagaagcaggaagacttgcaaaaccattaaatacagaagtaacagcagtacttcttggatcaaacgttggaaatttagttgatcagttagctgaatatggcgctgataaggttatcgttgttgataatcctgaacttgaaacatatagaactgaaccatatgctcaggctttaacagcagttattaatgaattcaagcctgaaattatgttagttggtgctacagcaatcggtagagatttaggtcctacagtttcagctagagtagcaacaggtcttacagctgactgtacagttcttgaaattggtgatttcccaatcaacccaattccaggtagagaacagaaacacaatcagcttcttatgactcgtcctgcattcggtggtaacacaattgctactattgcatgtccagatcatagaccacagatggctacagttcgtgccggtgttatgcagaaggcagaacaaaagccaggcgcaaaggcagaagttattaactttgacgctaaattagaaaagaacagcaaatatgttgaaattcaggaagtaattaagtcagttgctgaaacagtagatatcatggacgctaagattttagtatcaggtggacgtggtgttggttcagctgaaaacttcaagcttcttgaagatcttgcagaagctctcggtggagaagtttcatgttcaagagctgttacagataacggttggttaccagtagacagacaggttggacagacaggtaaaacagttcgtccacaggtttactttgcaattggtatttcaggagcaatccagcatgtagctggtatggaagaatcagaccttatcatcgcaatcaacaaagatgaagatgctccaatctttgacgtagctgattatggtatcgttggagacttaaacaagatcgttccacagcttacagcagctatcaaagcagcagaagctaacaaataatcaaatataatatatagttgatatattagtccccgcgtcgaaagacgcggggatttttgtgttgtgaggggggaattgtaaggttgttactattgaatttttcaatatctgccccatatgaacatggttttgtgggatatgtggtagattctaagcttgttactattcaaacttttcaatatctgcgccatatgaatatagttttgtgggatatgtggtagattctaagcttgttactattcaaatttttacatatccaccccatatgaacatagttacgtgggatatgaggtagattttaagtttgatgctattgaaattttcctatatctgccccatatgaacatagttttgtgggatatgaggtagattctaaatttgatactattcaaatttttatatattaaaatcatatattaaaactgatgtggagtttgtaactgaatggtatgtaaatgatactatttaaatgtacattttgtggaaaacaaaaatgtacatttccattgcttatgctaatgtattcatgggaggtaacaaccatgaatcaagcattaattactcagcttaaaatcttacgattgagcaatataaaaccaaatttttccgagattgccaggctatatgacatggatcgcagaactgttaaaaagtattatgacggatacaaaggcaaacctacacaccataatatgccaagcaggcttgacaagcataaagacataatagttcaaaaactagccataaaaggagataatgtcagagctgtttatgaagatattatttcagaagttgattctgaaattggaacttattccaactttaataaatacatcaaaaccagaaacctaaagccaataaaaactaccaaagggcatccaagatatgaaactgctcccggaattcaggctcaggttgattgaaaggaagatgtatcaatagccaataaacatggcgaaatcttcacctttcaggtgtttgattataaattggggcattctagatactgccactttacttacaaactttacaaaacaagacaggatgtctttgactgtctgatagcttcatttaaggcaacaggcggagtaccaagggaactcctttttgacaacatggcatctgttgtggatttaaaggacaatcgccgacatgtaaatgaaaaaatgaaggcatttgcaaatgattttggtttcaaaataaaactctgcaaaccaagacatgcttttacaaaaggcaaagttgaggttataaacaagttcatctcatggatgaaatcctatgagggagagtttgaaactgaggaagatttaatggatattcttaaaaaggtaaatggcaaagtcaatacttacatttgtcaggaaaccggtgtaccgccacttctattatttcagaaagaaaaagaatacctgcagccacttccgaatttaaaaatcatagagtcttatatgagccacaatcgccaaaccacagttcgtaaggattccataatatcgtacatgaacaacagatattccgttccttttgagtatataggaaaacctgtaaatttgcgagtgaaatctgatattttggaaatttattataaaactgaacttgttgccaaacatgaattaagtacaaaaaacttaattataataaagagcactattcacagttgctgtcgcattacattaaggacaatgacattgttgcacaaatggcagaagctaatctggcacaaatggatgacttcctgtgaaaggagataaaatggcaacctatgcaaagattataaatgggcagactgacttaggcatacataagatgccggaatatttagatacatacattgagttagtcaataaaggcgaaaaatcatttagtgtagccctggaagaactgattgaaattgaacaaaagaacaaccaaatcagggctgaaaatgcctgtgtgaaaactgcagcttttcctttccttaaaacaatggatgattttgagtttgactttcaaccaggaattaacaaaaaagaactgcttgaacttaacaggatgggatttctggataaaaaagaaaacatcctgtttgtagactccagtggagttggtaaaacacatcttgccacagccataggcattacctgcgcaaggtcacgagtttcaacttattttgtgtcttttgagtcattaataacacagctcaaaaaagcactgatggaaaacagactagagtcacgtttaaagttctttgccaaatataaactgttaatcattgacgaaataggatatatgccaattgatcaggattcagcaaatctgttctttcaacttatagccaagcgttacgaaagaaacagtacaataataactaccaacacccctttctctaaatggggagaaatatttggttcgcctactttggcaaatgcagttttagacaggctattccatcactcgcagattgtttcaataaagggaccgtcataccgacttcgagaaaagcgggctttttttgaatcacaggctgaggaatagcataggaatttgtacatttttattttccactttttgtacaattatatattgacatttacatggtataaaaaacaggaagatataatagctaaggcaagcaaaaatgtatatattgtgaaggcaggggaaagcatagaaattttaacagagaaaggcgaaagtgtgaaatcaaagtctgaaaaaattattgcggataagcttaatatgatgaatgtaccatattgctatgaagtgccattatatatgaagggctatgggtatgtaaagccagactttaaagtagtaaatgtggcaacaagaaaggagtattactgggaacattttggattaatgagcgatgaagaatatgcaaaaaaggcaattaaaaaaataatatgtatgaaaataatggctttattcttggagaaaatttaatagcaacatttgaattagagaaatgcccactagatacaagaaatgttgaaaagataattagaaactttttgatataaaattgtatatagtaagtttggggttgaataataaaaaacttcacttgcctattaagaaaatagaaagtgaagttttataaaatttaatttaaaaattattaattaaagaaactttgttacgtattgacgttaaatcgataaagcgtttataaaaattataattttttttacgaattaattcatctttttctccattatttttaggccagttggtgccgacaatagtatcaggtttaatcttgtttataaattttttttcagcaatatacattgcactaaatttaaatatattatttttattaaagttattgtaatatttatgagaaaaacttgccatatcaaagagtaacatttttttattataatttattaaatctttatcattttctataagttgagcatatatattatttatatttattgaatattctgattcagtatttacaggtcttaaaaaatcatgccatctagcttttccatggtgtgaggctttataaataacattagttgtatcaggtttatcgctttcaaattcgtttaaaatatttgaattattaagaatagactttaatccgtctgcttggttgtctccagggaaaattactttaaatttttgggcagcacttaaactgtttactataacgctgagacttctattgttttcatcagtactatttgatgagctatttccaagtaaagtaggtattatcttaatctgatatgttgagtatttgttaatggttttgatattatctatataattcacagttatatttttaccttttatgcaatatttaattgatgaatttttattacttgaactaacttttggggaagattcactaccgaagtattttcgtgcagatgagcaattggctcctttaccatatgttccaaagcaataaatattatcaacgcatttgttgtttaatagtggctttatgtagttaggtgtgaagttaacaccggatataaaaagattttttattttgaaatttttataaaattgtgaaagttttagtcctgcacaatgatctttgtgccaatgtgttaaaataagataatcaatagtttttcttgtccccataagattttttaaatttgttacagaattatcatcacctaaatcaacaattgcaatttgtgatgttgttccagtttggaatttcataaaagttgagtcggcatcataattagcaattgttttgattgttagtttccaagatgagttattatcatcattttttaggcgcaactgagtggcatttacattaatatttgagaaaaatataatgcatatcattagtgaaagtgtaatggataagtgttttagtttgtttttcataatttgttctccttaaaaatattatttgaatcgtttttattatatatacaaaaaacagtatatgtcaagaaaaaatattttgataacatatactatttttaaaaattttgcttacatttcctccaattcatgatataactttgcaataggtagtcctacaacgttattgtaatcgccgtggatccctttaacgtgtatggcgaaagagccttggatgccgtaacttccggctttatcatagcagtcacctgtttcaatataggaattgatttcactgtcagtcatcgggtaaaattcaacgtcagtgcaatcgtggaaggagtgaacttttttctctttagtttcaaaatcatagagaataatgctgactccagtgtatacctgatgggtgttattttgaagcagatttaacatatcaaatgcctggtcatgatctttgggtttgcccattatctggttgtcttttgcaacgattgtatcagcaccgataatcataagtgaaactccctcgtatgcgtcaagagacaggttaacaactttcataatactgttaaatacgtttgttgctttttgaagagataggtctttaacaacaagtgccggttcagtttcagaagtttgttcatccatatttgaagctataatttcaaactcatatcccgcctgtttaagtaactcgcttcgtctcggtgagtttgaagcaagaataagcttagttttttcaaaatcaatcattttaaatctccaaattcttataaaatatatagtgtaattataatagtaattatacaacaacacataaatataaaaaatattataattaatacaaaaattataatccataacatatgaaaataataaaaataattagtcaaattcaaggaataaacaaattactatgcagattggaaaatatgtaactaacttttttaccacaaattaacatcctgacacatatttaaggtttaatataggtaagggtagtagaatattaaaaaataaaattataagattaaaaacgataagattaaaagagataatatagagcattgcaaaggccataacggacagatataaaggtaacatttgtgcaaaaaaaggcaagggagacgtaagctttatatttgatattccgattaagtagttgcggtgtttataagatatgtataatttttcccattttcttcatacattttttttgtagaaaattgtttcaagctctgctataataaagattgcgctagcaaatatattttatagaaaggaaaagtataggaaactatacgagaggaaaatgttagaaaaaatatttaaactcaaagagaacaacacttccgtaaaaacagaagtagttgcgggtgttacaacatttatgactatggcatatattcttgctgtaaacccaagcatcttaagcgcttcaggtatgaatccggaagctattcttattgcaacatgtcttgcatcatttattggtacaatgtgtatggctcttatggctaatcttccatttgctttatcagcaggtcttggacttaacgcttactttgcatacacagtttgtggagaaatgggttattcatggcagatagcattatttgcagtatttgttgaaggtattatctttataatactttcattaacaaatgttcgtgaagctatctttgatgctattccagttaatcttaagaaagcagtatcagtaggtatcggtttattcatcgcattcattggattacagaatgctggtcttgtagttgattcatcaacacttgttacaattacagactttacacagaatttccatacagcaggtatttgtgcattattagcagttatcggtgtatttattacagcaattctttatattaagagagtaaaaggttcaattcttgttggtatcgtatcaacatggattcttggaatcatctgcgaacttacaaagatttacgttcctgatggaaaggactttttctcagttatccctactaagtttgtaagttttgacttctcagctttaggtgatacatttggacagtgtttcaatcttgactttaaggcagtaggtattgtaaacttcatcatcgttgtatttgcattccttttcgttgacttatttgatacattgggaacaatcattggtgtaagtacaaaagcaggaatgcttgatgaaaatggtaaattaccaaaaatcaaacctgcacttatgtcagatgctattgctacatcagtaggtgctgtccttggtacatcaacaacaacaacattcgttgaatcatcagccggtgttgctgaaggtggacgtacaggtcttacatcagtaataacaggtgttttattccttatagcaatgattttctcaccattattcattacaattccatcattcgctacagctcctgcacttattatggtaggattccttatgtttggtgctgttacagatattaagtttacagatgataacttaacagaagcaattcctgcatacctttgcattattgcaatgccattattctacagcatttcagaaggtatctcagtaggaatcatttcatacgtattacttaacttagtaacaggtaaaggaaagaaagttaaacctttattatacgtattagcagtattattcgtattgaagtatatattcttataagattatagtgttaaaaggttttgttccacctgcgcatgtataaaggtaggataataaccttggaacacgcttataatatgaacataaaaaagtctgagatcaatttgaatattgaggtgaccccaaaaagttagactttttacgagacgactccggtcgtctcgtttttcttttatgcagtaaggagatggagcctgtattgaacacaaatcttggaaaataatatagatttactaattcaggattagacaaaacgaccatcgttttatttaaaagacagtaaaataaaaaaacatgttcgtaaaaaagaaaataaaagtaagaaatttaaatggggagatgaagagtaaatgaatacaacagcagataataattattatttgctctagaacatttacaaaaaacgtggtacaataacaccgattttaacacaacgattctaagttctctaaagtctgtttttagagctaagagggaaacaggtgagagacctgtacagtcgtgctactgtaaatgtgtagttttttcagtggcttttatatagaagtcaaccattgtgccaaggcatgagaaggtagaaaaaacgttactgcataagtcaggagacctgcttagaatttcttccatttacacacgtaattgcaaatggcaagttataagctttttaaagacaggctttcagattgaatctgaaggtttgttacgcgagttttgattttgccgggacacaataatgttgtgtcccgatttttttacttaataagtgataggaaacagtggtgttaaaaaaggaaaaatgaaaggagagatgatgtaaagttacatcataaggaacagaatgaaaaaactttggaaaagtggcgttgccttagttttagtatgtgcacttatgtttgctcagtttaatactgtaaatgtttttgcaaatacaagtgttcaggcagaagagtctgaaactaaggaacagataactgtatctgtaacagtagtaggcgacagcgttcacggaacagaagcacatacccgtttcgagaactggcttgtaaactacaaagttacagttgacaaaggggcaactgctgatgatgcttttaagaaagcattggaaagcaatggatatagttatgaaaaaaatagttggaatggattaaacagcattacaaagcctgacggaacagttcttggaagtggttctaacggtgatgcatgtagttggatgtttgccataaatggtgcagatcctgatcctaatgtagttatgcctcagtatactcttaaagatggggaaaaaataactgcatactttattgatgattggaatgcatatccttatacaattccaacagtaggtgttaatggaaagggtactgcggaggatccttacacaatcaaggatgcatcagaattacctgaagtaattgaagagggagatgtttatgcattaactgatgatattactttagaatcaggtcagtatattaaagatattaagggaactttagacggaaaaggtcacacaatcacattaacagatacatatttggcagacaaggttgagggaacaatcgaaaaccttggagtaacaagtacttctgaaattacattacctgatgaatcaggaagtatggcaaatactgtttcaggtacaattgtaaatagttattcaactgcaaaaataaaagcaacaacagattggggagaagtaggtggattagtaggaacaatgtcaggttctacgatttcaaactgctattttgcaggaagttttggtgactattctatgggaggaatagcatatacaagttcatcagcccagtctacaatttctaactgctattttacggtaggattctcacctgtatctatgggaagtgcaacaaaagttaactgtggaataatgacagaagccgaattgaaaacttctgatgcaattgaaaaattaaacacagacattactgacacaggctttgaatggtcattaccaactgatggaagcaacaatggattgcctgttttaacagtaccatctgatattgttgacaaaactcagttagtagcacagattgaagttgctcagaagataacaaaggctgactatactgataagtcatggaatgcattacaggaagctttagcagaagcaattaaagttaatagtgataacaatgcaacaaaatcacaggttacaaaagctacaaataatttagtatctgcaattagtaatttaaagaataataaaccgactaagcctgtagcattgccaacagatgacagtaagattacgcacataaaaacattaaaagatttaaatgcgattacagcttcaagtggaaaatattatgttttagacaatgatattacagttaaaaacacagaagatgatttttattttagcatggaaaactttaagggtgttcttgatggaaaaggacattctattaaaattgaaaacatttcagatggaattttttcaaatgtaagtgaagatggtataattcagaatgtttattttacaggaacaatgaatgttggtcagggatataagggacctcttggaagcaatatgtcaggtgcaattattaactgttatacagatatttcaggaacaggaacttgcggttttgccagaagattaacagatgcaggtattgtatctaacagctattcagtaagtgaaggcaaggcaggtgctttctttaatcagtacggaaccaacgatactgcaggagaaggacagttaattaatacatattggttagaaacattagacaacagtgttattcctgaaagtgctcttgttaattcatattcagaaactaaggattatatgaaatctttagattttgtaagtgctttaaatgaaaataagggcgaaaacggtgtaagctggggaagaaacggaaatacaggttatccatattttggtgaaagccaggattacaattcgggaagtactttacctgcaaacaaatacacagttaagtttactaagtttgacaacacagtagttacagtagaaaatcagaatttagaaatttcatgcaacgatgttaacggctctaatattgccggttcattaagcttagaaggagtaccttcaacaagtaaaatcgaatggtcgtatgaaagtgtagaacctagcggagctattatggttggttctgatggtggagtaataagagttgacaaagcaggcacagcagttgttaaggcaactgaaactaaggaagatggtagttcagaagtagtagctgcatttaatcttaaagcatataacaaagatgtagaagaaataaaagcgtacattgacggacaggatgttacaaatggaaaatttacagttcagggttcagaaataaaaactgtaaagatggaagttaaatacaaaaatgaggacaagtttgtagcaatttctccaagaagattttcattaaaagttgatgatgaaagttttattgagaatattccgggttcaaacagttttagctttaaaaaagcaggaacttcaaaaattactgcaatttatagcgacaacacagacttaaaggcagaggtaacattaacatcagaatacgtggcagtaaaatcagttacacctgcaattaatgaaagcgtaacaattcacggcagaaatgctaacagcactaacggccaggattttgtacctgattattcatcagtaatagttgatccggcaaacgcaactaatgcagctaattacacaattgaaagcagcgataaaactattggtgaatatgttccaagtatggttattggttatgtaccatacaaggcaggaacagttacatatacagcaactattaaggacacagatccaaatggaactgaaaatgttgtttcaggttcaaaagatgtaacatacaaatatttaaatcctttaacatctgtaacaacagatgaaaaagaaattacaattaaggctaatgaagaatcagcagttaacttaactttcgcaggtgaaaaatctgaagaaggttatagtgttactgaaccggaacttaattggacatattctacagatggaattgcaaaaattgagagaaaaacagcttatcagtggaagagggacgaaagtgcacctgacaataataactggcttccaggcacagattattacgtatacggcttaagtgaaggcacagttacagctacaggaacacccgttgataaaacaaataatgtagaacctgttgttttgacaataaagattgaagcaagtgaacaggaagcacctgatttgacagctcttacaaataagggattggaaggattcctttcatatgcagaaaagaatgttaaccaaaattatgacattaacggtgcatggaacctttatacacttgcaagagcaggaaaatctattacaattcaggaagctaacaaatactatgatgcagtagtagaggcaagcaagaattggacagtagaaggaacaaagcctaccgacatggaaaaggcagctcttgttttatcacttataaacagagacataacaaatgtagacggtgtaaatattgctcagttaatttacaacagtgaaaagttgtctgacggagcaaatgaattagcatatgctttattggcacttgatgcaagaaatacagtaattccaagtgatgctaagtggtcaagagagaagattattgcagaacttaagaaattccagaatgaagacggtggtatcggctggacaaagggttcgtcagatgtggatacaacagcaatggttcttcaggcacttggaagatatcaggataatgaagcagcaaaagaaatcattgaaaaagcattaacttatattgaatcaaaagctgacgcaaattatgattatggaaatgcaaacacaacagcaatggttgtacttgctttaacttcattaaacaaagatgtaacaacaacaattggtacaaaatataagaacacattaacagctttaatgagctattacagtgaagatgacggagctttcgtatatcttaaaggtggaaaagtaaaccagtatgctacaattcaggcagtttgggcattaacatcttacaagctttatacagaaggtaaggatggatactggaatcttaataatgttaagattaaatatgaaggtgaagatgagtattatgcctcacttgtaacagaaaagattgcagcaatcggcacagtaacagaagaaagtgaagatgcaattaaggaagcaagagcagcttatgatgctttaacttcagcacagaagaaacttgtaacaaactatgatgttttagatgaagcagaattacagcttgaaattattaagggaacagcagtaacaactaagttctcattagtaggtgatgacgttcatggttcatcaggacatgtttcatacagtacttggattgctaatgcgacaattacagttaagagtggttcaaaagcatcggatgtaattgtaaaagcatttaagcagtatggatattcaattatcggctcaacaagttatatttcaggcgtaacaacaccatcaggagtaagcttaaaggcatttgataatggttcaggcagtggttggatgtatgctgtaaatggaaagagtccaaacgtgggaatcagcggttacaaggttagcaaagacgataatattattctttattatgttgacaattggagcgatgctaaggttccaacagttgaggatcctgctgataatcagaaggcggcagatgtagtaattaagaagatttctgaaattggagaagttacagaaagtagcgaaaatcttattaaagaagcaagagcatcttatgacgcactaacagatgctcagaaagaattagtaactaattatgatgtattagtacaggctgaagcacagcttgaaaatataaaagacaatgcagtttcaactaagtttacattagtaggtgatgatgttcacggaacaaaaatccatacttcttatacaagatggattagtaacattacagtaaaagttagaaaagatgcaacagcaggagatgtaataacaaagggcttaaaggcaaaaggttatgaagcagaagtaaacgctgagtataactatattacagcaattacaacaccaacaggtacaaaacttgcagcattagataatggttcaaacagtggttggatgtatgccgtaaatggagaagctccaagtgttggaatggcagattatgtagtcaaggaaaacgatgcagtaattctttactatgttgatgattacatggatacaaagattcctgcaatggatgctgaaacagaaaacaaacagttagcagcagaagttacagaaaaaattgcttcaattggcaaggttacaaaggatagcgaagcagcaattaaggaagcaagagcagcttatgacagcttaactgcaacacagaaatctcttgtaactaactttgatgtattggaagaagcagaattacagcttgatattatcaagggtaatgtaatccagactaagtttactttagtaggtgatgatgttcatggaacaaatgctcataaatcatatactaactggattaatgatattacagtaacagtaaagaacggtgcaacagtatcagatgtaattgcaaaagcattaaaagacaacggctattcatcagaaggaacaactaactacatttcagcaatcaaaacaccatcaggaataactcttggtgaatttgataatggtccaagaagtggctggatgtacgcagtaaacggcaaggctccaaacgtaggaattgctgattataaagtaaaagcaggagacgcaataaagttctactatgttgatgattacacaaaggacgatacacctacaattgatgcttcaggagatacacatacaaagaaattatcacctgcaacagcaaaagtagcaaagacagcttacaatatagttaaattgacttggacaaaagccgacaatgctacaaaatatcaggtatatcgtaaagtcggaaagaacagcaaattcgtaaacattgcaacaacaacatcattaaaatacacagacaagaaggttaagacaggcaagaagtattattatagagtagttgcagtaaacgaaaagggcgaaactgttgattcaaagacagtaaaggcaacaccaaaggctaaaaagttgaaagttaaggcaaagaagaaagccggcagaacagtacttagctggaagaaagtaaaaggtgcaacaggatacaaagtatacagaagcacaaagaaaaacggcaagtataagaaagtaaagacaattactaagaagtcattagcaacattcaaggcaaagaagagtaataagaaatattactacaaggtagtggcttacaagaagtaatataggaaatattactacaaggtagtggtttacaagaaataagcaaattcagagaattataatgcattgaaatagtaaacgaagtttgtggtttgttataagttaaaatgtattatgtcttggaagaattgaagttaagaaagcttctcatactgaaaggtgtgggaggctttttttgcgggaaaagtaaagcaaccacaacaattcttattaggttcgaatgttgtggcgtatgaaaggaaaaaaattgaaaaagatgtcacaaaataattgaataacaggaaaaagtaccccgaaaaaagaagaatttaatatgccggggtacattagaaaaaatagcaaacaaaaaaggcatccaaccataagttgaacacctttttataactataaatcgttaattgaatcgctttacaattctaatcacaacgctatagaaatattataatcaatttccacaacaataaaacaagttaatatgttatttcattatcataaggcattacaaaagccataataatgtataagatgattcctgaaccccatgctaaggcaataattgctgtaattaatcttataacagttgggtccatgttaaggtattcagcgataccaccgcatacaccacatattttcttgtttcttgatgacttgtataatctttttttattcatataaataatctcctgcaataagtataagattagtatacctttgcttcttcttcaccattcataactcttaaagcaccctgtgcaagtgcaagtaattcatcttcaccagggtaaacagttacaggggcaatccattcaacagcattcttcatatctgcctgtgtcttggcactgtaagcaataccacctgttaagataatctggtcaacctttccgccaagaactactgacatggcaccgatttctttacataactgatagtggaaagcatcaacaacagcttcagcctttttgtcgccttcttcgatcattttaagtaaatctctcatatcgttagaaccaacataagcattgaaaccaccgttaccatttaacatcttgccaacttctgcctgtgtatatttgccactgaagcaagcttttactaaagcacctgttggaagtccgcctgaacgttcaggtgagaaaggaccatcaccatctaatgcattagcaacgtcaacaactttaccattcttatgagcaccaactgaaacaccgccacccatatgaacaacgattaagtttaagtcttcgtaattcttgccaacttcttttgcatatctctttgcaacagctttctgatttaaagcatggaaaatagaagttcttgggaaaagaggatgtcctgataatcttgcaacatcagctaattcatcaacaactaccgggtcaacaatgtatgaaggaacattgatttctgcagcaatttctgaagctaaaataccaccaaggtttgaagcatgctgtccctgttttccaacctttaagtcttctaataattcaggagttgtagcatatgttccaccagggattggttttaataaaccaccacgacctacaacaacatcaatatcatttaagtcaacattcttttctttaagaacatctaaaataacttctttacggaaatctttctgatcgtaaatagtatcatattttgcaatttcttctgttgaatgtctaagagtttcttccattaactgagtttcatcttcatatacaccaatcttagtagaagtagaaccaggattgataattaaaattttgtatgacatttttatacctccaataaattaaatgtattgtcatttatcacaatggcaaaagttaaataaacaacaattgcccgtttttataaatcaaaaattagattacttaaggttttcagcaacgattgcagcaagtgcaattgagttaacctttacttcgaattcatctgaacgtgatgttaagataacaggagcttttgtacctgttaaaatatttccgttaacacattcagcagtatgaactaaagctttgtatgtaatgtttcctgcatgaatgtcagggaataataatacatcagcatcaccaacaatctttctattagtagtacctttgtggtaagctgcttcaggttctattgcaaggtcaagtgaaagaggtccgtcaacgatacaacctgtaatctttccttcttcgttcatctttgtaagttcatcagcttctacagtacaaggcatctttggatttacaacttcaacagctgcaagtggagctacctttggacattcaataccacaagcgtgtgcaatttcaactgtattcttaataatctgagcctttgtatcaaggtcaggataaggaacaaaagcaacgtctgataagaataaaagacgatcaataccttttatttcaaaaacgcaaacgtgtgataatgttttgtcagttctaagaccaacttctttatctaaaacactctttaagaatgattttgtatcaataagacctttcatatacatatcagctttgccgtcatgaactaacttaacagcagttcttgcagcttcaataggatcaacaacattaataatttcgaattcgttaatattcatttttaaaacaccagcgattgttctaatcttagcttcatcaccaactaaaatagcatcagctatatgtctttcctttgctgccttaacagcttccaatactgcatcgtcctgagcacaggcaacagcaaccttcttcataggacatccagctacctgtgcaagtaaatctttaaaacttttactcattttgtacacctcatagaaatttatttgattatatatttttgataggaaataatcctaaaaataactaatttaaatactagcacgtcagtgtggataggtcaagaataatcgttgattgtgcccttaaatgcataccattattgtcttttggcaaaatataacttatacttaatgtttaggcaaaaacatacaaataactaataataaaaatgattacattgagtagcaagtgagttatgagagatttataaagtatttgtgattagcatttggtacttttggcagtgtaatcataaaacaggagaattttatgaagattttaagatttctaaaaaactacaaaaaggagtcgcttctggcaccattatttaaaatgatggaagcaatttttgatttgctggttcctttagttgtagcaagaattattgatgatggtatcagaaggggagatacaacctatgttttgcagatggggggtgtgctgttattgttagcagcgtgcggtttgactttttcacttacggcacagttttttgcggcaaaagcagcagcaggatttggtaaagaacttagacattcactgtttgatcatatacaaaaattgtcgtacactcagcttgacaatcagggaacatcaacacttataacaagaatgacatctgatgttaaccttgtgcagacacaggttaatatggccataagattattacttcgttcaccgtttattgtttttggcgcaatgattatggcattctttgtagatggaaagacggctatggtttttgttgtggctattccggttttgtcagttatagtttatggaattatgcttattacaattccattatataagaaagttcagtcaagacttgacaaggtcatgggaagtacaagagagaaccttgatggtgtccgagtgattagagcttttaataaacaggaacaggaagttgcaagatataatgaggaaaatgcaacacttgaaaagttccagctttttgcaggaagaatttcaacattaatgaacccggcaacttatattgtgattaacgttgcaaccattggaattttgtgggtaggtggagatagagttaacacaggaagccttacacagggacaggtcgtagccttggttaactatatgtcacagattcttattgaattaattaagcttgcaaaccttattataaatcttacaaaagcttttgcagcttcaggaagaatacaggatatttttgatattgagtcgggaatggcagaaggaaatattgaattaaatttagttaatgacaataattcaaatgatggaactggtaaattagccggcgaaaatgattcagataataaattaaaaaatccggaaaactacaacaaagacattgcagtggaatttgaaaatgctactttgaaataccagggcgcaggcgaaagttcaatagaaaatgttaattttaaggcaaagacaggtcagacaatcggtattataggaggtaccggttcaggtaagacttcattaatcaatatgattccaagattttatgaccctacagaaggaaaagttaagatttttggaattgacgcaaaagattataagagaaaaaatctggaagatattattggtgttgtacctcaaaaagcattattgtttaaaggtacaataagaagcaacttgctttggggcaatgaaaatgctacagaggaagaattagtggaagctttgaaattatctcagagttacgattttgtaaaagaaaaagataaaggaattgatagcgaagtggcgcaaaagggaaagaatttctcaggtgggcagaaacaacgtcttacaattgcaagagcgttggttaaaaagcctaagattttgattcttgatgacagttcatcagcacttgattatgcaactgatgcaaaacttagaagtgacataaaaacacttaaagatataactttgtttgtagtttctcagagaacagcgtcaattatggatgcagaccagatagtggttcttgatgatggaaaagttgtaggatttggaactcacgatgaattgcttaaagattgttcagtatatcaggaaatctatcaatcacagtttaaaaaaggagggcagtcaaatggaaaataatatgacacaaaaacaggcccttatggaattgttaaaaagaataaaaaaatattggcatttgttaataggttcattattgtttgccctggtttatgttgttttgtcactttatgtaccaaaactaattggtttaggaactgacaaaatagtatcaaaaggcaatgttgactttcagggattagagagaatagcagtgcagatagctgtaatcgccgcaattgcaggaattgcccagtggattatgggactgttaaacaacagaatcacatatcacgtgattaaagacattcgtcaggaaagttttgagagaatacagaaacttcctttggcttacttggatacacattcaacaggtagtcttgtaagtagtataattgcggacgtagaccagttagcagacggcttacttatgggattttcaaacttgtttacaggtgttgtcacaattgttttaacacttgtttttatgttacagattaactggaaaattgccttggttgttatttgtattacacctttatcgttttttgtggcgggatttattgcaaagcgtacgtattcaatgtttagaaaacagtctgaaataaggggtagccagacagcgtttattgatgaaatgataagcggtcagaaagttgttaaggcttttggacaggaagaaaaagccgttcaggattttgatgaaatcaacgatgaattggcaaaatattatttgaagggaactttcttttcatcaataaccaatccaagtacaagatttgtcaacaatatagtttacgccggagttgcaataagtggcggccttgtggcaattatgacaggaggaattactgtaggtggacttgcaacaatcttaagttatgccaaccagtacacaaagccttttaacgagatttcaggtgttgttacggaactgcaaaatgccattgcctgtggtgcaaaaatcttttcgcttattaatcaggaaaaagagattgatgtggaagaaagtgaaaatcagttccggaatattgatgcaggtagggttgacattaatgatgttgctttttcttatgtgccggatagaaaattaatcgaaaacttaaatctacacgtaaagcctggtcagagaattgcaattgttggaccgacaggttgtggaaaaactacaatcataaatcttttgatgagattttatgatgtggacaaaggttcaattacaatagatggaaaagatatacgagacatatcaagaaagaatttaagaagcttttatggaatggttcttcaggaaacatggcttagaaatactacagtaagagaaaacatcgcttttggaaagcctgatgcaactgatgaagaaatagaaaatgcagcaaaagcaagctatgcacataactttattaagcgtttgccaaagggatatgatacagtaataggtgaagacggaggcagtctttcacagggccagaaacagttattgtgtatagcccgtgtaatgttatgtctgccaccaatgctaatacttgacgaagccacatcttcaattgacacaagaacagaagtaaagattcaggacgcattttcaaaaatgatggaaggcagaactacatttattgtagcccatagactttcaacaataaaagaagcagacgtaattcttgtaatgaaggatggaaaaataatcgagcagggaaatcacgaagaactgcttgaaaagagagggttttactataaactttataatagctaaaaagagattgattaaccaagaagtaagtgtctatacacttaaataaaaataaaagaagaagcatgggataatcaaataaataatatctcagtgtaaaaatggagtttttatactccatttttatactgttttaaatttacactctcacgccatacaaaatatccaaacaccatcactattatcactccgcttattcctgcggaaaaaacacaaaaaactaatcccttgcaatcagtaaaactaaatatgtatgaaactaattttcccattatcagaccaattgcaatccaaagtgtaggctttacaatattgtcaattgccgaaaagttaaaatccacatatttatgaatataaaaactatgtaacaaagtcacaacaagattacttataagcaagccaatcagatacccttctaccccaaaaacaggaactccgaaccatagtgaggcaagtcgtattacaaccccaataacattgtgaataaaggcagcattagtaagccccagcccgtgtaagatggagccaagtgtaatggaaagatagagaaaagggcaaagccaggcaagaatcattatgtattcgccggcaagaggctgcctgaaaatatttgttccaataaaatcgccataaaaaagaaaaacaccaacacagaaaatccccgtaatcatagaaaaccaaatagaatattctgttgttttttttatgcctgaaacgtcgtttccggaatttgcacctgctatggtaggaagcaacatagtggaagcggaagtgtttatggcagaaggaaaagtaaccaccggaagggccattccggttaaaattccataaatacttaaagaatcggacagggataacccgctttttaaaagtacagttggaaaaataacagcttccaaagtctgtaaaaaagtaagcattattttgttcaaagtcaaaacataagaaacagaaaacattttcttcattacggaaaatatttcagatatcttaaaagcaaaaaaacgttcaccaaatattgcaatcaaacaaaaaataaccccgcacaattcagaaataaccatggaataaactgcaattacaggagtaatggaaatacatttttcaacccatacaagccataaaataaaaagtgaaataacttttgcaatctgctcaacaacacctgaccaggctggtacaaaagtttttttgaaacctaaataataacccgttatgcaggcgtgaaaagtggcaagtggaatagtgaaagaggcgtatttcaacagctcagtacaacttttgttttttataataaataacgaaacaggctcagcaaaaaaatacaaaactcccaaggtaataaaagaaagactaagtgacataataatactgctgataagcacaagaaaacattcctttctacttttgctttcagcaacaaagcgtgaaacagcaatttggactccaccgcaacttagggcaatgcaaaaaacaagtacaggaaaaattaattgaaaaactcccatacctttagcacctattaggttagaaaggaatattctatataagaaacctattattctgcttaaaagactagctatggtgagaataatagtgcctttaataattggatttttgttaagcatagtgtactgcctgaaacgcatttatataaaatattcaaaaaaacaggaattatgcaaaaacaataattataacaacataaaaagggcagacaatcaattgtttagaaaaaaactaaaatttgaacataaaacgaaaaatgggagaataatatgatttatttagataacgcagctaccacaaaaatatgtgaaaaagctgttaaagcaatggaaccttatttaaaagaagaatatggcaatccgtcaggaatttattccataggaagaaagacaagggagcaggttgaaaaggtaagatggacaattgcaaaatcgttaaactgcaaacctgaaaacattttttttacttcagggggaaccgagtcggacaattgggttttggacaacggcgcatatttaggtaatcacattataacgtcaaaaatagagcatcacgctattttaaataaatgcaaacagcttgaaaatgaaggaataaaagtcacatatgtggacgttgacaaaaacggttttgtggatatggagcaaattaaaactgattacaaagacggatttgaaaatcctgtgagaacttcgctggtttcaattatgttagcaaacaatgaaatcggaacaattgagccgattagaaatatagcaatggtggcacataggaaaggagttctgtttcatactgatgcagttcaggcttttggacacataccaatagacgtaaattatcttggagtagatatgcttagtgccagcagtcacaaatttaacggcccgaaaggagtaggttttctttacgtgagaaatccaaaggaaatgatgcccttgatttatggcggtggtcaggaaaagggcaaaagaggtggaacggaaaatgtggccggaataataggaatgggggcggcagttgaggattctatgagaaatatgagtgcccgctacaataaagagaaaaatctaagagattatatggtaaaaagaatacttggagaaattccaaacgtaagtctaaacggtcattacgcaaacagacttccaggcaacgcaagttttacttttgatggcataaatggaacatctctggtagtaataatggatgaagaaggagtgtgtatttctgccggctcagcctgtgctgcatcagcagaaaagccgtcccacgtaataagcgcccttggaataccgaaagaaaaagcctatggaacaattcgaataaccataggccatgaaaatacaagaaaagaaatcgattacaccgttgaaaaattaaaagccggtgtgaaagaactaagagcaaaaagctgaaaattaagttgaataatcatgtaaaaaatcaaatttaatttttgtagataaaattaagaatcaaatttaaatttgttaataaaatcaagttaaaatagaatattaagttattacaatttaaatagtaaaaatttttaatttatatttttcaactattttttcaaccaaatcaaaaccggaaccaataaattgggctttgtgagcatcggaacctacggtaacataaagcccaccaagttccttgtatcttctaattatatccgtgtgtggatttggaaaatcaaatcctttagaaaagtttgaagtgttaatttccaacttaatatcattttcaataatcattttcaaaatctcatctataacatcaatgtaatcagccacactgtaattattatccttgttaggactgtagcggacaatgtaatccaaatgcccgagagtgttgacagtgcggggagtggtgcaagtgtttcttcctataaaaaatttcaaggaatccaacaaagttttaaaataaagttcaaaacagtcacggtcattttttccttcccaaaactctgcataataaggatccatttggtcaacaatatgacaggagccaatgacaaaatcaaaatcgtaggaatcaagaagcttatggcacaaagaaaaattgtcagaagtaagccccagctcaacaccctttaaaatattgattttggaagaatattcattccttaaagaattcaaagcttcaaaatatttgggaaaatcaatataaggcgattccccctcaattggccaattaaagtcctgatggtcagtaaaacaaatctgtttcatgccaagagcaatagctttctcaacaatagccctaggagattcctcggaatcaaaagaaaaactgctgtgtacatggtaatctgaaaacatagtaaagtcctttctgtgtatgaatataagttgataatgtgcctgagctagttaaatattagcataaattagataatcacggtagtcacagaaaaaagaagttgataatccgtaatctcataaaatcgtatcaattttgctaatttgacaaaaatttaacaaaaaaccaaaaaataagcaaaaacaacttgatatttgcaaacttattatgtaaaataagcataggttaatgaaaattaacaatagcaaaaaaacttattataggaggacaattaaatgtcagtaaaagttgcaattaacggtttcggacgtattggacgtcttgcattcagacagatgttcggagcagaaggctatgaagtagtagctattaacgatttaacaagcccaaagatgttagctcacttattaaagtatgattcatcacagggtaaatatgaaaaggctgatacagtttcagctacagatgattcaatcatcgttgatggaaaagaaatcaaaatctatgcagaagctgatgcttcaaaatgtccttggggcgaattaaacgtagacgttgtattagaatgtacaggtttctatacatcaaaggctaaagcacaggctcatatcgatgctggtgctcgtaaggttgttatctcagctccagctggaaacgatcttccaacaatcgtttacaatacaaaccacaatacacttaagccagaagatacaatcatttctgcagcttcatgtacaacaaactgtttagcacctatggctgatgcacttaacaaatacgctccaatccagagtggtatcatgttaacaattcatgcttacacaggtgaccagatgactcttgatggaccacagagaaaaggtgatttaagaagatcaagagctgcagcagttaatatcgttcctaactcaacaggtgctgcaaaagctatcggattagttattccagaattaaacggaaaattaatcggttctgcacagagagttcctgttccaacaggttcaacaacagttcttacagctgtagttaaaggaaaagatatcacagttgaaggtatcaacgcagctatgaaggcagcttcaaacgaatcatacggatacaatgaagatgaaatcgtatcaagtgatatcgtaggaatgagatatggttcattatttgattctacacagacaatggtatcaaaggttgatgaagatacttatgaagtacaggttgtttcatggtatgataacgaaaactcatacacaagccagatggttagaacaatcaaatacttctcagaattagcttaatttctgatatttattattagatccaaaaagggtccggctgattgggccggaccttttcttttagagtggcaaattatcttagaatgaataatgggtaaaactttgtaagaagtgagagcttataattgagattacaaacagccacagaataaaacggataaatctaaaaagattaaatcaatgaaaggagcaaatttatgcttaacaaaaaatcagtagatgatattaacgttaaaggcaagagagttttagttcgttgcgattttaacgtacctttaaaagaaggagttatcacagacgaaaaccgtcttgttgcagctcttccaacaatcaaaaaattaatcggagatggtggaaaagttattctttgctcacatcttggaaaaccaaagggagaaccaaagcctgaattatcacttgcaccagttgctaaaagacttactgaattattaggtcaggaagttaagtttgctgctgatcctgaagtagtaggaccaaacgcaaaggctgctgtagaagcaatgaatgatggagatgtagttcttcttgaaaatacacgttaccgtgcagaagaaacaaagaacggcgaagcattcagcaaagaattagcttcactttgtgatgtatttgtaaacgatgcattcggtacagctcatagagcacactgctcaaacgttggtgtgacaaaatatgttgacacagcagtagttggatacttaatgcagaaagaaatcgatttccttggaaatgcagtaaacaatccggtaagaccattcgtagctatccttggtggtgctaaggttgctgataagcttaatgtaatcaacaacttacttgaaaagtgcgatacacttatcattggtggtggtatggcatatacattcatcaaagctcagggtggaaaagttggtatttcattagtagatgactctaagttagattactgtcttgatatgatgaagaaagcagaagaattaggaaagaaattattacttcctatcgatacagtagctgctgacggattcccaaatcctatcgatgctgaaatcgaaacaatgatcgttccaacaaacgcaattcctgatgacaaagaaggacttgatattggacctaagactcgtgagttattcgctgatgcagttaagaacgctaagacagtagtatggaacggacctatgggcgtttcagaaaacccttgccttgcagcaggtactattgcagtagctaaagctttagctgatacagatgctacaacaatcatcggtggtggtgattcagcagcagccgtaaacaaccttggtttcggtgataagatgacacacatctcaacaggtggtggagcttcacttgaattccttgaaggaaaagatttaccaggtgtagtagcagctaacgacaagtagagttaaggcaaatgagtccatttacacaaaaacaaatcaagaacaatgaatgttcgcattcattgttcttagattgatttttgtaaagttggcaaatgccagcgtgcttattgaagcagagcatcaataagataaggacattaaatatagaggagacattaacatgagaaagaaaattatcgcaggcaactggaaaatgaataaaactcctagcgaagcagttgctttaattaatgaattaaaaccattagtacagaatgaagatgttgacgtagtattctgcgtaccagctattagtattgtcccagctatggaagcagctaaaggcacaaacatcaacattggtgctgaaaatatgtactttgaagaaagtggtgcatatacaggagaaatcgctcctaacatgttaacagatgttggagtaaaatacgttatcatcggacattcagaaagaagagaatactttgctgaaacagatgcaacagtaaacaagaaagtattaaaagctttcgaacatggtattacaccaatcatctgctgtggtgaaactcttgaacagagagaacagggtattgcagtagactttatccgtcagcagattaagattgcattcttaaatgtaacagcagatcaggctaagaaagcagttatcgcttatgaaccaatttgggctattggaacaggcaagacagctacatctgatcaggcagaagaaatctgtgcagctatcagagaatgcatcaaagaagtatatgatgaagctacagctgaagcaattagaattcagtacggcggatcaatgaatgccggaaatgcagcagaattacttgctaaacctgacattgatggtggtttagtaggtggcgcaagcttaaaaccagattttggcaagattgttaactataataaataagtatatatatgagacggaatgccactagttggcattctgtcttgtttaatgaagggtaaaaaatgaaactaagaaacaaaataataaaaacagcagttatggtagttgctgtgtgtggaataacttttgcatttcaaactaatacatatgcaaagaagaattttaaagttaccccatcaaaagtagaaaaacagtcaaaaaagagctttagaacaataacaacaaaatatacaaaacattatcttggattaaatgcatttttagacaagatggaaaaagcaggtgggggaacccttacaataaagaagggaacatattatatatcaaatgccatttatgtgccatccaatacaacagtagtgtttgagaatggtgtagtgtttaaaaaaataaacaaaacaggaacaaactacaaggcgtcaggatcaatgtggcagatttgtccaagaagtaagagcaaaaaaaagaatagtataaggaaatataaaggtgcaaagaatgttacattcaaggccaaaggcaaggtaacattcgatatgaacaacattacagggattacgattgttgccgcacataatcagaatattgatatttcaggaataacatttaagaaccagaatggaaatcattatgtcgaagttaatggttcaaaagatgttaatatacatgattgttattttggaaagtctaaaaagagtactagagaaaagtactatatgaaagaagcaattaatattgacttggcagacaaggcaactcatggattgccacttgattgggttaagaaagacaaaacaccatgctgtaatgttacagttgaaaataatgttttcgacagtacaacaagaggtgttggaacacataagtattcacaaaacagcaaaggtgaaaatatctatcatcagaatataacaataagaaataatgaatttaagaatatatatgataatggagtttttgttttaaactggaagaatacaaagattgaaaataacaagttcaccaatattggtaattcatcaaagaagagctatagctcaggtgcacatgccatttcaggaggtggcattgaagaaattaatattacaggaaatacttttacaaagattaagagaaatcctgtatatttctgtatccagcaaaatgtaggtggcggaagtaactacaaaaaagttggaatgaaaataaaaaaggaagaaacaaaggcaatgcttgataataaagtttctgattgcggttatgatatgaatagcatattccacggatatgatattttgtattttaaggggtcaggagaaagatcaagatctaatgccgttggagtaaacataaataagcaaataatctcttatggattataaatatattaaaaaggagataagacaatgagcaagaaacctacagtattattaatattagatggttatggtttgaatgacaaaaaagaaggcaacgcagtagcattagctaacacacctgttatggataaacttatggctgaatatccatttgtaaaaggacaggctagtggcatggcagtaggacttcctgaaggacagatgggtaactcagaagttggacatcttaacatgggtgcaggaagaattgtatatcaggaattaacaagaattacaaaagaaatagaagatggaacattctttgaaaatgaagaattagtaaaagcaatggaaaatgcaaagaagaataacagtgctcttcatattttcggacttttatcagacggtggtgttcacagccatattacacatatgtatggaacacttgaaatggctaagaaatttggcctcgaaaaagtttatgtacatgcattcttagatggtagagatacacctcctgcatcagcagcagaatatatgcagcagatggtagacaagatggctgaaatcggtgttggtgaagttgctacaatttcaggtcgttattatgcaatggacagagataacaactgggatagagaagaaaaagcatatgtagcaatgacaaagggtgaaggtgttgaagaaacagatcctgttcaggctattaagaattcatatgctaaagacgttacagatgaattcgttcttcctacagtaattaagaaagatggacagcctgtagctacaattacagacggtgactcagtagtattctgtaactttagacctgaccgtgcccgtcagattacaagagctttctgtgcagatgattttgacggttttgcaagagaaaagaaattagaccttacattcgtatgctttacagaatatgatgtaacaattcctaacaaattaattgcattcaagaaagtagaagttaaaaatacatttggtgaataccttgcagctcacaatatgaagcaggcaagaattgctgaaacagaaaaatacgcacatgtaacattcttctttaacggtggtgttgaagaaccaaacgaaggcgaagacagaatccttgttccttcacctaaggaagttgcaacatatgatcagaagcctgaaatgagcgcaccaaaggtatgcgaaaagatggtagaagccatcaaatcaggaaaatacgatgtaatcattacaaacttcgctaaccctgacatggttggacatacaggaatcgttgaagcagcagttaaggctgtagaaacaattgatgaatgtgtaggcaaggtagtagatgcaattaaggaagtagacggacagatgttcatctgtgctgaccacggaaacgctgaacagttaattgactatgaaacaggcgaaccatttacagcacatacaacaaaccctgtaccatttattcttgtaaacgctgatccatcatacaaattaagagaaggtggagtgttagcagacatcgttcctacattaatcgaattaatgggaatggaacagccaaaagaaatgacaggaaaatcattaattgaaaaataataggataataattaaatgataaataatagaattagtgcaatatatcaattaagtgatatatagccaactaatagttattaggcaattaatagaacaattgataattgaaattctataaatatggttatacaaaagtcgctatgctaacggaaacggaagcgtagtggctttttgcttatgtacaaattttgatggcagagaacctgaaagtcaacttgcaaaggacatagacaggaaagtgtttgaagccagaaacaataaacagtggaggcgagagtatatgtcatatcagatggaattggataagcagtacaggaatgggcgagaagaaggtagagaagaaggaatggataatattagcaagttacttaagcttttagtgtcagaaaaaaagtatgatgaaatagaaaaaatatcagaggataaagagtaccaaaaggaattattgaagaagtacaaaataattgagtaaaaacaaatttagattattaataaaaatctccaaaatacgcatactgattaaaaagtgtattttggaggttttttatgtataagtatttgaaaattgttgatataagaggtcgcgaggttttggattcaagaggcaatcctactgttgaggcacaggtaacggtaaaggcagacggtaaggccggggagctttttactgcaatagcagacgtgccttcaggagcgtcaacaggaaagtttgaggcgatggagctacgcgatggcgacaagagatacaacggtgccggtgtgtcgcaggctgtagagaatattaataaggagatttatcctgctttggagggaatgaatggtctgaatcagagaaaaattgacagcaaaatgattgccattgatggaaccgaaaacaaaaagaagttgggagcaaatgctattcttgcagtgtctatggcgaatatgaaagcttgcgccaaggctttgaaactcactgaatatcaatacattggtggaatttgtggagaaaaaatgccaattccaatgatgaatattctaaacggtggggcacatgcgtctaacaatattgatgttcaggaatttatgattcttccagtgggcgcgcagtctgtcaaggagggcattagatggtgcgcggaagtttatacttgcttgaaaaaattgttaaagaaagataatctttcagttgccgtaggggatgaaggcggatttgcaccaaatctttcaggcgaggaagaagcactggacttgattatggctgccataattgatgcaggctacagaccgggcaaggattttatgatttcccttgacgtggctgcttctgagtggaagggtgacaggaaaggtcattatcgtatgccgaagaaaaatgtagaaatggacacagatcagcttatttcgttgtgggaagatattgtaaccaattatccaattttttcaatagaagatccactggatgaggaagattgggaaggctgggaaaaaataaccgctgcccttggcgacaaaatccgattagttggagatgatctttttgttactaatgtggcaaggctcaaaagaggaattgatgaaaagtgtgctaacgcaatccttataaaaccaaaccaaatcggtagtgtgatggagacaatcgaggcagtacgtatggcacaaagtcagggttatatcgccataatgtcacatcgttcgggcgaaacggaagacaccacaatagccgaccttgccgttgccctaaacacaggctatatcaaaacaggagcaccttgccgtggtgaaagaactgcaaaatacaaccagttgattagaatagaagaaatgctaacaataaaataacagataattccttctgatttcgaaacggaactctaataattttacttgattttaccatctatatatgctagaatcattatgtttgaatgcgttataggaggtggagactcatgacattattaagagtacttacagtagtatttgtattaatatgcttagcaataacagtagtaatcttacttcaggaaggaaagcaggcaggattaactggtgcaatcagtggtgctgctgactcatattggggaaagaacaaaggacgttctatggaaggaaagcttgaaaaagcaacaaaggttttcgtagtattattctttgtaatcgcaattgtacttaatatgaaattcttaggatattaatttgaaataataattagtccattaaaaggtgtaggtttctacaccttttttctatataaacaagaaaaactataaaaaatagatacacaagacaaaaaaaggattataatatcaatatagaaacaagacaaatttaataaagttattaaaagaaaagagcaaggttaatttttattacaaggtatgtgtcacacataccatataggagaataattatgaacgatataatggagaaaaagaagaaggtcattctcgaacttatgaatgacaagacatatataccaatgaagttcaaggaacttgcagtggttttaaacattgcaaaagagaacagggatcagttagaggaagtgctttctgagttgttggaagaaagaaagatttcaataaccaagaagggcaagtatgttattacaaaggaacattatatagaaggttactttataagtaatgatagaggtttcggcttcgttgaagttgaaggacaggatgaagattactttattccggaggataaggttaacggagcttttcatcatgacatggttcttattcaggttgaggatagccagacaggtaagcgtaaggaagcaagagttgtaaaggtgctttcacacgagattcagcaggttgtaggatattttcagaagtcaaagactttcggatatgtgcttcctgacaatcagaagattgctcaggacatttatattccgggaaaagatactatgggagctgttacaggtcataaggttgtagttcagattactgattatggtactaacggcagaaagccggaaggcaagattatagagataattggtcacattaatgatccgggagttgacattatttctattgtaaagaactatgatataccaacagagtttccggaagaagtaatgaagcagattgagaatattcctgatgaagttccggaagaagacaaggttggaagaaaggacattagagattggcagacagttacaattgacggtgaggatgcaaaggatcttgatgatgcagttactttaactaaagaagatggaatttatacattaggtgttcacattgccgatgtatcacattatgtaacagagaattcaccacttgacaaagaagcagtgaaacgtggtacaagtgtttatcttgtggacagggttattccaatgattccacacaagctttctaacggaatctgctcattgaatcatgatgttgacagacttgctttaagttgcattatgaagattaacgaaaaaggtgaaattattgaccacgagatagtggaatcacttattaatgttaatgaaagaatgacatatacagcagttaaggagattattgttgataaaaatcctgaaacaatggagcgttacaaggatttggttccaatgtttgaattaatggctgaattgtctgaaattcttagagaaagaagatacaagagaggggcaattgattttgaattccctgaatgcaaaattaaattaaatcaaggtggaaagcctatttcgattgagccttatgacagaaataaggcaacaaagattattgaagattttatgttggcagctaacgaaacaatagctgaagatttttattggagacagcttcctttcgtatacagaaatcatgaagagcctgatatggaaaaagtttcacagcttacaacatttataaacaattttggatattctgtaaaaatgtcaaaagagcagattcatccaaaggaacttcagaaattattaaagaatattgaagggactcctgaagaggcacttattagtagaattactcttcgttcaatgaagcgtgcagaatatactcctgagtgcaagggacattttggattggcagctaagtattattgtcattttacttcaccaatcagaagatatcccgaccttcagattcatagaataattaaggaagctttaaataataagcttacagacaagcatatttctcactttaatcatattttgccggaggttacaaagaactgctcaattactgaaagaagagcagatgatgccgagagagatactgaaaagttaaagaaggcagagtatatgatgggctatattggcgaggaatacgaaggagtaatttccggggtaacaaactttggaatttatgttgaacttcctaatacagttgaaggtcttattcatgtttcaaatatgatggatgatcattatatttatgatgaaaatacttattcaatgacaggtgagagaacaaagaagacttacaagttaggtcagaaagtaaagattagagtagaagcggccgacaaggttgcaagaactattgattttagtcttgcagattaaaaaatataagattattaaagatagctgtttggattaaaaatcaatattaaatattttaaagaatttatggtatagaggagatgtaatggcaaaaggttcagttagagttatagcaagtaataaaaaagccagacacgactattttatagaagatacttacgaagcagggattgtgcttcacggtacagaagttaagtcacttagacagggacattgtagtattaaagagtcttttgtaagaatagacaatggcgaagttattatttatggaatgcatattaatccttatgaaaaaggaaatatttttaataaggatccattaagaccaaagaaacttatgcttcataaatatgaaattaataaattagttggaaagcttaacgaaaagggattgacattagtacctttacaggtttattttaaaggaagccttgtaaaagttgagattggcctggcacgaggcaagaagttatatgacaagcgtcaggatattgcaaagcgtgacatgaagcgtgaaaatgaaagagaatttaagcatattcttaaggggtaataagcaattaagaatatgtttgaaagatataacagaatttaagagcatacttaaatgataaatatgtatatgtaatggattatgtatcagacagcaggaaggagaatatgatgtattcagagtcattagttaagttaggaaaggtacgttcagaaatcagagagatttttgaatatggtaataagcgtaaggcagaaataggagcagaaaatgtatttgattttagtataggaaatccaagcgttccggctccaaagattgttgatgacactattaaggatttggttgacaattttgattcagtggcacttcacggctacacatcagcacagggtgatgctcatgtaagacagagtatttcagattacattaatggtagatttggaactaagcttacagctaatcatatttatatgacatgtggtgctgcatcatcacttactatagttttaaatgctattatgttaccgggcgaagaatgtattgcatttacaccttacttccctgaatatggcgttttcattgaaagaacaggtgctaagcttgttgcagttcagtcagaagataagactttccagattgatatggagaagtttgaagctgcaattaatgaaaaaactaaagcagttattattaattcacctaacaatccttcaggtgttgtttacacaaagaaaacaattgaaaaaatgtgtgaccttttaagaaagaaagaaaaagaatacggtcatagcatttttgttattacagatgaaccatatagagaattggtttatgatgatattgaagttccatacataattaattattatcacaatactttcgtatgttattcatacagcaaggctttgtcacttcctggtgaacgtattggttatattgccgtttcaccggatatggatgatgaagaagatgcttatgcagcagtttgtggtgcaggaagagctttaggttatgtttgtgcttcaagtatgtatcagagagttattgaaaagtgtcttgatgctacatcagatatttcaatttataagactaatagagatcttttatataacagcttaacagatatgggttaccagtgtgtttaccccgatggagctttttatttgttcgttaaggcaatgtgtgatgattcacatgaattctgtgaaaaggctaaggaacatgaattattattagttcctgcagacagttttggtacaccgggatatatcagagtatcttattgtgtacagactaagcagattgaagatgctttgcctgcatttaagaagttagctgaagaatacaaataagttgtaaaacattacaggcttcaatttggattttaaagactaatattgtatttacaaattagattaattataaaggttgaaagaatgtcttggatttgcttaagatgaatttcaacctttagttttgcaaaagaaaggcaaaggtagttaaaatgagtggacagtatagctgtgagttttgtagtaactatgtttatgatgaagaatatgaagagtacgcctgtgttgtaagtatggatgaagatgaccttgcaatgcttatgcagtttaaaaaggcaacatgtccatatttttcatatggtgacgaatataagcttgcaagaaagcagtagaggtgaacatgaatcagcagacttataggaaaataacagatggcataaggagattagaaaatggcgagaaaatagttcagtttattaattccattgccacaaaaattgtatatatggcgtatgttgttggcattataattctttttgatgagaaaaataaaggacttgcaaggtttgtggctgtaacagccataagttttattcttgtaagcattgtcagaagatttattaacagtgagcgcccatatactatgtatgattttaagcctattatagaaaagaataaaaaaggggagtctatgcctagtagacatgttttttctgcgtttatcataggaatggcttttctttacataggagagattccacttggaataattgtttttgtttgcggtttaattattgcaattgtaagagttataagcggggttcattttcctaaagatgttattgtaggtgcattggtaggggttctgtgcggtgtagtaggattcttcacattttagagttgagggagttcaaagcaggtctcaaatcgcacaataaatgtttaaaatgggagtttaagtatggaagcaaaattttttgacgcaaaattagttttgcagtatttacataagaagaggtattaaattggaaaaacaaaataaatttgtaaaggatatgactaagggaaatccgatgcagctgttaattcagttctcccttccccttttagtaggaaatatatttcagcagttgtacaatatggtggattccattattgtaggtaactttgttggggccaatgcgttaggcgcaatcggtacaactaattcacttaattttttctttttctcattggtagcaggactttcagtaggtattggtattattgttgcccagtattttggttttggcgatgaagaaaaagttaaggatgcaatcggaaattcaatttggattattacagtatgttctgtaattatggcaattattggttttgtaactgcaagacctattcttgttttgcttgacacagacccggttattcttaatgatgcagtggcgtaccttaaggtagtatcaattggtattgtgtgtgtaggtttttataatggcgtgtcaggtatacttagagcattgggagattcaaagacacctttgattttccttattgtggcaagtgttttaaatgttatattggacttgatttttgtattaagctttggctggggcgttgttggcgcaggtgtggcaacggctttttcacagcttatttcagctttggcatgtattatttatgcatacaagagtaatacatattttaaattaaaaaagaaaaacataaaattaaatggcagtattattaagaaaagttgcaaattaggtattccggtagctttgcaaaacagtttgattgcattttcattaattgttttacagaaagttgttaacggttacggagctacatttacaacagcatttacagttgtttcaagaattgaaactttggttcagcagccttttatgtctcttggtgcagcagtttcaacatacacagggcagaatattggtgccgggcttaaagacagagttagaaaaggatttaattctgcaacattggtaagctcaatttttgcgctggcagttggtgtggttttctggatttttgcaccgtcaattgcgtccatattcggtaaagatgcagatgttataagaattggtgcaaacggtttaagaattacatgttgtttttatattttcttaggacttatttatacaacaagaaacgtgttaaacggtgcaggagatgctatgttttcactgtttacgggaattgttgagtgtattggaagagtgggatttgcttatcctatgacgcttataccttttatgggaaaatacggcgtattttatgcaacaggtttaacatggtttttgaatggtatgtttagccttataagatataaacgtggaaaatggaagaaaattgacgttataagtaaggttaagtaataagaattaattctgtttaaggtgttagtatggataaatcagtatatttttattaagatattatttgaaaagattcagcaggaatttcatttttattgaaaaagaccggaggtgaaaagatgtacgaaacagaacaggaaattgaaaaagtaatattggtagcagtttgttctaatcctaatcaggacccggaggaatcattggatgaattggaggaacttgttaaaacagcaggtgccatagttgtaggtagaatgattcagaatcttgagcatgcaagtagtgcaacttatattggttcaggaaaagttgaagaattaaaggatttgatttgggaaacagaggccacagctgtagtttgtgatgatgaattaactccggcacagtataaaaatctggaagatgaattagatgttaaggtaatggatagaactttaatcattcttgatatttttgcaggcagggcaaagacggcagaaggtaagattcaggtagagcttgcccagcttcgttaccgttccacaagacttattggtatgagaaatctttcacgtcagggtggtggtatcggtacaagaggtcccggagaaaagaagcttgaagttgacagacgattaatcagggatagaatttcccagttaaaatctcaggtggaagatttagagagccatcgtcaggttacaagagcaagaagacaggaaaatcctgtgccggtcatagccattgtaggttatactaacgcaggaaaatctacattacttaacactcttacagatgcaagagtgttggaagaagataaactttttgccacacttgatccgacaacaagaaattataaattacctgacggtcaggaagttttgcttacagacacagtaggttttatcagaaagttgccacatcatttaatagatgcttttagaagtactttggaagaagcaaaatattcagacattataattcacgttgtagacagttctaaccctgtaatggataagaatgttcaggctgtttatgatacattgaagaatcttgaagttaaggacaaaattataattactgtatttaacaagattgataagcttgaagaaaaacctataatgaaggattttaatgcagattatacggtggaaactgcaattaagaagggaataggcttggatgaattaaatgaaataattgaaaaagcattaaagtcaatgcgtattcatattgaaaaattattcccttacacagatgctggaaagccgggacttattagaaaatacggtcagttaattaaagaagaatacagagaagatggtatttgggtggaggcttatgtaccttcagaattaatggatagattatagtaataattgaaacaggtacagtatagttaggtatggggaaaagtagaaaatagtaaagagatattgtaagaagaatagaaaaatgaagcagaaggcttttcattggaaaaatccagtggagagccttattttatggaatgaaaaatagaataatttaccactttacaaacatacgttcgagatatataattgcattatcaaaagagcaattatttagttatggtttaatattatgaaaagaaaatatatttgtatagatttaaagtctttttatgcttcagtagaatgtgttgaaagaggacttgatcctatgactacaagattggttgtggctgatattgggagaacagagaagactatatgccttgccattacgccggcgatgaaggcattagggattaagaacagatgtagaatatttgaaattccaaagggaattgactatatagtggcaatgccaagaatgcagaagtatattgattatgctgcagagatatatggaatataccttaaatatatctcgaaggatgatattcatgtatattcaattgatgaagcttttatggatgttactgattatttaaacttatataatttgacagccagagaattagggcagttaattatgaatgacatatataatagtctgggaattagagcaacctgtgggataggcagcaatctttatcttgcaaagattgccttggacataacagctaagcattctaagaactttattggggaattagatgaagaaagctttaaaagcaagttgtggaattatagaccattgacggatttttggagaattggcagtggcatagcaagaagacttgattcttatgggataatgaccatgggtgatattgcaaagtgtcaggaagattttttatataatatttttggtatagatgcggaattgcttattgaccatgcatggggaagagagagtacaacaataaaacagattaaggcttataagccggggagtaatagtatttcaagtggtcaggttttggcttgtgattataatcataaggatggtgagattattataaaggagatggcagatattgtatgccttgaaatggtggaaaagaaccttattacaaaatcattgacgcttcatgtaggatattctaacagactaaacaggaaggcagcccacggaacggtaagtcttgattttgaaacgaattctgatttggtaataattccggcagtagttgatttgtacaatagaattgtgaatcctaattttcctattagaagagttaatttaacctgcaacggtgttgtgcaggaagagtgtaggcaatatagcttttttgtggatataggagaacttgaaagaaataacaagattcaaaaagcaatgatagagattaaaaacaaatatggtaagaatgcaattgtaaagggaatggatttacaggatagggcaactacaatggaaagaaatgagcaaataggaggacatagagcaggaagggaataacaatggcaggaagacctagaactaagatgagcatagaaaacagagccaaacaatttatgccttttgcagcattgaaaggtttgcctgatgctttggcggcaaaggagaaaatagtagttgaaaaaattgaactttccagtgacatggaagaagaattggaccgaaaaatgcacggactatgcaaagggatgattgctacagtagtttattttgaaaattatgaataccttaaggttacagggatggtggcaaagattgatattgataatagagtacttcagatagttgaccataagattagttttgaaaatatttatactttagattatattataagttatggtattgaaaaatagagagtacctagatacaaagtattgaaagaatatatttttaattaataggaaatgaatttcaccgtggggcagagatgcttggttggacattggaagaattaatagaaaataccattgaggcattaaagatatttagaccgtaaatagttaagaatataaaacataaagagtatagaatataaaaaataaaaaaagtatactataagtatatgtgtatgtatatgtatatgtgtatgtggtcttcatattcacagcatatacttataatatatttaataaaaaattctattgaaaatatttatgttttttgaatcaaattatattttaaatattgttgttgcaatgttaaagtatacaataatggaacaagtatctactaatgttgtgattaatggtgaagccattaatgcaggatcaaggcctatcttcttagcaaatagtggaagagtgcagcctatgatttttgaaagagttacagttactattaatgacagggcaattactattgcaagtccggaattgtgatattcaatgaatattctaagtccgttggctgtagcaagaacaatgcctacaataatagatatctgaaattccttaaaaactacacggaagaagtcaccaaaatgtacttcgtccaaagcaagaccacggattataagtgttgagctctgtgaaccacagtttccgcctgtatccataagcattggaataaaggaaacaagaagtggaattgcagcaaaagcattttcatattttgtaataatgctacctgttataattgatgaaaacataagtacaagtagccatgggattcttcttttggcgtgagcaaacgaagaagtttcaaaatatgttttctcacttggagcaacggcagccatttttgtaatatcttctgtagcttcatcgattacaacatccatggcatcgtcaacagtaactatgccaacaagtctgttgtctgtgtcaagaacaggaagtgcaagaaggtcatattttctaaaaagtccagcaacttcttcctggtcagtgtgagttgaaacagagataagttcagtttccataatgtcttttatgagagtattgtcatctgaagtcattaagtcttttgcagaaacaataccaatgagtttgcgctgccatgttacgtagcaggtatagatggtttctttatgaatacctgtttctttaatatggttcattgcttttgcaacagtccattcaggacttaaatcaacatattcagttgtcataatgctgccggcactatcgtcaggatagttaagcaactgattaataatgttacgctcgttctgtggagtgacatttaatatacgtgtaacaaggttagcaggaagttcctctaacatatcaaccgtatcatccatataaaggttgtctaacagttcacgtaattctttttcagaaaagatttccacaagtgtagactgcattgagctgttcatattagaaaaaacttcagcagccttatcttttggaacaagtctgaaaacaattgctatttctttgtcatctaactgtgaaagcagtgaggcaatgtctactgctttcattgtcattaaatcttcttttaattctttgaagcgacgttctgatagaagtctgataaataattcttttttcattttcataatacacatacctccaattaattaaattttttaaattaatataacaatgggctccagaatccataacctcacctcctttcgttgattaaaatcactattttaagaatataggaaacattacaaatgcaatcttttttacaaaattcaaacaaaataaaaatcctccaaagcctgagcaatgaaggatataaatcacaaataaaatcaccgttcaagctttagcatcatagggcgtatattaattgcattaggttatgccttaacgacacatcctgctaaccaactaattgtgtctccacaatctcgcggcagcaatcttaggattaaaccgaatccctatggtaacctcacctaccgataaagtagttatattttcttttcggactcataatacattcaaaaaatagaaaagtcaaccccctttttgataaaaatgtgagaaaaaatataatgtgaagaataaaattttaatatgcagaaaagtggaagccatgcgcagaaaaattgtgggcggagagtaagaagagcaggtaatagcccttgacaaaatttaacaaaaacactaaactaacatatgaatttaatatattcattcgctaggggtgcctgaaggctgagagattttatcaacccttattacttgatacggttaataccgtcgtaaggaagcactatgttggttaattatcctctggcgatttgcgtataatctaaggaggattttttttatggaaaaaacaaaaacatctacaacgatagttgagtgtgcaattttaattgctatggcatttgcattaagttttatcaagattattgatatgccttatggcggctcagtaacagcagcaagcatggtgcctattattgttgcaggatacagacatggtttaaaatggggacttttaacaggctttacatatagtattttgcagttgttaatgggacttgccaacgtttcatatgctacatcatgggttgcagcagttgcgattattttgcttgactatgttggagcttttacagttttgggacttgtaggaatttttaagaaaaacaagaatcagacacctgttttggtaatcggagcagcagttgtttgtgttttaagatacatctgccacgtaattacaggttgtactgtgtgggcaggagtttcaattccaacagcagacggaatggcatattcattagtttacaacgcagcatatatgatacctgaaacagtagtgacagtatatgtgattgcacttatttcaaatgcagtggatttgagagtggaaaagccggtaacaaagaaaaaatcagaaaacgttatggcaatcttaaatggagcattggtattcggcattgcagttttaattgacttcttatatttgttccagcagatacagacagaagaaggctttgatattacattaattgttaattcaaactggggacttgtagcaattatcacagtagtaggcgtggtagttggagctatagtatattttggaacaaaaattgtaagtagaaaaaaagcattggcttagaattgaagtgtaaaagaactaaagctgaagtgtagaagtactaaattatgaaagaactaagattgaagtacaagagtattgaattataaaagagctaaagttgaagtacaagagtattgaattattaaagcgctataaatggagattaagaaaggcttgttgggtaaaactgacaagcttttttttaacgggaaaatcttattgatagaagatatccaaatccaatcgaggtgtgaaaatggagaatttccttaaaataataagcttttaggaagaattgtttacaattatacaagcttttgtagaaagcgtttaagtaaaaattccaccattatcacattttaatattacaatatagtatgtgatataatatgaaacataaattagatactcataccccaaaaaaaatgaaaacaccctgaataatatagacaatcatccagggtggtaaaaaatcttttcaatagtgatatacttttctttgctttataaagaatgtagctgtgaagcatagtgtaagaagttcagccattgccacggcaatccatattccattgattccaaagattgcaggaagtataaggattgctgcaatctggaagataagtgttctaagaaatgaaatggttgctgaaataagtccattgcttagtgcagtaaagaaagctgaaccataaatgttaaagccgttaataaggaatgttacacagtaaattctaaagccatgtcttgtaagtaggaacaggtcgtggtcgtaacctacgaaaattgttgccaaaggcgttgaaataacctgagcaagaacaaacagaccaacagcccaaatgcttataagagacaaactcttttttgacatgttttgtaattctttattatttccggaaccgtaattgtagctaataattggcgcactaccaatagagtagccgatgaatatggcaacaaaaataaaacttacatacataattgttccataagcggcaacgccgtcttctcctgtaaacttcaaaagctgaatgttataaagtgagttaacaactgagcttgaaaggtttgtcataagttcggaagaaccgttggtacaagtcttaagaagaattgaaccattaaatttggttccaccaagtttaagcagacttgagttttcccttgaaaaataaaatatagggaaaagtccgccaataaactcgccacaaacagttgcaattgcggctcctgcaagaccaaagccaagtacggcaataaaaagatagtcaagaaccatatttgttacgccggcagacacaataacagcaagtcctaatttgggctttgtggcagttacaaaaaagctttggaaaacattttgaagcataaaagctgtcaaagaaataaaagtaatacgtccgtaaagaacacagttttccaacaattcaccttcagcgcccaaaataatgctgacaggacgaaccaaaaacattcctaaaatggaaaggattagtccaccaataatagttgtgtaaacgattaatgaaaaatattcgttggctttttcaggttttccttcaccaagagtttttgcaacaatggcgctgccaccggttcccatcataaatcccaaagcggtaagccccataataaaaggcataataagattgattgaagcaaaagctgtttttccaacaaagttagaaacaaaaagtccgtcaacaacgccatagatagatgtaaaaaccatcatgacaatagaaggaaaaacaaacttaagcagttttccataagtaaaatgttgtgctaatttagtatccataaaatctccattcgtaaattaaagttccttaaatttatttttcaatgcattattatacttctcgtaaagttcaagcattaaacggcattcttcatcggtcatacatagaaatgcttcgttttctttttttataataggataaattttttcatccaaaagctgcctgcccttatctgtaagaaaaatctgcataaccctgccttttcccggtttaaaagttaagtagttaagacttgccatttttttaatggaagaattaacagtctgctttgaaaggcatgaatatttgcaaatatcactctggaaacaaccatctcctaggtcaacaatagaatacaaaatgtcaaaggcgctgtctgaaagccccattttcagagtgacttcgtgataaatttcattaaactctttgtatatgtggttaaacatagaaagagcaggactcattttattttcaaaagatttattcataataaaaataagcgatgaaaaacatcgcaacctcctcgtgtttatagtccgaaatcatacttaaaaaaagtatagtccgaaatcggacataagtcaaacgatttttaagaaaaaataaaaataaattgcctttttgtagttaaatacatataatataagtacaaagggatatagcttgcacaaataaattaagataaaggaatgaaaacatattaaagcaatacttatcccgttaggaacgttaatatatgaacaaagattttttttcaaaagagagatttaaatacataataattttggcactgttcaattatatttttcttggaacagaatatttatttgataacattgtgggagacataaagccacagtcagttgttactgcgcaaagctacattttgggtgcaagtgtattgggctttttattttttgccattataaaaaaatatataaataaaaaattaaagtatggcttattgtcagcgtttgtcgtagtggaaacgttgctttttgcgcttatggagtatagtgaaagttatggatttgtggtaatcacaggttgcgtgatgtttgcattatttggagtaatgggcagcgcagtttattatattgcatcgatttatttaaagagtaacagaaatgttgcaagcacaataggtttggcgtatggtctgggaataatgtttcagttcggtgacaataatattgttgcttctaaaattgcaagattgataatttttgcgattgtgcttgttgtatggattgccataatattaaacttatatttagaagaaaatgcagaatcccaaaatgaaaaatcaagaaaagtgaaatatgaaaagacagaatcaaaaaatattgaatgtaaaaacacagcttcaaaaaatgcagaatataaaaacagccgtataacagcaattgttcttataattacaataatgcttatggcatgtattttttcaacccttgacaatattgtcacatattatcattcaaagggaataatggatattgggcagtatccaagactgcttttggcaattagcggcgttgtggcaggagttttatttgagttaaaagaaagaaaactaatgtgcctaataatgtatagcgtaacgttgctatcaacaatatgtatgctggtaataacaatgggcgagccttttataatcggattggttgtgttttacttatcagcaggtttcttctctgtatttttcactacagcttttgtgaatttatcatttgaaatgaaaaccccggaactttgggcaggaatgggaagagcgaccaacaacctttgcgcggcattaatgggaacggtatttttctcattatttaattcaacaaatatgcttagcaacagcattgtcataattattttgtttgtttttgtaagcatttttatggcaatttattatggaaaaaattcgaaaaaaagttacgttgcggaaagtttggagagcgatgacaacaaaatggaaaattttgtacagcagttttctttgtcaaaaagagagtgcgaggtgcttgagactttgcttaagtcggacaaaaatgtaaaagagattgcacaggaactttatatttcaagagcggctttgtataggcacatatcaaatatgaacgagaagactgacacaaaatcaagagaaggtctcataaaattctattatcaatgggaaaaaagtgggaaaaattaactttgagacatatgtaaacttaaaataaaagcctaaatatggcacattattcatagattctattggaaaagtttgaaaggagtaatctatgaagaaatttttaagtttattgttaagtattggattggttataggaatggttcctatgaatgtaatggcacaaaacggaccgtgccaggatgagtacccaccggcgtatattgaattttttgacggtgagaatggaacttatatttattctactttttctcaggatcagattggaaaaattaaaggtgtaagttacgacaaggcaagcaacactcttacattagataatgtaaaaagagacgaaaagctaattacgaatgtaatgggcgacgatttcaagattcttttaaaaggtgataattcccttaagtcgattattgtctggggtgacggttatggtggaaatcttacaataacaggcgatggcaaacttattcttaatagtgaaaaaacagagaacatggcaataaccattcaggctgaatatactgaaggcaaggttaaaatagagaaaaatgttcagatggagatgtatgccaaagaaggttatcctattattgaaattgtaggtgcgaacaattctgataaagacaaagcagttgtaattgatggcaaggtaacacaaaattatgaagtggaacaacatattactgaagtgacaaataatgtgtatgttgtggcaaaggattcaacagccagatgttattttactaagtttgaaaaaaacggcaaatattatggtggacgcagcaaatttgatgataattttaaactcacaggccgttatgatatgtttgaaataattgaagataaagagttgggctatgttgcaaggcaaattgaagaccaaagtaatattgtgcctgaagaaaatggctacacaattgtaatgaaggatgagtataacgaagatagtttcacggacacgctggaacttgacaaatggaagtattcatatgaaatttatacttatgatggaaaagagtatggtgtgttggaaatgactgttacttcaaatggtgtaacaagacattttttcactgtagttaaatttattgattttgaagactatggaaaaatagcaattccaattgaaggatgggaagaattggacgcattgcctgagggttttgtaagaaaaacatctgatccttacaatctttatggatatacaataatgcagcagacattaaatataaatagggataatagtaaccctggcacaacagagcctggaactactgaaccgggtggaaacaattcaggagtaaataatcctggaacaaataactctggtgcaaataattctggaacaaataattcaagtaccattaaaccgggcgcagaaaataatttggttccgggcaaggctaaagcacctgctgtaaagaaagcaaaaaagaagtctgtaaaattagtttggagcaaaataaaaaatgctaaaaagtatcaggttcagtattctttaaacaaaaagtttaagaagggtaaaaaatacggaacaaaaacagtaacaacagcaaacattaaaattacaattaagaaattgaataagaagacatattatgttagaatccgtggtataaacggaaaaaacattggaaaatggtctaaagtaaagaaaattacaatgaagaaataataatgaaaaataacaatgagtaataaaaggtattggcaaaaaacaaaaggtactaaaaattttatgaaaattgtttggaaaaggctggaagttatgattaggtttgctacagaagaagatgcagaagagttacttagaatttattcatattatgttgaaaatacggcaataacatttgagtatgatacgcctgcgttggatgaatttaagtatcgtattagaacaataaaggcaatgtatccatatttggtttcagaggttgacggaaaaatagtaggctacgcctatgccaacacatttaaggatagggcagcctatgattgggcagttgaaacaacaatctatttagataaggatgcacggggaaaaggctatggcaaggaactttacgaagctttggagaaagcactgaaagcccagaacataacaaatctttatgcctgtattgggtatcctgaagtagaagaccaatatttaacaaagaatagcgttcaataccatgaacatttaggctatagatttatcggcacattcaaaaaatgtggctacaaatttaacagatggtacgatatggtatggatggaaaaaatgataggagagcacagcaagaaccagaaagaagtgattctttttagagagatagaaaagaattatgaattttaactgaattttggtaaattatgttgtctttaagaatagttataggattacaaaaaattgaaaacagtttaattggtggagagggtgattcgaaccctctccttttttaataaaattaatagcgttacctattccccacattcaattactataacttcacaactatctaatttaagtgaaacttcattaatttcctttcttccaacatttgaaagaacaacttttttaacaggaaacttcaattctatagttttagcatcttttccaaagtttgcagctacaaggatgcgctggttgtctgacactcgataataagccattacatattcagtatcttcataggcaggttcaaatacaccgtaagtgaatacttctttgtattcaggagatttacgcgtagccactaactttcggtagtaatttaaaacagagtcagggtcgttttcctgattttgtacgttaatgtccttatagttagaattaactttaagccaaggagttcctgttgtaaaaccggcattatcagaatcactccattgtacaggagttctggcattgtcacgactcattttgctacatacagccaaagcttctttatctgacagaccggcacttatggcgagattatactggtcaattgtgttaatgtcgttatattctttaacatcgttccaaacggcattctgcattccgatttcctgtccctgataaataaaaggaattccgcgaagaagtacgcttacagttccgagcatctttgttccaagaggatttcttgcatattcaggcaaaaatcttgaaacacctctaggttcatcatggttttcaataatattagcttcaataccacatttttgaacctgaagctgtgagtttataatggttttacgccaatcattaaaattaatatcaggtgcatcgtaccagccatgggcaccgtcgctaagggtatgggcactaaaatcaaaaatagtagagaagtgtccgttttcgccgataaattgtgaaagctcatctttatgcatattgaaaacctcagcaacggtaaaggcatcgtacttttcaaaagtatttttcttaaggtcttctaagtattcaccaacaccttcaacattttcaaccattctccaacatccggcaagaccgtctgcaccgtcaggttcaagattaggaaagtctaaatcttttttgatgttaataattgcatcaattctaaaaccggccaaacctttttcaagccaccagttaatcatatcgtagagtttcttgcgtaatgtaggattttcccaatttagatcaggctgttctttggcaaacatatggaaataatatttgtcagttccaggaaccggttcccaacaattgccaccaaaataagaacggtaattgctaggtggattgccgtctttaccttttctaaaatagaaataatcggcgtattccccatcagggtcagctaaagctttttggaaccattcgtgtttatctgaacagtgattaataaccaagtccataataatatacatattacgttttttagcttctgccagcaattcgtcaaattcttccattgtaccaaattcttcagcaatagaataatagtcagaaatatcatatccctgatctacaaaaggtgatttgtaaataggagaaagccaaataatatcaactcctaaatcctttaaataatcaagcttagaaataatacctcttaaatctccgattccatctccattactgtctagaaaactttttggatatatctgataagctactttgtcatgccaccacttttttttcattgcttttacctcgttattgccatattaattaaggcaaactctttcttttgtattgattatttgattacacggattattccatgccttgcaatctcacaattctttaattatagaatcatattgtgaaatattgctttgtgtattatactgctattataaaataaaaaaaactataattcttgcataatttttacaaagtataacacaatactgcttttagaggagagatttatgataatgtttaaaaattaatctctggcatcttttctatatttacccggtgtaattccgtatttctttttgaaacacctgttaaaataggacaaattatcaaaaccggtatttattgcaatattaattatgtcatcagaagttgtggtaagaagttttgctgcaacttcgagtctgtaatcgttaagatattgtacaaaactcatccccatagtttctttaaagaacttcataaaatatgatttactatagaagcaatgaccggcaatttcttctatggagatattatcatgaaaatgttcagcaacataagaaagaattgtttttattttttcaagagcttttttgctaattggtttaatttcatttcgcccacaattggatatcagaaggtaaaaaatctgaaaaagataagatttaacagctagctgatatgcataaggacgtttgtcacacaatttatctatttcgttaattaaagaatagagagaatcgtgaaaatcaaagttactattaattacaggatatatatttagatttcctgaaagtaaaggttgaataaacttgtcattgcacaaatcatagcctgaagatttaagaagacttgatttaaaaagaatattttcatattccataatactataatctttttggctaatagaatgaagttgtcccggaaagacgaaaacaacatcaccggcgttaacagtatacgttacaagattaacattaactaacccctgtccttttttgattacaattagctcaacttcgttatgccagtgaagattaactgatttgaaatctagtggaatagagcacaaataagtattataaggaaaatcattgggcgtatgttttttgttttcgtggtaaatttcgtattgattcttctccataaagtacctcccaaaatcaaaaaagatagtattgtgcaaaaaaacaaaactataatgcaatatttttaatgataacaatattataatataatcacaaacataaaaccacatttttttaggaggtattaaaatgaatctttcggaaattattaaatcagagtacaataagtcaatttcagaatgtacaaacgaggaaatttacaatgctttacttactttggtaaaaacaatggcagaaggaaaacagcataaaaattcaaagaagaaattatactatatttcagcagaatttttaataggaaagcttttgtctaataaccttattaatcttggaatttatgatgatataaaagaagaacttgcaaaaaatggcaaggatttatgtgaaatagaagaatttgaaaaggagccatctcttggaaacggaggacttggaagacttgcagcttgctttctagattctattgcaacattaggacttaatggtgacggagtaggattaaactatcatttcggattattcagacaggtatttaagaataatgcacagactacaattccagatccatggcttacagaaaaaagttggcttacaaagactgatgtaacatatacagttaagtttagagatatgaatgttacttcaagaatgtatgatattgatgtgacaggttatgacagcacaactaataaacttcacttatttgatattgaaagtgtagatgaaaatattgtagaagacggaattaattttaacaaagaggatattgaaaagaatcttacactattcctttatcctgacgacagtgatgatgcaggtagaattcttagaatttatcagcagtattttatggtatcaagtgcagctcaattaattcttgatgaagcagtagaaaaaggatgtaagttatatgacttagctgattatgcagttatacagattaatgatacacatccaacaatggttattcctgaacttatccgtttaatggtagaaagaggacttgaaatggatgatgccattgaagctgtaacaagggcatgtgcgtatactaatcatacaattttagcagaagctttagagaagtggcctatatcatatcttaagaaggcggtgccacagcttattcctattattgaagtattagatgataaagtaagaagaaagtatgatgatggttcagtttacattatcgatagggaagaaagagtacacatggctcacattgacattcattattcatcaagtgttaatggcgtggcgtcacttcatacagatattcttaagaatgtagaattaaataatttttataaaatctatcctgaaaagtttaataataagactaatggaattacgtttagaagatggcttattcatagcaatccacagcttacagagcttattacatcacttattgggaatggatttaagaaagatgcaacagaattagaaaaacttttggattataaagacaatgaggaagtattaaacaaaattcttagtattaaaaacacaaagaaagtagaattaaagaatgccttaatggaaagacagaatgtagaaattaatgaaaactctatttttgatattcaaattaagagacttcacgaatataaacgtcagcaattaaacgcattatatataattcataaatatttagaaattaaagcaggcaaaaagccaacaactccaataaccgtaatttttggagcaaaggcagctcctgcatacattattgcacaggacataattcatcttatactttgccttcaggaattaataaataatgaccctgaggttagtccatatcttaaagttgtaatggttgaaaactataatgtaacatgggctgaaaagttaattcctgcatgcgatatttcagaacagatttcacttgcatcaaaagaagcaagtggtacaggtaatatgaaatttatgcttaatggagcagtaactttaggtactgaagatggtgctaatgtagaaatccatgatcttgttggagatgataatatttacatttttggtgatttaagtgaaactgttgtagaaagatatgctaacggaagctattgtgctgcaaagtactataacaataatccggttattaaagaagcagttgattttataacaggaagcgaacttatgtccataggtgacaaggaacgtcttgaaagactttcaaatgaacttattggaaaagactggtttatgacattccctgattttgatgcatatgtaaaaacaagagagcaggcctatgctgattatgaaaatagacatgattgggctaagaagatgcttgtaaatattgcaaaagcaggatatttctcatcggatagaacaattgaagaatataatagagatatttggaaattggaacagtagcatattatgctcagataataaataatttttagctttaaaagagaagtcgcacatataagtgtgtggcttcttctttattaaaactgaattaaacaaatctaaaatatatggaattaaatacttttaaaatcgtatctgaaaactataaaaatcaagaaaaaactcaaaaaaaataccaataaaacaaaaaaaacactctcatataatagcatattcactagaaagaaaaataacaaatatatttcatatgcataaaaaatatataaaaacgttactaatactatacaatatgcacaaaagaaagaactgaaaattagctaaaaggccgaattgtgaaaaaaaggtgaaaatagtattgtaaacgtttccgaaaagtgctactatcaggacataggaaacgtttccaaataaattgtaagtaccaacatttatttgaaaatgacggataacctaaatacatattttaaataaaaaggagaaatgaatatgcgtaagaaattattaagtgtagcattgtgtgcaacaatggtagcagggttattagcaggttgcggtagcagttcaaagagcgacaaagcaagctcagattcaaagggttcagtttactggttaaactttaaaccggaagcagatgaagctttacagggaattgcaaagacatacgaaaaagaaaatggagtaaaagtaaaagtagttacagcagcttcaggaaactacaattcaacattaacatctgagatgggtaaatcagcagctccaacattatttgttgttggtaaccaggcagcagttaagacttgggatgattattgcatcgatcttaaagatacagatgtttacaaagaattaagtacagatgcatttaacttaaaagatgaaaacggcaaggttgcgtcaatgggttattgttatgaaagttacggaattattgtaaataagaaattacttaagaaagcaggatatgaaattacagacattaaggatttcgcttcattaaagtcagttgcagaagatatccacaagagagcagacaagcttggatttgatgcatttacatcatcaggtatggatgacgcttcatcttggagatttacaggtcacttagctaacatggctttattctatgaaggaagagatgacggatggaaggatgcccctgcagaaattaagggaacatacttagataacttcaaaaatgtttgggatttatacatcaacaacagcaaatatgacaagaaaactttggcaacaggtggttacgatgctgaagccgaattcaagaagggtgaagcagtattctaccagaatggtacatgggaatatgatgctttgaaaaagtcaatttcagacgatgatatgcagatgattccaatttactgtggagttgaaggtgaagaaaaagcaggtctttgttcaggaacagaaaactgttgggcagttaatgctaaggcttcaaaagcagatcagaaggcaacacttgaatttatgaaatggttagtaacatcaaaagaaggaacaaaagttatggcagaacagtttggtgcaatcccttataagaaggcagcagacagcggtaacgtattcttaaagaatgctaacgatttacttgaagcaggaaattacaatgtagactgggcatttaactacacaccaaacgtagatgaatggagagcaagtcttgtagcagcaatgaacaaatatgatgcaggcggatcatgggatgatgttaagacagcattcgttcagggctgggctactcagtacaaagcagctaacaagtaataaggttttagattgataaatataaaatcataattaaattattaacacattgtggggcaggcagtgtctgcccctttattaaaaaatacaaaaattttgaaaattctattttgaataagaattaggaggagattgaagtgaaaggaaaaaagaaaaaacataatggtggaacatctgtaaattctaaacttcttcgcaaacctattcaaagatgctttcttctatttttagcacctacatttttagcattttgcattggatttatatatcctttcttgagaggtatttatttatcattttgtaaatttgttacaataggtgatgcttcttttgtaggttttagaaattatatggatgcatttaatgatgcgtcatttatacatgcattttggtatacagctttgtatgcaatagtatccctatttataataaatgtgttagctttcttaatagcatatttattaacattgggtattaagggagcaaacttattcagaacagcattttttatgcctaaccttataggtggtattgttcttggttatatttggagtatgatttttaatggcgttttaggaaaaattaatacttcaattcttatggaaacaagatatggcttctggggattaattattcttatgtgctggcaacagataggatatatgatgattatatatattgcaggtttgcaggcagttccgggagaattaattgaagcagcaaaaattgatggagcaacaaaatggcagacattgacaagagttacaattccaaatattatgccatcaattacaatttgtttattcttaacaataacaaatggatttaaactttttgatcagaacttagctttaacaaacggacagccgtttgaacagttaaaggatggttcagttataaagacaacagaaatgttggcacttaacatttacaacacattttacggacagtctcttacaggtaagggagttgcccaggcgaaagccgttatattctttatcttagttgcaggtatatcaattatccagcttaaggcaacaagatctaaggaggtgcagcagtaatgaacaatgagaagacagtgaattcaacaattaaagattctacagtgaaagctacaccgaaaaagaaaaaaatgaaagagacaagtgaaattccattaaaacatggaaaaatgttgactacaataatgacaattgtaactttagcttatgttagtcctatatttattgtgttaatgaactctttcaaagctaacacctttgtaaaaacagacacatttgcatggcctactggtgaggcgttagtaggttgggcaaactatatcaaaggttttacatttggaaattatccgttttttaaatcggtattatatagttttgtaattacagttttatcaacagcgttgattttgatttgtacatcaatggcagcatggtacatagcaagagttgacagcatggtttgtaagatagtatattacttgtttgtattttcaatggtagtaccattccagatggtaatgttcacattgtcaaatacagcagattcattgggacttaatacaccttggactattccgattatatatttaggatttggtgcaggtatggcagtatttatgttcacaggatttattaaaggtttaccacttgagattgaagaagcagcagcaattgatggatgtggaccaatcagaacattctttattgttattattccaatgttaaaaccaacattaatatctgtaggtattcttgaaattatgtggatatggaacgattacttacttccatatttggttcttgatcttgataagtacagaactattccaattcatattcagtacttacagggaagctacggttcagtagatttaggtgcaataatggcacttatcattttaagtattatacctgtaatattcttctacttaacatgtcagaagcatattattaagggtgtagctgcaggagcagtaaaaggttaagtaacatataaggagaagctatgagggctagtggaattttattaccaatttcaagtttgccgggaaaatatggcattggaagtttttcaaaggaagcatataagtttgtggattttttgaaaaattccaatcaaaaatattggcagatactacctataggaccaacaagttatggagattcaccatatcagtcattttctacatacgcaggaaatccttactttatcagtttagaagatctaatagatcagggattattaacagaagaagaatgtaaaaaggtaaagtttggcaacagggctgacacagttgactatgaaaaattgtataacggcagatttaaacttttaaagaaagcgtacaagaaaagtaacattggtgaaaaagaggagttcaaaaagtttaaagatgagaactgctattggttaaatgattatgcaatgttcatggctataaaggaaagatttgaaggcagaagctttgataattgggcagaagatataaagcttagatggaaatattctatggaatattacaaaaaagagctaagcgaagaaattgaattttatgaatttgtccaatatgaattttataggcagtggtataaattaaaaaaatatgccaacgacaatggtataaaaattattggagatattccaatatatgtggcttatgatagtgcagatgtttggtcacatcctaagttattccaaatggataatgtgggaaagcctacagctgttgcaggttgtccaccggatggattttctgcaacaggacagctttggggaaatcccttatacaagtgggaatatcataagcagactaattatgattggtggataaagcgaatagaaagaagtgttcagttatatgatgttgtacgaatagatcattttagagggtttgatgaatattattcaatacctgcaggtgataaggatgcaacgaacggacattgggagaaaggacctggaatagatttatttaatgctataaaatattgcttaggtaatgttaatattatagctgaggatttgggatacataactgattcagtaagacagctggttaatgattcgggatttccgaatatgaaggttttggaatttgcttttgacagcagggattcatccggaccgagagattatttaccatacaattatgacaaaaactgtgtagtgtatacaggaactcatgataacgaaacgttaaagggatggttagacagtattaaatcggaagaaatagagatgattcaaaaatacataggaagaaaagtagaagacaagtcagaattagttgatgaagttattcgcatggctcaggcatctactgccaatacatgtattattcctatgcaggattatttacatcttgataacaaggcaagaatgaatacaccatcaacgttgggaggtaactggtgctggcgtgcaaaatccacacaaattacaaagaaattatccaatacaataaaagaattaacagttatttatggtagaggataaaataataaaaagctgcgaaaattaattttcgcagctttttgcataaataacatgtatatgatagaataccagattgtggaattaaaaaatatataattatatataacgaaaggggaaagacgtggcaaatttaactattaaagacatagcgaaaatatgcggagttggaattagcactgtttctcgagcaattaatgatgatccaggcattaatcagaataccagaaaaagaattcttaaggttataaaagaatataattatgttcctaacaatagtgcaagaaatttgaaaatgacagaatctaatacgatagcactgttaataaaaggtattgataaccagttctttcagggaatgttaaaaatatttgaggaagaacttaaaaaacatgaatatacatttttgcttcatgcagtaggtgaggaccaggatgatgtaagtgtagcagtacagcttgcaaaggagaaacgattaaagggcttaatttttcttggtggacagatggattatcttgacacaaggcttgaagaaataggagtaccatatgtactgtgtactgtagctgttaatatgacagcaccaaaaagaaagtgttcatcagtttctattgatgataaaaaggaaagctacagagcagtagattatctttgcaaaaaaggtcataagaagatagctatgatttcaggtaaaagtagtgatcaggcagtaggtggtcttcgattaaaggggtacagggaagctttggcagataatggcattaaagtgaatgaaaaccttgtaagatatatgaaagatgatattcctgaatattcagtggcaaacggttatgaagtaacaaaagaattattgcagtcaaaagaagagtttactgcactttatgctatttctgatttgacagcttttggtgcatataaggctatttcagaggcaggtaagaaaataccagatgattattcagtgttagggttcgatggaattgaaatgtcaaaatattttcagccatcactttccacaatgaagcaaccatgtgaacagatggtaaaatcatcaatagaactattaatggatatcataaatggaaaagatgaaaagaagcagttgattttccaagctgaacttttggagagagattctgtaaaagaaatataaaaatgattaaagatcgtatttgcgtcttgtataaaatgattaataattgtacttgtgtcttgttatcagaagaaaaaaatagacttggagatattaaattaagtataagagcagtttagagagggaaaaacagtgtttggaatagacagtaaattttatgaagtggtatcaagaatagcggatttggtagttttaaatttgttatttgttttatgctcattgcctataattactataggtgcttcaactacagcactttacggggtgaccaagaagatggcagaaaacagagaaggatatattttcagaaactatttcagactgtttaaagagaattttaaacagtcaacaattatgtggattatattattattgttggcattaataccaacaattgatttgtacataattaatagttttgaaaaaacaatagtaacaacagtgctaaaaggtttaatgcttgcagcagcgcttgctattttgtttgtgtttttatatgcaatggcacttcaaagtacatttgaaaataccatcaaaaacacactgaaaaacgctttccttatgggaataggacatttcccatggacactgttaatagtatttataacattgttgcctattatattgcttgtgctattaggtagatccgcaggaagcgttgtttatgtaatgctgtttgtgggattcgcagtgcttgcctatttaaattcatatatattcaatcacatctttaagaggtatatgtgatttgattatatttctaagaagcatatttaagcatgttttaaaatgtatatgtaaaacagaatatttataacccaagtatagaaggttagccggatactaggagagatgccaaggagtggtgtctctcttttttgtgaaatcgaattttttaaggggttgccaatctatttgagtgtgaattacgtgtcatgtaatgaaagtctaatgtgacacgtaattctaagaaaaattcattaaatttaaagttcaattacgtgtcatacaataaaagttcaatctgacaagtaatttgaagaagaattcattaaatttaaagttcaattacgtgtcatacaataaaagtctaatgtgacacgtaattctaagaaaaattcattaaatttaaagttcaattacgtgtcatacaataaaagtctaatgtgacacgtaatttgaagaagaattgtttatttccagcgcaaaattacgtgtcgtagaacaaaaatgctgtcccacacgtattgaacaagatcaattacggaagccacagaaatttcgctctcagattccgtaattggcgacggcagaacaagaataattcaaaaaacatcttgcattttcataacaattagtttaatataattatggttagctatagctaactaatttcaacgaataaatcatttggactctttagaaatatctaagtaccgaaagattagctacctttcggtatagaagtccaaaagcagagaggagcatactataatgaattatttggaaattgaaaaggttattggaagagaaattttagattcaagaggaaatccaaccgtagaagctgaagtatatttggcagatggaactattggaagaggaactgcacctagtggagcatcaacaggagagtttgaagcattagaacttagagatggcgataagaacagatacttaggtaagggcgttcagaaagctgtagaaaatattaatacaattataaatgatactcttattggaatggatgcatcagatatttatgcagtagataaggctatgattgatgcagatggaactaagggaaagacaaaacttggagcaaatgctattcttgcagtatcaattgcatcagcaagagctgcagcaacatcattagacattcctttttatagatttttaggtggaatttcaggaaacagattacctgttccaatgatgaatattgtaaatggtggttgccatgctttatcatcaggattagatgtacaggaatttatgattatgcctgtaggagcaccttcatttaaagaatgcttaagatggtgtgcagaagtattccacgctttggcaggaattttaaaagaaagaggattagctacatcagttggtgatgaaggtggttttgcacctgcacttaagtctgatgaagaagctattgaaacaattcttgaagctgtaaagaaagctggatatgaacctggcaaagactttaagattgcaatggatgcagcatcttcagaatggaagagcgaaaaaggtaaaggatactacaagcttccaaaggcaggaacagagtatacagctgaagaacttattgaacattgggcaaaattatgcgaaaaatatcctatcatttctattgaagacggtcttgatgaagaagattgggaaggatggaagaaacttacagacagacttggtgacaaggttcagctagtaggtgatgatttatttgttactaatacagaaagacttgcaaaaggtattgaaatgggtgcaggtaatgcaatccttatcaaattaaaccagattggttctgtttcagaaacattagaagcaataaagatggctcacaaggcaggctacacagctatttcatcacatcgctcaggtgaaacagcagacacaacaattgctgaccttgcagtagcacttaacacttgccagattaagacaggtgcaccaagcagaagtgaacgtgtggctaagtacaaccagcttcttagaattgaagaagaattaggcgatagtgcagtttatcctggaataaaagcatttaacgtaaaataatattatagtgtaaaaaggtcttattccacatgtgcttgcacaaaggtggaaaaatgaccttgggatacgcacataatatgagcaaaaaaaactaagtaaacatatacgaacaaaaaggcatcggaactgacttttaaagcagttaccggtgccttttttgtggaatacaagataattgacacattcatataaatgtgttaaggtttgacgtagatataagaacatataaatatgtatgtttgcaatagaaaaaagggaatgaggttctcccacgatttaatcgaaaccgcttataacaagctgatgacttctgtgcaatacacaggggaagtcagctttttacgcgttatatatatcgttagagagaaaatgccttcaaacacgttgattttcttattttgctccgccgtctatcgtacagcgaaaacttaaactcgccttcggctcaaacagtaagtttatcgctgtacactatgctcgcaaaatttcaaaaatcttcctattgtttgcagtcattttctctctgccgatatgataaaaataaaagtaaggagaataacaatggaaatagaaaaaagcaatgtcaacattaaattgacgcttgttattaagtacatagcaatggcagtgattattggtattatagttggaatagtggacacaatttttggcagaggattacttgcaatttcagactttaggacagctaattacaaatatctgataccttttttgccaatagcaggtttgtttattgtttggatgtattcatattttagcaaggttagtctaaagggaatgactttggtttttgaggcaggacagaataaaagggattcaatccctatggctttggtgccgcttgtaatgataggaacatggattacacatttgtttggcggaagtgcaggaagagaaggtgtggcggttcagataggtgcaacattgtcgcattatatgggaagaaagttaaaaactcctgataatagcaggattatgttaataacaggtatggcagcaggttttggtggattatttcagacaccattggcggcaactttctttgcaatggaagtaattgtggcaggttatatggattatcaggcattacttccggcaataacagcagcttttgtggcatcatttacatcacatacattggggcttgaaaagtttgtagtggaattaaatgaaacaattaacatatctgatgtaaaaacagtaattggcattataattttaggtttggcttttggaattgtgggaagaattttttcttatttacttcaattactgaaaaaaataatggctgaaaaaattgcaaatccatacttaagaataggtttggtttctataccattagcaataattttattattactttggcatggcagatatagcggacttggtacaaacctgatttcaaacgcatttggaaatggagaaatttttcaggtggattggttccttaaattgttgctaacagttttaactttatcaataggatttcagggtggagaggttacaccattattttcaataggggcttctctgggaataatacttggcagctttcttggaatttctcccatgttatgtgcagcacttggttatgcggcagtttttggcagtgccactaatacattaatggcaccgattatgcttggaatagaggtttttggcggaaacaatatgcttgcatttgtggtagtatgcagtcttgcttacgttgtaaatggcaatagatccatatatggagcacaggaaaatattgaaaaaattattagcagatagtttcataacaatgttatataacactgcaatccatgactatgtatatgacaactttgaagaattatcgtagattttcacagcctacttctgtataataaaaaagtgtgaaataagaaagaaattaatttacataaaatattaatacaagaaaaaatcaacatatataaaataacaaatagatattacccaggaggacactatgagaagaagcgatagagaaataaaagattttgatgaaataattgaagtaataaataaatgtgacgtttgccgattggcgattaatgatggagattatccatacattgtgccaatgaattttgggcttaatatagaagatggtaaggtggttctttattttcactgcgcaagcgagggaaagaagcttgaattacttagaaaaaataacaaggtagctttcgaaatggactgtggacatgaatttattttaaatgatgaaaagatgagttgcactatggcatacgaaagtgtaatgggatgcggtcagattcagtttgttgaagatgaggataagtttgcggcacttaagataattatgaagcagtatcattcagaagattttgaatttgggacaaaagtaattccggtaacaacagtatttaaaatggttgtagaggaaatgacaggaaaaagaagaaagaacaataccaaaagaaataataaaaagcaagattagaaagcaataataaaaagtaagattaaaaagtaatattaaaaacaagactaaaaagtataacagtaatgacaagtttagaaaatcaatccaaagaaagaggaacacaatgaacattctatcattagaaaacataacacactcatatacagaaagaaaattatttgacgaggcaagtttttaccttcacgaaggggagaaggtaggaattataggaattaatggaacagggaagtccactttgcttaagattatggcaggtcttgaaatcccggatgaaggacaggtaattaaggcagccaatatgatgattcattatttgccacagaatcctatttttaatgaagaagacacggtgcttgaaagtgttcagaacatgattcaccatcatgccaatgaagatgaattggttaaggctaaagcgatgatgacaagacttggaattactgattttgagcagaaaacttcagaactttcaggtggacagagaaagagattggcgttggtttctgtattgattacaccttgtgatattttgattttggacgagcctactaaccatttggatagcgaaatggcagaatggcttgaaaatcagttgcgcggttttaggggggcgcttgttatggttactcatgacagatatttcctagacagcgtaactaacaggattatcgagcttgataaaggaaaaatctatagttacaacgaaaaatactcaggatttttggagagaaaagctgagcgtgaggcaagtgccaaggcaagcgagagaaagcgtcagagcattcttcgaaaagaaattgaatggatgcagcgtggggcaagagcaaggtctactaagcagaaagcacacattcaaagatatgaaaatctaaagaaccaaaaagggattgttcaggacgaaaaaattgagttaagtagcattaagtcaagaatgggcaagacgactattgaacttgaaaatatttcaaagacatatgactgcaaagttttgataaatgatttttcttataattttctaaagggcgaccgagtaggttttgtgggcaaaaatggttgtggaaaaactaccttaatgaagattattgatggaagaattgagcctgacagcgggagtgtaaacattggacagactataaaaataggttattatacacaggagattgaaaataacaaagagtcaggaattgcttatatgaatcctgatgatagggttattgattatataaaaaatactgccgagtttgtaagaacagaggaagggcttgtgtcagcctcggttatgcttgaaagatttctttttgaaccgtcacagcagtatagtaagattgaaaaattgtcaggtggggaaaaacgtcgcttaaatcttttgcgtgtgcttatggaagccccaaatgtgcttatacttgatgagccaactaacgatttggacattgaaacaatgacaattcttgaagattatttggatagttttgatggaattgtaattaccgtatcccacgacagatattttctagacagagttgtcagaagaattttttcctttgaggaaaatggggtaatcgaccaatacgaaggtggttacacagattacataaatcgaaagaaggaaaagggactgcttgaagaaaatgctttgttaaaaacaaaaagtagcagtgcaggaaagtcagattcagacaaaaccgaaaaagaggaatacaaaataagaaacaaaaagcttaagttttcttacaatgaacaaagagaatacgagacaattgaggacgatattgcaaaattagaagagaagattgaaaagcttgacggtgaaatagtcaagaatgcaactaattcagttaagcttagggaacttatggaaagtaaggaagaaacggaaacacttcttatggaaaaaatggaccgttgggagtatttggaagatttggcaaagaaaattgaggaacaataaagataatatctgagtttatcctagcaatacctaccacggtggtattatatataaaaatctactaatctggtagaaaaaatcaaaatcagggttgacatccaaaccataagatgttactctagagaagtaaattaaataattttaaatagtatgtaactttaagtaggcattaactatacacacatctcaaagggggtcgtgtatctgttatacctactttttttgtgtttaaaagagctgcaacttataacaaaaatagtcgtaaatgtatgatacatgcccaaatgaaccaaaatattattagtgtttgaaaggagaaaaaatgaaagacaaaatttttggtgttttacaacgtgtaggaagatcatttatgcttccaatagctatccttcctgtagcaggtttgttacttggacttggtagctcttttacaaatgaaacaatgcttaaagcatacggattattaggtattatgggacctggaacagtatttaatgcaatatttcaggtaatgagtgatgcgggaaatatagtttttactaacctgccgattatttttgcaatgggtgttgcaataggtatggcaaaaaaagaaaaggaagttgcagcacttgcagcagctatagctttcttcattatgcacgcatcaattggtgccatgattacaattaacggtggcgcagaaaaaatgcttgaaggtgccacaacagatgttgtaggtattacttcattacagatgggtgtgtttggtggtattattgttggtcttggtgttgcagcacttcataacaaattttacaaaatcgaattgccacaggtattatcattctttggcggaacaagatttgttccaattatttgttcattagttttcacattagttggtattttaatgttctttatctggccggttatccagagcggaatttactctgttggagatttagtacttaattcaggttacgcaggaacatgggtatacggatttatggaaagacttcttattccatttggtcttcatcacgtattttatcttccattctggcagacaggcgttggcggaacaatggaagttggaggtcagttaattgaaggtgcacagaatattttctttgcacagcttgcagatccatcagttacaaaatttgcagtttcagcaacaagatttatgtcaggtaagtttccacttatgattttcggacttcctggagcagcacttgcaatgtatagaacagcaaagcctgaaaagaagaaagcagtagcaggtcttcttttgtcagcagctttaacatcaatgattacaggtattacagaaccattggaatttacattccttttcgttgcaccattactttatggtattcactgcgtatttgcaggacttgcatatatgttaatgcatgtatttaaagtaggtgtaggtatgacattctcaggcggtcttattgatatgttcctgtttggaataatgcagggaaatggaaagactaactggatttggattgttattgtaggtattgtttactttatcgtatattatttcttatttagcttcttaattaaaaaattagatttgaagacacctggtagggatgacagtgaggaagtcaaactttatagaagaagcgatgttgaagctaagaaaaatggcaagtcagaaaacgaagaaaatagtgatgttgacgaattatcagaaatgattactaacggcttaggcggaaagaaaaatatttctgatgttgactgctgtgcaacaagacttagatgtacagtttttaaagctgaattggttaatgacggaatgcttaaggcaacaggagcgtcaggtgtagtacacaagggtaacggtgttcaggtgatttatggaccaaaagtaacagtaattaagtctaacttagaagattatctggaaacagctccaaatatagagtataatggtagcaatagtcagtcagacgaagttgaaaacaagactgaggatggaaataatcagaaggagcaagagacaaaaatagtaaaatcaattattatctcaagccctattacaggtatagccgcagatttaggtacagcgccggatgaagcttttgcaagcagaatgatgggagacggtgcagttgtaactccaacagattcagttgttaaggcacctgctgatggtgaaattgtatttgtttttgatactaagcacgcagtaggatttacaacagaagatggtattagtatgattatccatgttggtattgacacagtaaaacttaacggcgaaggctttgatgtaatggtagaagcaggacagaaagttaaaaagggtgatcctattatgaaacttgatttggattatttatctgccaatgcaccatcattggcatcacctgtaatgtgtacagagcttagcgacaatcaaaaaatcagattacttaaggaaggcgatatacaggcaggggaatcactttttgctattgatatttacgaataatgtcacagattaattaggatatgtatagagtaaaaaaagcgttaaaccacaatgcggttgtggcaattgatgcagaaaaatgtcaggaatttttgattttgggaaaaggcatcgggttcggtaagaaagttactgagtatgttgaaccaagagcagaagacactgtatattcaatgaaagaatgtacggaaagaggagaggcagaagacattgttaatgaagtttctccagtttgtttagagattgcagatgcagttttaaataaggcggaagaagaatttggaaatattgacagaagaatactttttccattggcagaccatattgagtttgcagtcaaaagaataaagaacaatgagcaaataagcaatccgttaacactggatataagagttctttttcattcagaatacaaagtggcagaggaaataaaaccgctgcttctcgaaaagatgggtgttgaaatagatgaacatgaggtgggatatattgcacttcacattcattcagccattgatacagagaacgtatcccagtcaatgataatagctcagggcgtacgtgaatgtatttcaatggtagaagctgaaacaggaagaaaaataaatgttttatctatttcatacaaccgtctaatgaatcacattaaatatatgatagcaagagcccttaaaggtgaaaaaatcaagcttaatctgaacgactatatggaaaacaaatttccccaggaatttcagatggcaatcaccatatgtgacaatataggccatttgcttaagttgtcctttgatgagtcggagataggatatcttgcaatgcacatccaaagggtaacaagcggagagcttgactaaaagttgtgaaagaaaataaagagagtaaaactagtcagattaaccatagttgatttgactagtttttttgtgggtgtggaagtggtttgttttgcaattgtggaagtggtttgttttgtcttgtttcgttgctgattacgtgtcgtagagcaaaaacgctgtagtacacgtaaaatattgaaatatttgtcttgattcgcaaccgattacgtgtcgtagagcgaaaacgctgtgtgacaagtaatttattgaaattaagcttgtatttttgcatggaattacgtgtcggtgaacgaaaatgttatatgacacgtaatgctcccaattaagcctgtccacagagcaaaaaaatcaagtctaccgcattagaaaatcataacaaataatctaaaaacctcatatggttatgaaaataaagaataaattatatgaatctatgttaaaagtcataacacgcttatgaaaatattaaggaggttatgattttgacataaatccacttgacttctaactaccacgggactatactacattatatcagtaatgtagtatagttgattaaagatattatacaaggaggtacatcattgaaaattgatgaaaacagtatgattccaatctatgtgcaaattgctgattccattgaagatgacatactatcaggaaaattgaaggagaacgatacatgttactcacaattagttttggcgaaggagcttaaagtcaatccggctactgcggcgaaaggaattaatcttttggttagcagagggattcttataaagcacagaggccaggcaatgacagttgcaggcgatgccataagtatgatttcagaaaggaagaggcatagtgaagtggaacagatagcagaacaattaattaaactaagtaagaaattatcaattacaaaagaggagttacttaaactaatagcagaacaatacgataagaagtaaataagacaaaaaagctaaacataaagttaaacaatcaaaaaaattaaatactaagctaaaaagaaaaacagacacataattaaatacaaagctaagtacaaaagccagaaaaaacaaacaaaaaagaagtaattcacaacaagtagttgtaacaacaattttagtcaggagggaagtgcagcaatgcataatgaaaacatggaagagattaaaagcataagcatgcagaatgtaactttctcatacaagggaaagaaaagatatgtttttgaagatttttctgtagatattgagccaaatcacattacgggaataattggtagaaacggacagggaaaaacaacattaatgaatttaatagccggcaagtttgaaccggatgaaggaataattgaaatagacggaaagaatccggcaactgatatagggacagctaagcgtattatttatgtggcaggggtaatgagttacagcgaaattaagttaaaaaagataatcgaagagtataggttgatgtatgaaaaatttgatgaagagtttgcttataagttaatggaattatttggtttaaataaaaaagcaaaaattaaaaatctgtcaaaaggtcaggaaacaatttttaatttttgttgtggaatggcaacaagagcagacataacaatacttgatgagccggtttcgggagttgatgcaataagcagaaacaaaatatatgaaattattttaagagactacatagaacatccaagaacaatattaatttcaagtcatatgttaggtgaaatggaaaagattttgtcacatatgataatgataggaaacaacgatgtactttttgcaggagatattgaagaactgaaagacagcgtttacagggtagacggcgaacttgcaaatattgaaaaatattgtgaagaaaagaaagttttatataagaaaaatcagacattgggagctatggcagttatcgaaggcagacttaacaaagaggaagcagagaaagccgatgaattggaacttgccacaagcaagctttcaggggaagaaatttatatgtataagacagatttgaaaaacgcaaatcagatggaggcattatgggaaaagaagaactaaataatattaaaaaaatgtatttgctaagaatgcacacaaataaaaaatatgcaataatagtattttgtgttgccattgtatttgcattagtagatatattgtcaatggttataaatttttcaacagacaaagatgtattttatctgaatcttaaccgcaatagcggtgcattgttttggatagtaattttggtattggttatcacatcctttaatattggtgaatacaaaaacaattatatggtatttccacagaacagtgttacaagatatgtatcagcatatttggccgatgtaacaacctttggaattgcgtcattgtttcaggtaatgaaccagttgattttgtttggtgcggtatcactagtttcattatttaataaaaacataaaactaataaatgttttttcaatgaaaactgtttttgctgagcttgtatatttattgggatgttttttacttattacagcaattatcaaattatttgcagttatttatagaaaaagcatggcagtatttggcgttattacaattgcactaattgtaggagatttaagctataggaatattttgcagaacattgcagcttatgccaaggaaaataacaaattattcctatatgaaaaagctatagatttagtttcagctatagctggattttataaaagagaatataatatgggattatttttcttaaaaatcgtagtgactcttgtaatagcattcttcataggatttattattgaaaagaaaatccgtgatagcaagtcattgacttttggcggaaatcaaagagcaatattaataagaataatggcagtttgcggttttacaatggcaatagcaggggttactatgtattctggcagtaacgtaatatctaaaacagctactgaaaagaaaacatatccgttacaaataaaagaaggtgacaagtacccgcagacaatttcaacttcttatgatatgagtgcagttggagtaggaaacattgatataagtaaaagcaaaaatccaagaattgtaattgaaaggatggaattagattcaaagagcaaaaataaatatattaaagatgtgtttaaggattgccagataagtgcagaagttaaagatggaaaaattcaagttacaagcagtgcaaaagataacaaatttgtttacatatcaaatatgtatcaggaaaataaccacgtaagaagatttttaaacaaagatcagacagcggattcaattatgggtacggatattgaaaacatggctaacagttatatgacagaatattttgttacgctgtatgttccaaaggcaaacatagtcaaagatgatgaagactacaatatgaaattgtttgttaatggaagagatatgagtgataacttgggatattttgatgaagaataaaagcaaatataaatgcaaatttagaagataaaggagattattctcctttattttttttataatatatgttattctatctttagattttgcacttatgaataatactataagtattatcacaaatttggcgtgcatatatgatagaggagataaagatgaacagagttttattaaagttaagcggggaagccttagcaggtgataaaaaaactggttttgatgaagatacttgtgtagctgttgcaaaacaggttaagactatagtagataagggagttcaggtagctatcgttatcggtggtggaaatttctggagaggacgtacaagcaataagattgacagaacaaaggctgacggaatcggtatgatggcaacaattatgaactgcatgtatgtatcagaaattttcagaacagaaggaatggatactaatgtgtatacaccttttgcatgtggaacatggactaagttattttcaaaggatgaggcagtagcagaccttaatgcaggaaaggttgttttctttgcaggtggtacaggacatccttatttctcaacagatatgactatggttcttagagccattgaaatcgaagctgactgcattcttggtgcaaaagcaattgatggtgtttatgacagtgatcctgctgttaaccctgatgctaagaagtacgatgaactttcaatcagcaagattgttgatgacagattaggggttattgacttggctgcaagtgttcttgcaatggagaacaagatgccaatgttattattcggattaaacgaagaagacagcattaacaaggctgtatcaggtgaaaagattggcacaaagattactgtagaatagttaataattattaactgaaaagtaattttggataataactatagaatcaaaaattttaaggattatataattagaaatataaaaagattattaatcaaaaaattattaagtataaaattttattaattataaaagattagaggagaattataatggaagaattattaatgatatacgaagataagatggaaaaatctttggctaatttaggtgaagaatatgcaacaatcagagcaggacgtgctaacccacatattcttgacaaaatcaaaattgattactatggaacaccaacacctcttcagcaggtaggtaacgtttcagttcctgaagcaagaatgatttgtattcagccttgggacgcttcaatacttaaagatattgaacatgcaattaatatgtcagatgtaggaattaaccctacaaacgatggtaaagttattcgtcttgtattccctgaacttacagaggacagaagaaaagaacttgttaaggatgttaagaagaagggtgaaaatgccaaggttgctatccgtaacatcagaagagatgcaattgatgccattaagaagaaaggcaaagaagacggcatttcagaagatgaagtaaaaggatatcaggatgatgttcagaagaagacagatgaatacattaagaagattgatgtggcaatcgaagaaaaatcaaacgaaataatgacagtataataaaatatcagattttagagaataagaggagacctgtgtttcctctattttcggttaaaggagattaattatatggcaaaaaagattgatataacaggacttaatataccaaagcatgttgccattattttggatggtaacggcagatgggcaaagaaaagatttcttccaagaaacgcaggacatgcagcaggtgcaaagaatgtggagaagattattaaagatgcccacgatatgggaattgaatatattacaatgtatgctttttcaactgagaattggaacagacctgatgatgaagtaaaggctcttatgaagcttcttagaaattatctttcagactgtattgagagagcaaacaagaacaatatgattgttaaagtaattggtaagagagagagacttgatcaggatattcttgacagaattgatgagttagaggaatgctcaaagaacaatacaggaattacttttattatagctcttaattacggaagccgtgatgaaataacaagagcaactaagaagatggcaaaggctgttgcagacggagagttaaatcctgatgacattacagaggatactgttaattcatatttagatacagcaggcattcctgatcctgaccttcttattagaacaagtggtgagataagattgtctaattatcttttatggcagttggcttacacagagttttattttacagatgttttatggccagattttaacaaagaagaattaaagaaggctattgtaaaatataatgaaagagacagacgtttcggcggagtaaaaacagaagaataaaatacataatagtaggagaaaaacaaaatggttttaagtaaatttgcaaataaatctttctttacaagattattaagtggaatagttctagtagctttaatgttggctacaattataccgggaggaaacattctttttgtagcaaatcttttgatttcagtagttggtgtgtatgaattatacaaggttcttggaattgaaaaaaattcacttggaattacaggatatatagcagttttggcatattatgcagtactttattttgataagaaagaatatatgatgattcttatggtagtatttttaatgtgcttacttgctcagtatgtatttatattccctaagtataaaacagaacagatttcaaatgctattatgagtatgttatatgcaggcgtaatgttatcatatctttatagtgtacgtgagggaaataacggagcatatacagtatggcttattttcctttgctcatggggaagtgatacatgtgcataccttgcaggtgtagcttttggaaagcataagatggctcctgttttaagcccaaagaagtcagttgaaggtgcagttgggggcgttgttggagcagcagcacttggagcaatttatgcaacaattttttcaagtaatattacaatgagcattaatcctgttgcgggatttgcaattatttgtgcagtgggagctttaatttcaatggtaggcgaccttgctgcatcagctattaagagaaatcatgatatcaaggattatggcaaattaattcccggacatggcggaattatggatcgatttgacagtgttatttatgtggcacctgttatttggattttattacagattttttaaggagacgatatgaaaaatatttccattcttggatcaacaggatccataggaacacaaacattagatattgtaagagcaaatgatgatttgaacgttgttgccattgcggcaggctcaaatattacaaaattagaagaacagattagagagtttcatcctgagattgtatgtgtatacaatgaagaggctgctttaaatcttaagaatgcagttaaggatacttcggtaaaggtagttgccggaatggatggacttattgaggctgcagtatatgagaaagcacaggttgttgttactgcttttgttggaatgataggtataaggcctacacttgaagcaattaaggcaggtaaggatattgcattagctaataaggaaacattagttacagcaggacatattgtaatgtcaatggctaaggaatatggtgtgaagattcttcctgtagacagtgagcatagtgctatattccagtgcttaaatggagaaaattcaagagagatagacaagattcttttaacagcttcaggaggaccgtttaggggcagaacaagagagcagatgaaaaacgttcaggttgaggatgcattaaaacatccaaattggtccatgggacaaaaaattaccatcgattcagctacaatggttaacaagggattggaagtaatagaagctaagtggctttttggagttggtcttgatgatgttcaggttgtggttcagcctcaaagcattattcattccatggtacagtttaaggatggtgctattatggctcagcttggaacacctgatatgagattacctattcagtatgcactttattatcctgaaagaagatttttggcaggagaaagagttgattttggcaaaattgcacagattacatttgaaaatcctgatcctgagaactttaggggattagcattggcttatcaggcagcaacagttggaggttcaatgcctacagtatttaatgctgcaaacgagaaggcagtagctaagttccttaacagaaagattggattcttagacataacagatattattgaatattgtatgagtatgcataaggctataccaaaccctacagtagagcagattttagacattgaacagtggatatatgaattaatcgaaagtaggtggtaggatgcagacattaatcagtattataatagcccttataattttcagtgtattagttttaatacacgaatttggacattttatagttgcaaagaagtgcggagttgtagttaacgagttttccgttggtatgggaccaagacttcttagcagagttgcaaaaagtggcacaagatattcaattaaggcacttcctttaggcggttcatgtgcaatgcttggtgaagatgaagataatgcagaagaaggttcttttaactctaaacctttatgggcaagaatggcaattgtcgttgcaggacctttctttaactttattcttgcatttttattggccttaattgttatcggttacaacggcgttgatatttcttacgtttctaaagtaacagaaggcagtaatgcatacgaggcaggacttagacagggagacagaattactaaatataacggagctacagtttcagtaggacgtgaaatttatttggaagattatgttagcccacttgacggaagtgatatttcagttacttttgtaagagatggaaagaagcagactattagttatgcacctgacagtgaagaacgttatatagttggcatttcatattatgaaacagatccaaaggctactattagtagtgttcctaaaggttcagcaatggatcaggcaggagttgttgcaggagatgaagttgtggaaattaacggtacaaagatttcaacaggaaaggatttaaaggaatatattgatgcacatccttttggaaaagaagaaatcaatattactgttaaacgtaataataaagaaaagaaagtagtcgtagttccacagatgactaagctttacagcagcggatttgtttataatcttgcaagagataagcagtctgtaggcggagttttaaaatatagtcttgtggaagtgagatatgaaattaatacagttcttaaaagcttaaagatgcttgtaacaggaaaggtttcagctaatgaagtatcaggtcctgtaggtattgttaatgttattggagatacttacaaccagactaagtcagaaggctttatggttactttgttcacaatgattaatctggcaattatgcttagtgcaaaccttggtgtaatgaaccttttacctataccggcattggacggtggacgattattcctttatattgtagagcttattattagaagacctatacctaaggaaaaagaaggaatgatacactttataggatttattttgttaatggtgcttatggtattcttaatatttaatgatattagaaagattattttataagattgcaaggtggcaggtaatatgtatagagataatacgaaagtaattaagattggcgatagagtaataggcggaggaaatcctattcttattcagtcaatgacaaacacaaaaacagaagatgtagaagcaacggttaaccagattaaggagttagaggcagcaggttgtgacattataagatgtgcagttccaacaatggaagcagccaaggctcttaaggagattaagaaacagattaatattccacttgttgcggatattcattttgattacagactggcaattgcagcaatggagaacggagccgacaagattagaattaatccgggaaatatcggctcagttgaaaaggttaaggcagtagttgatgtggcaaaggagagaaacattccaataagagttggtgtaaatagtggttctcttgaaaaacacattcttgaaaaatatggaaaagttacagcagagggaatagttgaaagtgcattagataaggttaaaattattgaagatttaggctatgacaatcttgttatcagcattaagtcatcagatgttttaatgtgtgttaaggcacatgaacttattgcggaaagaactaactatccacttcatgtaggaataacagaatcaggtactgtaacatccggaaatattaagtcagcaataggacttggacttattttaaatcagggaataggtgatactatcagagtttcacttacaggcgatcctgttgaggaaataagaagtgctaagcttattttgaaaacattaggacttagaaaaggcggtatttcagtagtttcatgtcctacatgtggcagaaccagaatagacttaataggtcttgctgaaaaggttgaaaagatggtatccaaatacgataatctggatataaaggttgccgtaatgggctgtgtagttaacggtcccggagaggcaagagaagctgatattggagttgccggtggagtaggcgaaggacttttaattaagaaaggtgagattgttaagaaagttcctgaggatatgcttttacagacactggaagatgaattgaaaaattggagtgaataatttggagagaaagaagttttttgacgtttttccagcacttaaattaaatgataatttgcaggctatgtttgaggaagtttatgtaacacgagtttcctctaacatgtctcatgacaagttaagagtttatattgaaagcagcagacttattgaaaagtctgctattttcaccgtgagagatgaaattataagaaatctcagaatgggaaagcgaattggaattgaaatagtagaaaaatatcatttatcacaacagtatacagtagaaaatcttcttgatgcctacaaggagagcatagttatggaacttggagtaagaagtcccatagtttcaactatgtttaaaaaggctcccattcgttgggatggcaataagatgattattgacttggaggctaatattatttcagaatccagaatgaagattttaaaggacacagttgaaagaatatttgctaacagatttgaaatgcctattgaggtagttattgataagaaaagatttgaaactaacaggtttgcaaagcagaatgccagacgacttcagaacgaggttgaggtgttacttaacagagataacggaccaaaggctaagaaggaagaaaagaaagaggaggcaccaaagcctgttgtaatcagaaaggcaagccgttcagacaatcctgaggtagtatatggaagggactttaagtttgagtcagatactaacctttgtgatgtttttgaaggcaccggagaatgcacggtaaaaggtcagattatgacaatggatgagagagaaacaaagacaggaaagtttattgttactcttgaaattaccgattttacagacagtattgccgttaagatgtttttggcagacggcaatgtgcttaaggactttaaacagaaagtaaagaaaggttcttttgtgcgaattaaaggtgttgccctttatgatacatgggataagcaggtggaaatcagccgtgttgacggaatgaagtctatttctccatttgccacagagaagcgtaaagatacagcagtagacaagcgtattgaacttcattgccatactaagatgagtgatatggatggtgtaagtgaatgtaaaaaaattgtacgtcgtgcttatgagtgggggcacaaagccattgccataacagaccatggtgttgtacaggctttccctgatgcatggcatgaatatgaagctattgaagctgaatgtgaaaagtcaggcagggaatgtgactttaaggttatatatggtgttgaagcttatcttgtagatgacttaaaggatatgattgttaatcctaaaggtcagcatttaaatgacaggtatgttgttttcgacttggaaactacaggttttagtgcaaaaagcgacaagattatagaaattggtgccgttaaagttgaaaacggaaagattattgacagatttagcacttttgttaaccctgaaattcctattccttttagaattgaaaagttaacaagcattaatgatgaaatggttattgatgcaccaaagatagaagaggtattgcctaagtttatggaattctgtaaagatgcggttatggttgcccataactcagactttgatatgagtttcatagaagccaattgtaaaagacaggacttggaatgtgattttacagtaattgatacagttgcaatgtcaagataccttattatcggacttggacgatataagcttgacaatgtggcaaaggcattaggtattgttctggatcatcaccatagagcggtagatgatgcagaatgtacggcacttatttttctgaaattatgtaaaatgcttgtggacaagggaatcgataatcttgatgaattaaacaaacagggaaagcagtcaaagaatttaattgataagcttcctgctcatcatgcaattatacttgtaaagaatcaggttggaagagttaatctttacaagttgatttcaaaatcacatatagaaacttttgcaaacaaaagaccaagaatcctaaaaagtgattatcttgaattaagtgagggacttattatcggtagtgcctgtgaagcaggtgagttgtatcaggcaattcttcatggaaaaagccagcaggaaatagcacgtcttgctgaattttatgattattttgaagtgcagccaattggaaataatgagtttatgttaaaaacaggtgatcctgaaatagatgacagaaagaagtttcttgttgattcagtagaagaacttcaggaagttaataagaagattattgacttaggaaagaagtttaacaaaatgacagttgcaacatgcgacgttcatttccttgatccggaagatgaaatttacagacgaattatccagtgcggtaatggctttaaagatgcagacaatcaggcacctttgtacctaagaacaacagatgaaatgcttaaggagttcgattatcttgacagtgatttggcagaagaaattgttattaaaaaccctgcccgaatcaacgatatgatagagaacatttcacctattcatcctgataaatgtccacctgtattggataattcagaagaaaacttgcgtaatatttgttttgaaaaggcacatgatatgtacggcgagaaattgcctaaaatagttgaggacagactggaagtagagcttaactcaattatcggtaacggatatgcggttatgtacataatggcgcagcgtcttgtttggaagtctaatgaagacggatatttggtaggttctagaggttccgttggttcttcttttgcagcaacaatgtcaggtataacagaggttaatcctttggcaccccactattattgtacagagtgtaaaagttcattctttgaagacgaagttacagtacctgatgaggcagacaaagaagcagtgaaggagattcaggatacaataagacagttaagggaagacggtggcgtaggacttgacttgccaccaagaaaatgtccttattgcggaaaggatatgtgcagagatggttttgaaattcctttcgaaacattcttaggtttcggtggaacaaaggagccggatattgacttgaacttctcaggagaatatcagtccaatgcccatgcgtatacggaagttatgtttggtaagggacacacatttagagcaggaaccatagccggacttgcagaaaaaacagcttacggttatgtaaagaattattacgaagaacacggacaaataaagcgaacagcagaaattgaccgaatttcaagagggtgccagggaatccgtagaagtacgggacagcatccgggtggtattgttattgttccaagagataaggaaatatatgaatttacccctatccaaaaaccggcaaatgatatgacaactgatattattacaactcatttcgaatatcatgctattgatgctaacttattgaaacttgatattctgggacacgatgatcctacaatgatcagacgtcttgaaaagttgacaaatactaacgttaacagagatgttccaattaatgatccaaaggtaatgtctttgtttacaagtccggaagcactgggaataacatcagatgatatagacggatgcccaacaggttcgttgggacttcctgaacttggtacagacttcgttattcagatgctggtggatacaaagcctactaagatttctgatcttgttaacatatcaggtttgtctcacggaacagatgtatggcttggaaatgcccaaacattaattgaagagggcagatgtacaatttcaactgctatctgtacccgtgacgacattatggtatatctgatgcataaaggcattgaaccacaggtaagtttccagataatggagcatgtacgaaaaggtaaaggccttcagatatacaaggacaaaaagagtggcaaggaaataaacgaagaggaagtaatgcaccagcataatgttcctgactggtacattggttcatgtaaaaagattaaatatatgttccctaaagctcatgcggcagcatatattatgatggcacttagagttgcctggtataaagtttacataccacttgcttactatgctgcatactttgccattagagcaaaagcatttaactacgaaacaatgtgtcgaggcaaggaaaagcttgaatattatatggctgacttgaaaagaaagaaagcaaatcacgaaatagctaagaaagatgaagatgctcttggcgatatgaaagttgtacaggaaatgtacgccagaggatttgagtttatgcctatagacatatacaaggctaaagcacatgaatttcagataatagacaacaagctaatgccaagccttgacacaatagaaggcttaggcgaaaaggctgccgatggtttggtagaagcagtagcaaaccaatcaggcccatttgtttcaaaaaatgaattgcgagaaaaaagcaagctaagtaagacagtaatagaaacaatgtcaagcttgggactgctggaaggaatgccggaagacagccagttgtcaatatttgacttctagggtgaagagtggaacagagaatatagaagtaaggatgaaggatgaaggactgcccgctgggcagtcctttgttgatggggggagcgtggtagctgaaatattatgcgtgaatattatgcgtgaatattatacgtgaattttatacgtgaattttatattaaaaagcacttgcaaaatttgctaggattgttataatagtaaagtgtcttgtgcaaaaagcacagtgtcataaaaatggctcgttggtcaagtggttaagacgccgccctctcaaggcggaatcacgggttcaattcccgtacgagctgtatcagaatcgcttatgaatgggcgattctttttttgattaataagaaattcctatgcaacagatattaattagaaaatctctttatacttccattgaaatgctaagtatttagtgataaaatcactctataaaaatgcttttatatattaaggattagagatgaaaaataaaaaacatattgataaaacagaacataaaaataatgaaaacagaattgaacatcttgaaaaaaataaagaaatacgacataaacttataaaaaatgagattttaatagtatgtattatcattgctttattagttgccacagttgcatggctggttagtaataagaatgcacaggcaaaaagcactgaattgacagccgtaggagtaccattctaccttgctacgaaggaaagtgatgatggagcagaagatgatatcttgcataataaattaaatgttatgaaaggaaccaaaactgaaagttataatggggaaaattattttattgtagaaaacggaattatatctatgcagatagacagtgataataatatgaataatcagcaatccaacgctaacggacttaagcccggagcatcagggaagattactttttatgtaattcctaaaaaaagaggatgtaaagaattttcactttcaataaagttaattccatataaaactacagataataaaacagatactagtccattacagtcaaatgtggaattgattttaaatgaaattaaaaatggcagtgtagcaactaatagtaacagagtattatacactaccacaaatgctaccaatttcaacatagaaaataagatttctacatataaaaggcaaatggataataaaacgtttgatagtgattttcgtgttcttttggttaatggtacttctgacagcattacaaaagacattactgattatttaaatcttattaccaatggtggatacagcagtgcagtagaaaacgaatctgtagatgtagtcagccaaaattataaatttgagaatggaaagtttataattaacaatgatgcaaaaaagtattcattacgaatttcaaaaggctcaaagtcaatttcttattatatgggaaatgattatgataatggtaaggaccagtttactttattgacagtaacatttaaatcaggaaatcattcttatgcagtgtatgtacctatggttgttcgaagaattgtgcagattgatttttctgcaacgttaagtgaggagagtatttttacttcttctgcttatgataacttgcaatcacatgttcttgttgattatgatagttatatgacaggatatttgacgtgggcatatgatcaatcacaaggtgaaagagttgtgtttgactggcagagttatatggaggccggtgcagatttaactaaaggatttggaaaaacagtacagtttgaatttctgaaacagactgaatatcttccgccaggaacaaagcttacattaattgatacgatgaatgaggataagatgtattcctatgacatagctgcagaagacataaaaaaagatggaaacttcagcattgcattaagcaactttactgatgagaataataaatcatataaggaaaaagccattagtgttctatatggtgctgatgctactattgatagcaatggcaaatttgttaaagctcaagaaggagaaaatgcaacagttattaccactgatggtgaaaaatatcgtctaaaatcaggagaggaagacgaaagtaaagatacctattcaattactctgaaaaatcagggaaaagcagtagacgagaacttttaccttataatcaatgtaccaaagaaaatagctgatgaagcgaagattgaaggaattaatggggcagtaaaaacgacagtaaatactgaggcagcacagtgttcagttttgcaggtacatagatatgataatcataagactgataatggattgagtacagagagtacatttagtattctttctgcatatactcaggaattagtagatgaatcaagtgatggtgttaagaaattaaaaatttcatcagatgcagcatttacagatacagataggaaagtaacaataaatttgcttgacaagattagctttaattcaaatcaggcatatggagatgatgataagttataccaggagtttttaatcacgccatatagtggcggtgtaatggaaagttttttggatgatgcaactagtgtaaatgttagttttagggtttattcacaaaattctgctggtgaaaagacgtattattcatacgataatgctaataacaaactgatacaaagtaattcatctgctatttcatgttcttataatgttcaaacaacgcaggacagattaaagctggtaatggggactgagaattcagaagatgcagcaattgatttatctgagatacgtaaagcaattgtcagtgaaacaggttctaaaatttgtattgaggcagaaatcacaatgacattgtcagatactagtataagcaaacttgtaccgtcatctaaattggtgtcaggtaaacctgaaacgtttatgaattttcaatttgtctcacgtctttctaagtcaaagactatatttaatgagagtagttggagagccaactgcgatggaaccggcaaatattatagagatgataccgggtatgttgatatgtctttttcgggagatgacaaacagcagttgggcattaatttaaataatttgccttacagtggacctcagacaattgaaggtacagtagctattgatttcagacagatggatggatgggaatcaattataaaaaatgctaaagaaatacaattttcttttgaattaaagcaaaagaaggatactaaagagtatacggaacttaaccaaccttcatcatatattgcaggattggaagtaggtgagttaaattcatcaactgaagaatataattatagttcaatttatgaaaactggagttggattcagaaaaataattcaggctttaataatatgcaggaaggtatattccgtcttccggttaaatggaaggtaaaagttgattctgaagatggtacattctattacgcaaactatcgattggttgtaaatgtatctttaattgaccaaaatgataacaaaattaaattttttgtagcagataatgacaaaaatattagacaaacagatgtgttgactgattttgttacttatactgttgcaagaattgtagtggagtaaaatgatattgcgtacgagttgactcttcaataaaagaaaatagaaggggctggatgttacttttcaagaaagtggcatccagttttttacatacaaaaatctattagactgtgttatttatattagattaaggtatgcctggctgcgcaagtttctaataggtaaaagtcccaaacaccttaaaatgatatcaattctataaaaaaagatatattgtgtaattatgtgttaatgctaaagaaaaatgatggtataatatctttagtgatagtttaaggagaaaatatatgaacggagaaatactaaaggatataaaacagggaatggaaacggcatatataaatggttcccttgcttcaaatcttaaatataaaccagggtttgtatctaataatcctaaagagggaaagaaggttatttcttccattgaggaagaattattaaggtgtgacaaatttcaaattagtgtggcttttataacaatgggcggaataacaccacttttacagacattaaaagaacttgaaaataaaggtatccccggagaaattttaacaactaattatttggactttagcgagcctaaggcgttagcaaaattaaacgacttaaaaaacataaaattaaaaatgtatgatgttgaaagtgcaaataatggttttcatactaaaggatacatttttaagaaggaagaagtttatagaattatacttggaagttctaatatgactaatactgcacttacaagtaatatagagtggaatactaaaataatatcaacagaacagggagaaatagcgcaagatattgtaaatgaattcaatgaactttggaattctgaatatgcattagattttgaacatttttatgaaatatacaaaacacgatatgagataattaagcatcagcgtcaggaggctaaaaaagacaaaatcccttcatttgaaaagtatacattaaaacctaattctatgcaggaagagtttattcttaacctaagaaaaattatggaaaaaggtgagaaaagagcactactgatttcagctacaggcacaggaaaaacttatgcgtctgcttttgccatgcgtgaattaggatttaagaaagttttgtttttagtacatcgtgaacaaatcttaaagcaggctaagaaatcatatgagaatgtttttagtagtaacattactacaggtattctttcgggaaatcataaagatataaatgctgattatcttttttcaacagttcagacattaagcagggagaatgtcctttcacagtttgatgaaaatagatttgattgtattgtcattgacgaaactcacaaggcaggagcggaaagctatcacaaaataataaatcactttaagcctaagcttcttttgggaatgacagcatctcctgaacgtacagacggatttgatatttacaaattgtttgaccacaatatagcaagtgaaataagacttcaggatgcgttaaaggatgacttactttgtccatttcattattttggaatatcagacttgaccgttgatggaagagaaatagatgaaaaaacagaattcagatatcttgccacagaggaaagagttaatcatgtaattgaaaaggctgaatactttggacataatggagatagagtgaaagggttggtattctgtagcagaaatgatgaggcaaaggctttatcagatgctttcaataagcgtggatataatacaattgcattatcaggttcaaatagtcaaagtgaaagagaagaagctgtggaaagattggagatggaatgtgatgttgatgaaaatggaagaccggtttcaaatcagccacttgattatatttttacagtagatattttcaatgaaggtgtagacattccgaaggttaatcaggttattatgcttcgaccaacgcagtctgctattatttttgtgcaacagcttggtcgtggacttagaaaggcagatggcaaggaatacgtggtagttcttgattttatcggaaactatagcaacaactttttgattccaatagccttgtcaggtgacagaacatacaacaaggataatgttcgaaaatatgtaagagaaggggtaagggttattcccggtagttccaccattcattttgatgagattacaaaaaagaaaatttttgaatccattgataaaatgacaacaacaaagcgtatgcttactgataagtacaatcaggtaaaatataagcttggacgtattcctactattttggatttttataagcttggtgagattgatcctatgctgtttataaaatatgcaaaaacatatgacagttttttaagaattgtagacaaagactacaatattatttttacagataaggaagagcaaatattagcttttgtttcagcattaataattgatggaaaaagaccccatgaacttttaatgctaaaaatgatgttggaaggaacgaatatagaagaaaatacattcgcacagcagttaaataagattggtgaaaaatttaaaaaggcagattatgattcagcaataagaatgataaatcttgattttgtaacaggtagtgatgcaacaaagttttcagatatggaattagtatcatcgttagagttaaaatcaggaatgttaaaacgttcgttagcatttgtgaaaaaacttagaaatgtaagatttagggaagagctggaaaatcttgttaagtatggaatgatgcgttacaaagatatgtattcaaaccatgatgaaaataatcttgttctttatggaaagtattcaaggaaagatgtatgtcgtcttatgaactgggacagggatgaaagctcaacaatgtatggctacagaataaagcataatacatgtcctatctttgttacatacgaaaaaaaagatgacatttcagaaagtacaaaatacgaagatcagtttgttaatcagcaaacatttagctggatgacaagaaatggtgttgcaattgatagtcgtgaaagtcaggaaataattaacagcgagcaatcaggtcttaaaattgttttgtttataaagaaaagcgacggcgaaggaactgatttttattatatgggtgaagtgaatccggttgattggagacagacaacaataaagaataataagggcaggaaacttccaataatgaactttttgtttaagctaaagaacagcgtaagggaagatatatatgaatattttacaaagtagccgtaatttttttatgaaaagtggacgtaaaagttaaaaattttcatacaaagtattcagaaattaaaatagattgaaagtaggtggcagtatgattgataaaaaaattgacaaactcataagtttattagaaccattggaaaaagatagcattggagaatggataatagataaagaacacaaaggaacaaaagatgatccaaagcacataccatatttaatgtttacagaaatggttaatgagctaataaatgcagtttatgaatttgataatgaaaaccctgaatttgaattgaaaaaatataaagagcttctaaaagaaagaaacatagaatgggaacaacaatcaatgtatgaatgttgatgtgtcaaatatggatgcacaaggtgttatggcattatttatgggaatggtgcgcggtgagagattctgcgatggaactattatgaaaatgataaaaagtggagctgtaaaaaaatggctcctgcgtttaaaagagattaaggagatacagtagatgaagacagtcagagttgttgcagcggtaataaaatctacaaacgaaaacaaagaaccaattatatttgcaactcagcgtggatatggtgattttaaaggtggctgggaatttcccggtggaaaaatagaagaaggagaaacaccggagcaggcactaaaacgtgaaataatggaagaacttgatacagaaatatccgttggagaactgattgatactattgaatatgattatccacagtttcatttgtctatggattgcttttggtgtgaaattgtaagtggaaatcttgtattaaaggaacatgaggcggcaagatggttgacaaagaaacagttgaatgacgttaagtggctgccggctgatgttacgttaattgaaaagattggaaaagaaatccccggtaagcaagtcaaaaggaaaaagtgataaatacgataagttataagtgggagagaaaagtatgcctgttataaatgagattaaacattttgcctgctaacgatgttacaatgaatactaaataattttgaaggaggaagatatgaaatacagtataaaaacaaaaatgacaaaggaagagtgcatagaatatacaaaggacaatttgcctaaatcaggatggctgaaaaaatacaagtatcttggttatgttaatgataaaggattcaaaataacagtgaacccaagtacaaacagctactataaacaaaattcttttaaaccagtaaatgttggaaaaattgaagaacatgatagtggtgtgattattcgagtaaaacaaagactgtccatagcagtgagcatattttcaacaattatatgcatatttgcgctatttatcattggaattatgagtttggaaattgtatatggagaagattattcgcttatttcatgtctacttattcctatagtaatattgatagttgtaattataagttgtgtttatgggtttaggaattgtgctacaaaagatatggaagaaataaagaaaatgtatgcaggaaaataaagagtattataaaaaataactctactaatgaaagaatataagagttattttcaattttactattattacagtcatacatagaacggtaggagtgtcaagtgacactcctaaaattttataccaaacccatctcaatatttagtacactatataaatgaaaacaaaaagtgcacatttgtttatcgcaggaggtaagtagtgaataagatagatgcagataaattaatagtagaataccaacagaaaatatttggatttgcaatgtcaaaagtaagaaatatcacagatgcagaagaattggcgtcaaaaattgtatttgagttgtacaagtcatttcttaaggttgataaaattgctaatgttgatggttacgtatatagaatagccagcaatgtgtattcaagatacatagataaaaaaataaaaaatcagtatgtagacatttataaaattgactatgcagttacagaaagaggctttgatagtattgaagaggaagaaacttataagaaacttagacaacagattgggttaatgtccaaaagacaacgagctattacatacatgaagtactataaagaaatgtcagttaatggtattgcaagtgaactggatatatctgttggaactgttaaatggcatttgtcagatattagaagtggactaaaggagagaatagatatggtaaaaaatgacaacttaagtgtaaatcctatttattttgcagagatgggacattgcggaatgccgggagcaacaggcgatactcgagatatgtttgactcaagattaaaacaaaatattgcttggtgctgttactacaaagcaaaaactttaactgatgttgctaaggaattagagattcctgttgcatatgttgaaggagaattaaaaaagcttgttgagtggggatacattaatcaaattgataattctaagaatccaaagtatttaacaaatatgtatataacagatgagcgagaggatttttctgataatattataattaaaaaggaagcagctaagtatttatgtgacaatttatttaagtatttatttgaaaaatttgataaagcagatgacaattggggaatgaattgtcctgataatgataagaattacttaaaatataatttagtgatgatggcattaagctgtttaggtgatgaaggggaaaactgggatgaatttgcagttaaaagaccagatggtgggtattttatttcatatgcaacagtggcagatgattgcacaaaaataccagaatacaaatatgttggttgtggctggatgtggaatcaggtatgtagaggtgacaaattagtacttcaaagtaagcaatataattgcatgtatagtgatagagaacttagttggagatcaaataaaccagaagattgggaagatttgtattcgtatatatcaagtggttgtgacaaagagaaaataagcattgagagttattctaacttattggaaaaaggatatgttgctgatggagaaaatcaggtggcgttaataaatgtagaggacggtaatttggaatcagcaataacagatttagttagtagtcatatagatattcctgaattagttattgaagaaagaaaaagagtagatgaaagactctacaagattaacaaggcaaaatatccggtacatatagaaaaactagttagattttataatagcaattcatttacatggggagaatttgtcccgtttattattgaaacaatgcttgatgagggaatgttgcaaccattaacagcaaaacagaaaaaagcagtattcactgtggttgcaatagctaaataataaatgttattttaatacattattctatgaacatatggaaaaacttggaacatacctgaagatgcacaaaaacctgaatgtgtgaataagaaaaaaacagtctaaaacagtgttagggtatttgcaggaagaaaaagcgtctaagtgttctggaggtatttatcataaaactcagattgagttaacctataattccaaccatatggaaggaagtagtctgactaatgagcagatcagatacatttttgagaccaacacaataggtatggaagagaatgtggcacagatgtttcaggcaatcatcgaggacaggaatgctcccaaagtggagaaagctatagacggatatagtggatttctattttacgatgataatggaatgccacttgtggcaatgcactggcagcaccgtttcaatcatatggtcggcagatacaatgacatctaccgggtgcagatgccaaatatcacgcatcatgtatgcaggcatacttactgctcgaatatggcaaaatcgggaatgaatccaaagacactacagtaccttatggggcattcggatattagcgttaccatgaatgtgtacacacatatcggattcgatgatgctgaggaagaattgaaacgaatggaagagtttaggaaagcacaggctgaggttgagcagaagaaagagaaaccgatgtcacagaagatgtttaaggtaatttaaaatggaagataggtaacgctctggtttaggctggggcgttatattgctatagaaaaaacgtaaataagattgtataatataatttggaaaaattttgccttgaaaaggatgtgaatagataaatgaaaactttttatttgattgattttgaaaatgttcataatgatggcattgcaaatattgaaagtatgacaaaggaagaacatgtgcatattttctcaacacagaatgcaacaaatataagacaggacattttttggttaaatagagatatcaaatctcatttagttccagtgcgaaagcagtcattggatatgcatctggtttcttacctaggctatttgttgggagtgtatggtaaggaatgtagttatgtgattatcagtaaggataaggattacgataacatagttaagttttggaaagaggaaggctatcctaatatttcacgaaaagaaaagttgccgggaacttcttctactcagaggcaaaaaacacagacagtatctcaaacaaaaagtaatgtgcagactgtgaatagtaaaattagtgcaggtatggcatatgaatttgaaggtgatgatagaagtgaattaaacctgtttatgcagcatggacttgtggctataggatatgatagaagttcggcaaatagaatctgcaagtttgttattgctcattgtaatgatgaaagaatgctaaatggaattcacaatgacatcaagaactcctttaataactattccgaagtatatgaggatgttaagtctattcttgagaaatttgtgcaatcaaagagtaaagtcgcaaaaagagaatcgcaggttcgttctttctttggtcagcactttaagaagaaaatatatgtggattgcaaagaggaaatcattcagattattttaaagtcagaaactaaacagcaagtgaataatggattgttaaaattgtattcagatggaacagtggtttcacacatttataagacaatacaaccattgattagtgagttaccaggtaagtagtaaaaatccttagtagtaagaatttttgttttactactaacaggtagtaacaacttgcagggttctgctctgatttgccacaacctgtaatttcagagcgaatcaccataatccccaaagtcccttgcaaacaatggcagtctagggcaaaacaaggagaaacaaaacaattattagagttttattcatctgccacggcagaaacggcgaaaatcgtgcaaactcctttaaataaggcggttgtggctttgaggtggtttagtttagaccaaatttagaccaatggtagaatgagactgtggtgtgatgtaaaagaatagaacataaaaatatagggaacttgattgatgagaaaaacaataaaagttccctattttcttcattagtagcaagaaaaaaatatgcatttgcacatatagacttgtcgagtactattataacttgataagagtgtaaagtatgttatttattgctgcaaaagtaatttgagtgcacattaatattattaaaaagtattacaatatgtgataaattataaatgtgacataaaataagtcacatttataaaaaagcaattaaaaatgattgcaaaataaaaaagtaactaaaaataattgcaaaacaaaattcattacaacataatagcagaagatgaagaaatctataaaaaatttccgttagtttacagggaagataataatttaaaagtgaatactaatgatattttatgtatgttaatataatccaaagcagaagaaattacactaatttatacagataaggaaattcaacttgaaaattatgtagctagggaatataattcaattaagtcattttgcataaaatgactaagttgaattgataatgaggtaattaaaatgagaaaatttgattacacagaaaaatggaaaaaattgctgacaccagagattgttggatatcttacaacaattcatgaatacaagggtgagcaaagattgattgcggaacgctatgcagatgtattagagagccttgtagaagtagcaaaaatacaaagtacagagagttctaataaaatagaaggcgtctatacctcagatgaacgtttgaaaaaaattgttttggataagacaatgcctaagacaagaaatgaacgtgagattgcaggatatagggatgtgcttggtacgatacatgagaacttttcacatattccaatccgtgacacattcattttacagcttcatagagatttgtataaatttgaaaatgcatctttgaatggaggcaagtttaaaagcactgataacataattgaggaagaagatgcaaatggcaataaatttgtaagatttagaccacttcctgcgtgggaaacaccagaggcaataatagaactttgtgatgcttataatgaggcgattaacagaagggaagcagatgcactcctgattgtacctatgtttatcattgactttttgtgtattcatccgtttaatgacgggaatggaagaattagcagattgttgacgttattacttctttatcagaatgattatattgttggtaaatatattagtttggaaaaactgatagaacgaacaaagagtagttattatgatgctcttcaggaaagctcgcagggatggctggaaggtgcgaataattacgaaccttttgtaaaatatattctagggattattgtagccacttatagagaattctttgatagagcgcagattgtggaagaaaagaaagtgcctaaaccagacaggatagagaaacttattaagaatcatttaggtacaattacaaaggctgagattgttgaagccacaccgggaataagcacaacaacggtacagagaacattaactgagttggtaaaagaagagaaaattatcaagataggaaatggtcgttatacaaaatataaatggaattgggataaggagaattagaatatgattacaggcgaattaaaaaacagaattgatagtttatgggagattttctggacaggaggtcttacaaatccgttggatgtcattgaacagatgacatatcttatgttcattcatgatttggatgtaactgataatacgcatgcaaaagaaagtgctatgcttggcttgccttatgaaagtgtcttcgctaaggaagtaaaaatcggtgagagaattatagacggaacacaacttaagtggtctgtttttagggactatccggctgatagaatgtattcagttgtgcaggaaatggtgtttccatttattaagaatcttcatgcaaataaagaaagtgcattctctaaatatatggatgatgcgatattcaaacttccaacgcctttgatgctttctaaagttgtagatgcaatggatgatttatacacacagatggcaaagttgaatgactcagatgcaagaggagatgtatatgagtaccttctttcaaaacttgctacagcaggtgtaaatggtcagtttagaacaccgcgccacattattaaaatgatggtagaacttatggagccaaaagctgatgatgttatttgtgatccaagttgcggaacagcaggtttccttgtagagtcaggagaatatctgtgggctaacaagaaagatgaaattttttacgacaagcagaagaaagatcattttatgaatcatatgttctatggctttgatatggatagaacaatgcttcgtattggtgcgatgaatatgatgaatcatagggtagaaagtccgtttatagaatacagagacagtttgtcagatcaaaacccggataaagataaatattcattgattcttgccaatccacctttcaagggaagtcttgatgcagatattgtatcagcagatttgttaaaggtgtgcaaaacaaagaagacagaacttcttttcttggcattatttgttcgtatgcttaaagttggtggcagatgtgcctgtattgttcctgatggtgtattgtttggttcttccaaggctcataaggatattagaaaggaaatagtagaaaatcagaaattagaggctgttatctcaatgccttcaggtgtatttaaaccatatgccggagtatcaacagcaattcttatctttactaaaaccaattatggaggaacagataatgtatggttttacgatatgcaggcagatggatttagccttgatgacaagcgttctgcagtagcggaaaatgatattccggatatcattgaaagattccgtaatcgtgatgctgagatggagagaaaacgtacagaaaaatcgtttatggttcctaagaaggaaatcgtggataatggatatgatcttagtattaacaagtataaagaagttgagtatgtagctgttgagtatcctccaacatctgagattatgactaatatccgtgagcttgagatggagatagggaaagaaatggatgagttggagagattgttaagtttgtaagaaaggaaatacaaatctgacaaattcggatttgtaggaatgacgtagaatgaagttaacagatatatgtgattttcaaggaggttcacagccacccaaggaagagtggtcatttgataaacaggatggatatgttcgtatgcttcaaatacgagattttacacaaagtgaaagagtgactccagaatacattaagattagtaacagcacaaaggtatgtgaagctgatgatatattaattgcaagatatggggcgtcaattggaaagatattaacaggattagctggtgcgtataatgtagctataatgcgtactattcctgatacaagtaaaatcaagaagaaatatttatattactatctgaaatcgtcatattttcagaacgcaataataaacgtgggttcaagagctgctcaagcgggatttaataaagaggatttgtcaaagctggatattgagtgtccgaaattagtggagcaagaaggggttattaatattttggaaaagattgaggctgttatagaaaagcaaaaagaggaacttacatctttagacgacctcatcaaagcccgatttgtcgagatgtttggtactttggataatcctgcacagaagtttgaaaaagcaacattaaaagagctttgtaataagattacagatggtaaacatggtggttgtacttcagaagaaggtactaaaagatattttgtaggggcaagggaaatatataatgatgaagtgcattatgatacagctccagagattaatgtggatgagtttgaaaaggattataagcgttgtaatattgaaataggggacttccttatagttaatactggtgcaacgattgggaaatctgcaatagcgtctgatgaaagaacagaacatacattgttgcagaagagtgtggctttattaaaggttaagcaggaattgctaaatcctatgttccttaaatggtgttatagggttaacacaagaatgtatatggttgaaagtgcatctgcacaacctaatttgctgttgtcaaaaataaacgcaacagaaatatatgtgccagatatgaaacttcaaaaccaatttgccgattttgtccaccaagtcaacaaatcaaaagttgcagtgcagaaagcacttgatgaaacgcagttattgtttaatagtttaatgcaagagtattttggataaaaaaattaaaaaacaaaagaataagtaatatggtggtagtgaagttggtattatagaagggataccaacatggaagaaaagatagtaacagttcttaatgagatggcagaatatttatctatttcacagatgaagaagcttcaggaggtaatacttcgcaatttcgctgagaatgaagtagagaagaaagaaatatcaaatgataatttcttgaagatgtttttagatgcaaagcggattgaaggatgttcagagagaacactaaattattataggactacggtggaacatttaatttctcagattgaaacaggtgttaggaaaatttcgacagaagaaattcgtgaatacttatcaaactatcagaaaaggaatagttgttcaaatgtgacgattgataatattagacgcaatatttcgagtttcttttcatggttagaagaagaggattatattcttaaaagtccaatgaaacgtattcataagattaagacaaaaactgttgtgaaaaatattatttcagatgaaggaatagaaaaacttcgagacaattgtaaagaaaaaagagatttggcgattattgatttactttattctacagggattcgtgttggagaattagtgaatcttaatatagaggacattgatttagaaggaagagagtgtattgtatatggcaagggggacaaagaacgtagagtttattttgatgctaaagcaaaagtacatttaaaagagtatattgatgcaagaacagataataatgaggcgttatttgttacacttgatgaaccacataatcgtttgaaaattagtggcgtggaaataagattacgaaaactgggaagaatgttggatttggatagaattcatccacataaattccgtaggtcaatggccacgagagccattgataaaggaatgccaatagaacaggtacagaaaatacttgggcattcacagattgatactactatgcagtacgcaatggtaaatcagagcaatgtaaaaacatcgcatcaaaaatatatggcatagaaagggtatatatgatcgactttaacaagcaaatggaaatggtgttataccatttggatgaggaaaatgtggcagttgatgcatacatagcggaagatagcatctgggtatctcaaaaaggcatgtctgagatatttggtgttggaattcctgcaattagtaaacatttaaaaaatatttttaatgagggtgagctgagtaaagaggtggttatttccaaaatggaaacaaccacaagacatggtgcaatagaaggaaaaacacagcataatgaaacaaattactataatttagatgctattatttctgtgggatacagaataaattctaaaaaagcaactcagtttcgcatatgggcaacaagcgttttaaaagaatatatgataaaaggctttgtcatggacgatgaaaggttgaaacagggtcagactgcatttggtaaagactattttaaagaacttctcgagagagtcagatcaattcgcgctagcgaaagaagaatctggcagcaggttacggatatttttgcagaatgtagcattgattataccagagattctgaaattgcttataaattctattctacaattatttaataaaacatagaaaattagttctgattttgataagtttattcaagatataaaaagtaattagttttccttataaggcaaattcggatttgtagggctacgagcagagtacagacaagacggcaaaagcacgttggaagcttgcttacataagtgctttgggaggattggctgtattgtgcgacagcagaacatgagcatgaagcaaagcggaatgcaaatggactctgcgagtagcccgtagaggaatgatgtagaatgaaaaaaacatttgcagaagtcgtgttattagctagaactggtttaaatccaagaaaaaatttcaaactgggacagggcaataataattacataacaataaaaaatataaaaaataatacattggtaattgatgaaaatacagatgttgtagatgatgaggcgataaagctaattcataagcgctcaaagattaaaaagggagatattctttttgcttctatagggcgaatgggagatatgtatattattgaagatgatccggtaggttgggatattaatgagtcagtatttgcttttacgcttgatacaaatatagtaagacaaaagtacttttattatatttttagagttaaatctacacttgattatttggcttctaatagttcaggaagtacttttaaaagtattaagatgaatcaacttaaaaagatgacatttgatattccaccactagaaaagcaagatcagatagttgccactttagataaggtatgcaatgtaatagaaatgagaaagcaagaacttatttcattagacgacctcattaaagcccgatttgtcgagatgtttggtgatgaaaataattctagaaattggaatgttgtaaatgttgaagaagtagcagatgttcaagttggtgttgttataaagccatctcagtattatacagatgaaagtaatggagtaaaggcttttcgttctctgaatataggtgcaggatttattaaagatattgattgggcatactttactaaagaaggacatctgaagaactcaaaatctattcttaaagagaatgatttgttaatagtaagatctggagcacctggcaccgcatgtgttgttacagaagaatttgctggatgtaacgcggttgatgttataattgctcatctggattgcgaaaaagtaaatccttattatctatgcacttttacaaatatgccacatggaaaaaaacagataaatgaaggaactggcggagcagcacaacaacattttaatgtaggaaaatataataaactacggttgatgttgccaccaaagatgctacaagatgagtttgctgtatttattcagcaagtcaacaaatcaaaatttataaggcactattaaaaattatttagataatatttttaactattaatatatgtacaatataggaaggaggcttttatgaccaactttgatttcttgaaaaaagaaccaaaattcaatagcttttcagatgtggcaatagctgcagagaaaatacttaagattgataaagagtcaagtgtgattaattgtcgtcgtgctatggaatttgctattaaatggatgtattccgtagataagtcattggaaatgccgtatcaggacaagcttattagtcttatgagtacagaggattttcatgatattgtagatgatgctttgtggaaacgtcttgatctaattcgtaagattggtaatcgtgccgcacataacggtagaaaaatcacggaagatgaagcaattctttgcttacagaatttgtttatctttatggactatgtgtcatattgctattccgatttttatgaagagagaaaatatgatgttaatatgttgactgaaatacaagaagattcagtggtagttaaaacttcagataatgacgtggatttacaggcactaattgctgaaaataaggcacttaaggaagaattaactgcaaagcgtgcagaacagcagcagacctatgttccgaagcctcttgatttatccgagtataagacaagaaaaatctatattgattctatgcttttggatgccggatggacagaaggaaaagactggattaatgaagttgaactttcgggaatgcctaacaaatcagaggtaggttttgctgattatgttctttatgatgatatgcatcgtccccttgctgtaatcgaagctaagagaacatgtgttgatgtttctaagggaagacaacaggcaaaactttatgccgatttattagaagaaaaatataagagaagaccagtggtggttttaacaaatggttttgaaacaagaattattgataatcagtatccggagagaaaggtttcggtaatctattcgaagagagatttggagaagctttttaatcttcaaacaatgaagacaagtcttaatcatgtatttgtagataagaatattgcaggtcgttattatcaggaagctgcaataaaagcagtatgtgatgcatttgacaatcgtaaccggagaaaagcacttcttgtaatggctaccgggtcaggaaagacaagaactgcaattgctttatgtaaggttttattagatgccggatgggtaaaaaatattttgtttctggcagatcgtaattcattagttacgcaggcaaaaagaagttttgtaaatcttttgcctgatttgtcatgctcaaatcttgtagaagaaaaagataattacacagctcattgtattttttctacgtatcagactatgatgaactgtattgattcagttaaggacgacaacgggaagttatttacttgtggacattttgaccttgtaatatgtgatgaggctcatagatcaatttataacaaatatagagatatattcaattatttcgacgcaccattggtaggtcttacagcaactcctaaggatgaaattgataagaatacttatggaatctttgatttggaaaatggcgtgcctacatatgggtatgagcttgctcaggctgtaaaggacggatatctcgttgactttactactgttgaaacaaagttgaaattcattgaagaaggcattgcatatgacgaattgtctgaagaagacaaggctgaatatgaagaaacttttaaattaaaagatggagaacttccggaaagaatcaattcttcagcgttaaatacatggatatttaacgaggatactattaagcaagtacttcatatacttatgagagatggacttaaagtagactatggtcagaagcttggtaagacaattatctttgctaagaatcatgaccacgcagagaaaatactggaagtatttaataagcagtatccggagcttagtaaggatggacatccgtttgctaaagtaatagataactatatgacatatgcacagagtgcgattgatgaattttctgatccaaataaaatgcctcagattgcaatatctgtggacatgcttgatactggtattgatgttcctgaagtattgaaccttgtatttttcaagaaggtgatgagcaaggctaagttttggcagatgattggtcgaggtaccagactttgtcccggacttatggatggagaagataaaggtaagttttatatctttgatttctgtggaaattttgagtttttccgtatgaatcagggaagaccaacagcgaatatgattgcattacagggagctatcttttctcttgaatttgaaatggcatacaaacttcagagtatagaatatcagaatgcaagacttattgactacagaaataagcttgttgaaatgatgataggtaaggtacaggaactaaaccgtgaaaattttgccgtaaggcagcatctaaagtatgtagacatatattcaactgaaaagaattatcaatcaatcacatttgaagacacattgatggttcgcgaagaattagcacctcttattatgcctgatggagatgaaacaagtgcagttcgtttcgacgctttgatgtatggaatggaattagcatatttggcgggtaaaggatatggtcgtcatagaagtgatcttttcaaaaaggttgaaggtattgcaggtgtagcaaatattcctgagattcaggtacaatcagaacttatcaataaaattcttcatacagattacgtagataatgctggaattgatgaatttgaacatatcagagtaagtcttcgtaatcttatgaaatatttgcctaagggaattattaaatatgatacagattttacggatgaaattttgtctacagagtggaatgattctgaacttgaaaatgatgaattgaagaattataaagcaaaagctgaattctatgttcgtcagcatcaagataatattgtaattgcaaagcttaaaactaataagccgcttacagagatggatatagaaagtctggaacagattctttggaaagaagttggttcacaggatgactatgaaaaagaatatggtcataagcctttaggtgagtttgttcgcgaaattgttggactagatatgaatgctgcaaaggaagcgttttcagagtttttgaatgatacaaatcttgatagcagacagatttactttgtaaatcagattgttgagtatattgtacacaacggaatgatgaaggatctttctgtacttcaagaatcaccatttactgataaaggaagtgttgttgaggtatttactgacgtgacagtatggatgggcattaggaaagttattgaccagattaatgcaaatgcgatagcataaaaatctaaattcttagcagtaatggactacttacaggcaatatagtagattttttattgatggaaatgcaaaaaatttataaaaagtattgcaaattttcagacctttgaagatactatgaataacagagttgcccgaagtcttttagacattggggaccaagctgagacgtgttctcagcttttttacgttaaggagagattttatggatttgaaagaactattgaccgttgatgagcagttagataagttaatcactcatgggatgattgtcgctgataaagaaaaagcaaaagacatttaaaaaagagtaaattattatcgttttacgggttatgctatccaattcaagaaaaaaaagaatgtgcaaacaaaagcgtgtcaactttaaaacaaatattactctgtgatagtgcaaaattgcagaagtagaataagaaaaggaaatacaacaaaaatttttattataataagattgtattatcatagaatatggggtataataaaaatgataaaattctgataaaattatgataaggagatgcttatgatacagattagacctgtctcagatttgagaaataaatttacagaaattgaaaaagtagtaagtggtggagaaccagtgtatttgactaagaatggatatggctctatggtggtgttgagccttgatgcgtattccagactatcagaagatgtggaatatgcattagatgaagcagatagagcggctagggaaaatgacacaagatatacacatgaagaggttttttcaaaacttcgcaggaggataaatgaataaaaaaacatatagattgcgttatttaccattattttatgaagaattggaaaaaaagccgtttatatagcaaagaaattacaaaatcctcaagctgccaataaattgattgattcagtggaacaggcgattcaagaacgcttactttcagcggagtcctttgaaaaatatcattccatgaaagaaagacgatatccttattatagaatttatgtagataattacgtaatatattatgttgtgatcgatgatgagggggacgacaaaattatggaagttcgacgatttctttataagggacagaataggacaaacatgatatgagcaggctttcggttcgtgtgtcattgcattagctgaatactttggatacgatacacgctctgaccatataaagaaattgtttaaaacaatttctgatacaagtttttatgtagcgttcgaagcagataaatatcatcacattgccattacgttccactcttcaaagggattagagtttgaacaggtaattgtatttgcagaagattatagactgtctgatatgccgagaatatacaaccattatgtagtggttacacgtgcaaaaagcaaattgattatcgttaagttaaataattacaatgcgaattgttttcaacataatttacaaaagatattttctgaaagtggacacagtgttcaagatatcgtttcatttgaaacagaatggatttttgaaaaaatatgaatagttagggtattcgtagagtagatggaattctattctacggattttttgtataagggaagcctgtttataaaacatagaactttcgaagaaagtttaagcgctaacaaataaacaactaagttggtggttgtgattcttaatggaaaatattgtttttataaagtaaaatattttgtaagaaaaaacagatatatgggagatgaaagaatgaatgagccagtaagtgtttttccacagatatttatattattaattatacagtggagcggagaatcaaaaaagaaaagggatatattttcttgtcttcttttagtagaatgcgttgtttttctaggggtagcattttctttgttatcaccattatttcaaggagtagttgctcagtttgtacagatggaaaaagagcttaacaattttaatgaagatatatattataatatatttgcaataaatcgtttggatttaatagacaatatgtggtttctgaaaatattatttttttctgctataaattttattttatttgttgggttaatgaaagttgagataaaaaaacgtatacagttattcatttttggaattatacaaattattgttttagcatttttatttgataaagtgatatatgttttatttttcttaatagtttgtctatttattttaaatatatttattccatttggaagtgaggcatattttaattcaataaaatatgcgtattattttattgaattatatcaacgtgatagagagaataaaataaaaaaaagtaaaatttttattttggtaaaattgggaataggtgcaattgtttttgtcatatctttaaagctattgtttccagtttgttctttttatttattgctaatgttatatgcagcaattgttttacttatttatatgaattcttctaaaagtaaaattcaaatgttaattagaaagatgactgtgtatggcttgattgccttttttgtacttgcaaataataattcttttcaaaaaagttttatcagtttgattttagcagtggtgtcaatcttttttgcaatagatagaataatagctttgtttaaggagtgtaaaaatatggttatgcaggagagtcttgcttatttaattgatgagattaatgaagatgaaatacttctaaaagaaaagtttgatattatacaaatagaacaattgaaattatcggaagatatattgttacgtcagattattatacataaaaagttgggattaccatcagtaagtacattaattcaaacatatagagaacttggatatggacaagaaacaaaattagtgaattcaatagaatattttactataattgatgaaaacacttctttagaaaaaagagaagaattattatctaaaatatggaatattaaagtttcaggttgtgagtttgttcctctttctgtagaatatgcttttgtattgttttatttgaaaaaagattatgaaaagattatagaaattcttgaaaaacattggatttatttagaggatgattgcaaatatattttgtattatgcctataaaaaaataaatgagttagtaggagcagaaactgtaagaaaagaaatagtagattttcagcagattgaagaacgtatgaaatttcaattagatgattataatgaggaatgagagatgaattaggatacagttaaaatatatggataaaaaatactgttgatgataagcaatatgaagagttatccgttatgggattaattagtattgacgatataaagtataaagatagcataaaaactacattagaagatgtgcagatggaatatgctgataaaatgatagccttaattcttgattatataaaggaattgggagagaaaaaggctgcttatgaggaggcatatgataagtataatgcgggattaaacacatacactgatgttatcttagcaaaaaatgaggaattgaatcaacagggattatttgcattttcaaataaaaaggagctgaaagcggaactagatagacttaacagagagtacgaagagtagcgcaagacagagccaatagatttgaaaaatgcgtattttaatatgtgatccagaataggagatatatattatgcattcagaagaaattcgtaaaaagatagcttatgacttgacaatggagtatgtaaaacaaaacaatgtgatgaagaatccttcaagtgacagccctatatctgccagaattgaaaagattgaacaaatttataatgagatttttgaattgcgttgtaaattcggaagcaacattaccagagtgttatattttttctattatgagggaaaaattataatgactaatggctttgttaagaaaacacagaaaactcccaaagaggagatacagattgcaaaagatagaaggaaagattttatagaaagggtgatgaaggatgagaacatttgatgatatgctttctaatcagttgaaggatgaaaattttagaaaagagtatgaagcaatccagccagagatggatgttatcagagctatcgtagatgcaagaacctcacagaatcttacgcagaaagagcttgcagaacgtactggtattaatcaggctgatattagtaaacttgagaatggaacaagaaatccatctgtaaatttacttaaaagattagcggatggaatgggaatggctcttaagattgagtttgtaccgaaacagaaaatttgataataagaggcttttatattagtgaagcctctttgaaatggaatacaagggggatatggtgtctaaagaacgaaatagaacgaagaaaagaaatagaataaagaagcagaatgctttatagaaaacagaaaaacgcctaaaattgaaccaatggttgatggctatgcaggctttctttttcttgacaaaaataacaaacctattgttgcattacattgggaaaagtatatgaaaagagcggtggaaaagtacaatgaaggacataaattacagcttccaacgattacacctcatggtcgagttataataaggacaagttagaaaactccagtaaatacaaggggttgcactaatttagtccttatttttaactccctgaaaaagggaaaaataaggcagcgctgtcattccagaatatgaattat

SEQ ID NO: 12765 - DNA, 2285 bp, Unknown
  gut microbiota DNA sequence
aatactaaattctttatattggcttttcaagtcttattttatactttattaaatttttttgctatcagccttaaagcaatttcattaatttacagttttcaatgcctgcgtcccagaatttttccaaaggaatattttgcacctgacacacaatgcttgaatccattgctccatgtcccacaataataacatccttacctgcatctaactgtggctgaactacttctttaagaaaacttcctgttctggcaaacaaatcatcaaaagtttctccatcttccacacccggataattagccggatccttaaacaactttctaatagggcttccctctatctgagacggatgtgttacaccttcatacacgccaaaacacatttccataagcctgtcgtcatatacaataggaatgtttcttccttccaaaacaatttcagctgtctgctttgccctaacaagcggtgagcaatagcatatgtcaaaattaacatctttatatttttctttggcttgctctgccatctgaatgccttcttcatttaatggaatatctgtacgaccttgaagcttatgcttggcattccaatctgtttttccgtgtctcataatatataacataacttttctccatatcttttgctaatctaatataatttatacggatataagcttaactcattcaggttattttcgcaactgtgacttcattggaacaaattcaattttcagctgtattcccatacctgctacaagtcttcctaataatatggtaaaaataccatattgtcaattactaacattctcttttttatttttataaattgtattttttcttactatatgttatgctttctaaatacacctaaaaaggtaataagaaaggtaaaaatattatgaaaaaacacaatgacaaaagaagctctttctccggaaagctaggcttcgttctttcagctgcaggggcttctgtaggactgggaaatatttggagatttccttatcttgctgcaaaatatggcggtggtattttcctattggtatatattattctggcccttactttcggatatacaatgattgtagctgaaacttctattggtcgtatgactaagaaaagccctgttggtgcttttaaatcatttagtaactctaagtttgtatctttaggcggatggattaatgccatcattcctatacttattgttccgtactattctgttatcggtggctgggttattaaatatcttgccgaatatattattggtgacagcaaacttttggccggagatgattatttcaccggttttatttcaggtggtttttccgctgaagtttgttttattatatttacttttataactttagcaattatttatgccggagttagaaatggtattgaacgtgtttcaaaatttatgatgcctatccttgtagttctttcttttattattatgatttattcggtaacaagaccgggcgctttggccggtgtaaaatattttcttgttcctaatgttaagaacttctcatggatgactgtagttgcagctatgggacagatgttctattcactgtctattgcaatgggtattttgattacatttggctcatatatgaaaaaagatatatctatagaagagtctaccagaaatgtagaaatctttgacactgccattgctattatggccggacttatgataattcctgcagttttcgccttctcaggtggcgaccctgaagccttaaaggcaggtccttcacttatgtttattacaattcctaagatgttcgaaagcatgggacttagcatggttgttggtattcttttcttcacattagtactatttgctgcacttacaagctcaattgcattaacagaaagtgctgtttcaacatttgaggaccaattcggatggaacagaaagaagtcaacaatcattcttggtggaattatgcttgttcttggaagtctttcatcattaggctatggtcctttaggctgcgttaagattattggaatgcaattcttagatttcttcgatttcttaactaattctgtaatgatgccaattgctgcatttgctacatgcttacttgtttcaaaagtaattggacttaggaagattgaagaagaagtacttcatggggaaggtacattccgcagaaagaagattttcaattttatgattaaatatctctgcccattatttgcggcaataatacttttaagttcaattgcaaatgcatttggatggataacaatctaaggaaaagattgtgagaa

SEQ ID NO: 12766 - DNA, 3324 bp, Unknown
  gut microbiota DNA sequence
attgaacttcacaacaccatagttaaaattggaatagattagtgttacaatagaaaaaaacaaattttcgaaaggcgagcattatgaaaaccagacagcaggcagttgattatggactaacttttaaagatacatatatggaaactcctttcagggacactaattggcagcttattagagtgaaaggtagcaagaaagcatttctttggatttatgaaaggaacggctttgttaatcttaatgtgaaagttgatccacagtggagagatttttggagagaaacatacaagtctgtaattgcaggatatcatcagaataaggaacattggaatactattattcttgatggaactatatctgataaggaaatcaaaagaatgatagctgaaagttatgatattattacggacagcccaactaagcgaatttatgaagctgtgaagaagattccaaagggacacgttgccacttatggaagaattgctgaaatggcaggtgagcctaagatggcaagggctgtgggcaatgcgctacacaagaatcctgatccggagcatattccatgttttcgcgtggttaattctaagggtgaactttcaggagcctttgcttttggtggtgaaaatgagcaggcaagaagacttatggcggacggagtcgaagtggttaacggcaaggttgacttaaagaagtatggaatttaaaaacctgcatatactgactaaaaacgtcaaaatcttgaagaaatgtaaatttttgagaaaaataactttgaagaaatatatgatttcaataaaaataatcttgaagaaatgtcaaaaaacggctgtaatccctttaaataaagggattctcaaaattaaaaatcagaatcataatttatgttcaatttgaatctattcttattaaaagtaataattccttcatcctgcatttttcccagctctttagaaagtgcgctacggtcaaggttaaggtagtcagccatttgctggcggttaaatggaatctgaaattctgtattattgtgtttgatggattggtttgacaggtaagtcaaaactcgtccacgaacactttttgacgaagtgcagaatattcttgttgataatgttaaattctttcttgtggaaagcaccaaaagattataagtaaaggtgttgtaccatgaagcactgttattgattggcgcaaaaatctgtctcatattaagcataagtattgtggaatcttttgtggcaactgcgtccaccatcataggctcactgcaaagggcgtagctttcggcgaaaatctgtccaacatcaatgttacttagaatacttttgttgtcccacatatctatcatttcaatatttatgctaccttccagcacaattccaatttcgtgtacaatgtccccggctctaaatatgaaagaatttttcttatattttttctcagtcatacaatgtttgtttttcatgtcttcaatttgttccaaagttaatcctttaaacaagggtatatttaaaataatcataaaactcctttttggttgccataaccaccgaaaatataagaaaagtatactataatcctaaaatgtaaacaagattacagaaatgactttaaattaaaaacaaaattaaaagtcaaaatatgtaattttttcaaaaaaatgatttaagatagaaataatactttttaagagaggttcaaaatgattagaagagtaataaatattgatgaagaaaaatgtaacggttgtggtatttgcgttaatgcctgccacgaaggtgcaataggtcttgttgacggaaaggctaagcttcttagagatgattattgcgacggtttaggtgattgccttccaacttgccctacaggggctattactttcgttgaaagagaagcggctgcatatgatgaagcagcagttaaggaaaatatgcgtaagaaagcggaagcagaaaagagtcagggaaaaactcctgttgcacatcaggggtgtcccggacagagaatgatgcaacttaacaaaaatagggaagaaaaggttgaaactaatgttaaattaacttctaagcttgcccagtggcctgttcagattaagcttgtgccaattaacgcaccttatttcgatggagctaaccttttaatagcagcagattgtacagcttatgcttacgctaatttccatcaggaatttatgaatggaaagattacaattgtaggttgtccaaagcttgacgcagtggattatagcgaaaagcttacggagataattagaaataatgacattaaaagtgtaacaatagtaagaatggaagtgccatgttgtggtggacttgaaaatgccgcaaagacggcattgcagaatagtgggaagttcattccatggaatgttgttacaatatcaattgacggacagattctattataagaattatttaataacaaaaatagcgaaggtaccataacggtactttcgctattttttgataattattaattagattcatcattcagcattttgcctttcattttttcaaaaataaagtcagcataaacgttattaatttctttgatttttctacggcttattggaatggttgaattgtcgcttaatatgaagcagttgttttccttattgataacttcataaagattaacaattattcctttgcaacagcttattaaaaaagaaaatggtgaaattaattctaagaagtttccgaaagacatacggaatgaaatatcgttacgggatttggtgtgaataaagattttgtgattaatatattcgccataaataatatcgcgaaggtatagttttcggttattaggaagagtaataaaaagtgagagacgagaatcaaccttaataagtttttgtaccatagtgtgaaccatattttgagaaaaaggttttacaaggtagaaagatgcgtcaacgcaatagctttcgctggcaaattcattacttgtagtgcagaaaattattttcacggatgcgtctgttttacgaatctgtctggcaacatcaacgccggttagctggtccataaaaatatcaagaaaaactatgtcgtacattcccggtttccacacggacaaaaaagtttcgccattatcgaaaagttgccttttacagtttgaataaacagttccctgcaattctttatcaatcatagttgtaagtttcttgatttcgccatagtcatcatcaacgaaagccagtctcataaatatcccctcctaaaaacagtaattttactaataaaattatagcacaaattaaaaaatatataaataccaataccgtttgggttaaattagtgc

SEQ ID NO: 12767 - DNA, 267 bp, Unknown
  gut microbiota DNA sequence
cgttccctacgacttatgaaagatgaatatggcaatcaaagtatggtcgttgatgaagtcttacgtggaagaatggaaaccagactgattacaaagattctgtcatttgaaattaagtaataacctctctcttttcgtggaagcgtgccatactattccacgcttcccgaacagggaggtttgttattccatcaaagcatattgagctttcaatgtgttttgataggctaacgagccattgttctttgaaaactgaataaaagtaat

SEQ ID NO: 12768 - DNA, 897 bp, Unknown
  gut microbiota DNA sequence
ataaagcaagactggcaggtagacaatggtaaaaaagaaaagcatcgtgaaatcagagggtagatgaatccgtgaaaacaaggccaaagtagaaaatacatagaatccgagcagaatataatctatggccagtgcaatgagccgctcaccgatactggcaggcgtttgactgatgcggacaaattgtccggtgataattgtagattctgccattcctgataaaacatttttagtatttcattgcaaatatatcattattctcttatttttgttacctatttcagacaaaacttctctgaaatagtcatggggtatgaaagaagtgacgtttatccggcagaacatcgaaaaatggaaacgagcagaaacaatggtggagcaggcggaaagtctgtctcccgatgaacttgccgacgcatatacggagcttacggcagatctggcttttgcccaaacgcatttccccgcttcccgcatcactatctatctgaacaatcttgcctcggcattgcacaaccgcatttatagaaacaagcgcgagaaatggtcaagaattatcacctactggacccgtgaagtgccttcggccatgcacgatgcacgccgtgagctggtggcttccttcattatatttgtggtcagcgcattgataggagtggtatccgctgccggagaccccgattttgtgcgtttgattttaggaaactcctatgtggatatgactttgaacaatatcgctaatggtgaacctatggctgtatataacggttcctccgagttccccatgtttctgagtatcacgctgaacaatatcatggtctccttcaactgctttgccatggggttgctgaccagttttggcaccggatacatgctccttaacaatggtatcatgat

SEQ ID NO: 12769 - DNA, 466 bp, Unknown
  gut microbiota DNA sequence
ggagtccttccttgccatttggctgcacgggacactcgaaatctgggcgattattgtagccggtgccgccggtcttgccctgggcaacggatggctctttcccggaacctattcaaggctggaatctttcaaacggggagccaaaaaaggactgaaaatagtggtgggtacggtacccgtattcatcatggcaggatttatagaaggattcgttacccgccataccgaacttccggatgctttgaggttcggctttattctactctctttgtcgtttatctttttttattatatttatttacctaacagaaagaagcatggaagcacagaaacctaaaatcgcactgtatgtacaacgttcttttggagagaaactaactgctacctttgattttatcaaagagaattggaagccgttgatgaaattcaccacatatctgatgttgccgctttgtctgcttcaggg

SEQ ID NO: 12770 - DNA, 880 bp, Unknown
  gut microbiota DNA sequence
tcggagcgtccatcatggcactggtgacttattacagtctgtatgccgttctctatctgctaggaactgtcatgctgacctctttggtctacgcattggtccgtacttacaatgaacgggaaaaacgcttggagggagtgacgttagggatgctgaagcccttgttgttccgtaatgtcagaagggtatttctgataatgattgtcggtgtgcttttggtgctgtttgtagggcttattgttggttttatagccaccgtcattccgttcatggcgattgcgttcttgttcgttctgctcgttgtggtggtgtctgtgccacttgctatttgggctccagtctatctgttcgaagatatctatatcatagatgccttgaagaaggcctaccgactgggtttcgctacctggggaggtatcgtactgatttccattgttatgggattcatcgccgccatcttgcagggagtgacgatgattccatggtatatcgggactattgtgaaatatatctttgcaatgactgatgcaggtggcggtgccactgtatcggcagcctatagctttgtgctttatctgctggcggtggtccaggcattcggcgtttatatgtccatgattttctcattgctgggactggcttatcaatacggtcatgcttcggaaaagatagattatgtgatggtggagagtgatattgacaattttgataaactctgataacggactatgaatatggctccggctgatacactggtttgtgatactgcacaggttgccgcttggcagtctgacccggcgtttgcttacagtcgtgagttgatagctcccgaaattaatgtacttgagtggttcagcagatggttcggcaagctgctgga

SEQ ID NO: 12771 - DNA, 329 bp, Unknown
  gut microbiota DNA sequence
aaatggctatcattcagaatggatcaccattattttcaggagatgcaggaagtggaccgtcagagattagaagatatattctggaaaatgattggttggatgcgattgtgcagttagggacagatatgtttatgaataccggtatcagcacttatatttggatttgttctaaagataaaccagtgcacagagctggaaaagtgcagttgattgatgcttcgcattgttttgaagcaagaagaaaaagtatcggaacaaaaagaaatgacattactgataaatgccgtgatctgattgtaaaggcatatggtgcatttgaaaatggaact

SEQ ID NO: 12772 - DNA, 10912 bp, Unknown
  gut microbiota DNA sequence
ctgttgttttggaaatcgttagcttcgattactcgaattaacaatgttcgctctgaaaattttattttgaattttcagggatggttgctgttcaattatcaatgttcctgtttgtttcttttaagccttgttctttccgagaagtattaacggagaaggagggatttgaaccctcgcgccgctattaacgacctactccctttccaggggagccccttcagccacttgggtacttctccaagcagttgactcttttaagaagaaacttttcaaataaaaatagaagttcttcacttctatagcggagaaggtgggattcgaacccacggaggtttgaccctcaccggttttcaagaccggcaccataaaccgctcggacacctctccaagtgcgtcgctctgtctgacgcgctccattataatatcatctgtatttgacaatgtcaacacttttttacaacttttttcaaggttttttattttattttcaattttcgcctgtttttcctttatttataggcatttcaagctattattttcttgttttttctcgtccaaaatacagataaacatcgtttttttatggttgtagtgattgtgaatttacaaagactaaatcaatctgtttaatcaaaaccatggtgttttgttacctttatttgcatttatactatttctatttggcgtccaattcaataaataattctgctatatctatatcctccggtgtggtgacttttatatttttgtaatcaccctgaacaaatcttacctgatttgttgtaaattcttccaccaccattgcatcatctgttatatttagagtcgtattacctttttctaactcttctttcatttttttatatgccatctttactaaatccgtcttaaaactttgtggcgtttgagttatccataattcacttctatttggggtatctataatatatccttctttgttggctctttttattgtatctttgaccggtactcctaccacgcaggcatcactttttatagtaccttctatacttctttctataatttcattatttatcaaaggccttgcaccatcatgaataagaactatatttcccgttacttcttttaacccattgtaaacagactcatatctttcgcttccacctgctactacatttttaatttttttaagattatatttttctacaatttcttttttgcagtaatcaatgtcctcttttcctgtaacaagaattatttcatctactctgcttttttcaaattcaaaaagggaataccagataaccggctttccctttatttccataaattgtttttttgttttgcttttcattcgactgccacttcctgcagccaatactattgctgttattttattcatatctttcacctaattttaaatttggaatagcatttaaatcccaactgtgtgtaattccgtttttatattcataataagctgctgagcctatcattactgcgttgtctgtacacaaaataggtgacggatgataaaattccacgcctctcttttcgcattcttccttgaaagctgctctgatggctgtgtttgaagccactccgcctgctatggcaaactttttcattcctgtttcttcaagggcaatcattgctctgcttactaaagtatccactacggatttttggaaagatgctgccacatctgcaggattaatctcttcgcctttcatttttgacaaattaagctggttaagtactgccgatttaagcccgctaaagctaaaatcataaatactgttagctatttttgtccttggaaactcatatgcatgagggttgccttcttttgagattttgtcaattttagggcctcccgggtatcctaaacctattgctcttgcaaccttatcaaaagcttcacctgctgcatcatctcttgtttttccaagaattttgtatttgccataatcttcaacaacaactaaatgagtatgtccacctgatactacaaggcacacaaatggtggctctaattccttgttttcaacataattagcgcaaatatgtccttcaatatggtgcacaccaattaaaggtatgtcctttgcaaagcatatagcctttgcttctgccacacctaccaataaggctccaactaagcccggtccatatgtaacacctattgcatctatgtcatctaatgtgcaattagcgtccgacaaagctttttctataacataatttatattttcaatatgttttcttgatgcgatttcaggcacaacaccaccgtataaagtatgtaaatctatctgagatgaaataacattagataatgcttctctaccgttaactactactgctgctgctgtttcgtcacaagaactttcaattgctaatattttcacttcttccatgttaacaccttttctttttctgtctaattaatgttaataagtttagtcctcaaaacataaattaacaaacattccatcctttcctgctttagcattttcaaatatatccgtaactgtatccatatactctaaaggtcttactaatgaagggctgaaatgtgtaagccacatttccttaggttgtgcctcttttgcaatctttgcagcctctttaaatgtcatatgtttatgttctcttgccttggcatccttatcaggttcgccatacatcccttcgcatataaaaaggtccgccccttttgccgcctctgctattacaggcactggtcttgtatctgttgtataagtaacttttaaaccttttcttggtgcaccaactaccatatcaggtgtaaatgttacaccatcaacttcaaccgtctctcctttttgaagttttccccaacttcttatgggtatgttaagtttttttgccgcttcagggttgaattttcctccacgatctatttctatggaatatccgtagcaaactatattatgctttactctaaaagctttaatcctgaaatcttcaaattccagtgtttgctcaccttcagtaagttcaataaaattaatgtcaaaaggtaattcaggtgctatggttctaagagcattgacaacttttgtcaatcctcttggacctatcattgtaagaggttccgttctctctgcatttcccattgttaaaagtaaacccggcaagccactaatatgatctgcatgataatgtgtaatgcatataacatcaataggcttaaatgtccagcctttttctttgattgcaacctgagtaccctctccacaatctattaatatattttttccattatatctgcacataagggctgtaagccatcttcttggaagtggcatcattccccctgtgccaagtaaacaaacatctaacataccttctccattttctaaatgattaaaatcataacaattctgtataattttttgtatttattttgtataaaaatttttctgttatttcatcatagcatttttcgcacaaatcaaaagtgtcttctcttccatctttttttgaaaaatacccccacttataatctgcgaaaaatacaccttcctctattgtggaattattcactttaatattttttccacaattgttacatactactttcgttagttttttatctttatatactctcatactttcctcctgtgttaataattagtcttgtttcattctaactataaacactttcaaatactagtggaaagttcttctaatcatgtttccacataataagagcattttcaacaggtttttcataaaaattcttacgtattcccgcttcttcaaagcctagtttttcatataaacttattgccggaacattagtctctcttacttccaaagtaatatctgacactcctttttttccgcattcataaaaaagtttatttaacatattctcagccacattctttcttctaaaattttttttgactgccacattgctaatgtcagcttcttcaaaagaaatatatgctccacaatatgccacaatttcatctttaatttctgctactatatacacagtattttcgttttttaaagaatccaaaaaggatttttcagaccatggtagagaaaaaatttccttctctattgctgcaacctgttttatatccccttcactcattaacctatagattatttcctgcatcttttgttctttccattttttcttttaattctctttcagcctgagataatcttaaatattccggtgcgtgctcagctgctgtttcagtcttaccttctttgtaataaatttctgccaaagatgccaaagatgaagcctttgctctgtttacagatgcaggcgcataataatgctctgttgtcatttcttcttcgattatatctttgtaagcatccacgccatcaccattaaacataaccgcctgtgacatattatttaattcttttacaagatctctaatcatcataatgcactgtggttttataacttccattgttgtaccgttaaacttgtaaattcctgtgtaaacctgttctcttcttgcatccataatagggcagataacaaaagatgaagagaaaagattatatgctaacgcatccattgttggaatatttataattggaatattaagtgccagtccgaaacctttagctgtggcacttccaattctaagacctgtgtatgaccccggaccacctgcaattgcaattgcatctaccgtattcatatccaaatctatattcttctttatttcatctatcataggcaataaagtctgcgaatgtgtttttttgtgattaattgtatattctgctgttaagacaccatctgttacaacagctacagttgccaccatagatgaactgtctattgccaaaattctcatagtccttccaccgtaacctttctataatcaagacctttttctaaatctttctctattaatacagttgctgcatcacttggaattaattcttcaattaatttagaccattctattaagcataccccttccccaaagaaatagtcttcataaccgatttcatacatttcttcgggatcaccaattctataaacgtcaaaatgataaagtggtattcttccttcatcatacacctgaattattgtaaaagtagggctgtttactgtttcttcgattccgagtcccttagcgaatccttgggtaaatacagtctttcccactcctaaatcaccattaagacaaataacctgtccgggctttgcctgttgtcctattttttttccaagattaaatgtgtcttcccaacacatagtctcataaaccatatatcctccaaacaaaatttttgattgaataaattgccaagcaaaattcacttgtacaatcctaataagcaataccattgtaacacaatataattttttttccacaaaaactaaaaagacggcacttttaatgccgccctctaggttaaaataatggattttacttgctatttaatttttatactttataactttattgtttttacgaaagcactaatgtgcttgtaaattaatgctgttaccaaacttactattatgcccttaacaatgttaaacggtgccacacatactattgtaaaacttaatttgtttgtaactaaaggctgaatctttgcccctgcaccgataattgcttctaatggcattccaaatgccttaacataaaatggtatcattacgaaatagttaagaacaacacctgctacagccatgaacaacgttccaactagcattccaatgaaggcattcttttttgttttgtgtttctggtaaattatacttgcgggtactaccaaacatactcctacacagaagtttgcgaaatctccaacatatgctgttgaagttcccttaattaataatttaaggataatctttattgcttccataattactcccgatacaggtcccataataaatgaacctacaagaattggaatctcacttaaatcaatttcataaaagtttggtgctataaaaggaattggaaattcccataacattaacactgcggcaagtgctgagaacattgccataagaaccagattttttgtagtaaatacttttttcattttaaatctcctttttcttttttcaaaattcttcaacacttattggtgatttgatttgccgtatctttctttttgtggcaaaaagaaaaccccggaaatagtttccagggcttaaatacaaagcaaatatagaaatgtaatattcataaattattgattgcaagattccagtggcttttagaatccttaatcaatctatgataattactctcctgtcttctctcatccagactttactgtcggttatggattcacaccatatcatgccattggctcgctgacttatgcattcgcaatcacagccggtagggaatttcaccctgccccgaagaattttttaatttttactatgctattatagtacttatataaatctttgtcaactttttaacaaaggttatctgctatttatttttttaccttaataaatgcattgtaaatagctttcattgctacttcaaagtcttcctctgcaacaccgataatgatgtttaattctgaagaaccctgatcaatcatcttaatatttactcttgcatctgctaaagctgtaaataagattgccgctgtacctcttgcactcttcattccacgacctacaactgcaataagagctaagttgctttcaatgtataactggtcaggatgcactcttgatctaatttcatcaagaattgttgtttccttgcctgctaacttatctgtctgaataacaacgctcattgtatctacacctgatggcatatgttcaaaacttacattgctcttttctaatgcacgaagaacgtttctaccaaatccaacttcgctgttcatcttgtctttttcaatattgattacagacataccttttttacctgcaatacctgtaataatatgttcacaaggttctgctgtttctgatacaatcattgttcctctgtcctgcgggcaattagtattctttatatttacaggaatgcctgctgctcttactgggaaaatagcatcttcatgaagtacagttgcgcccatatatgctaattctctaagttcactatatgtaattgtgttaattggagccggattgttaacaattctaggatcacaaataaggcatccgctaacatctgtccagttttcataaatcttagcttctgctgctctggcaataatagaccctgttacgtcagaacctccacgtgaaaatgttttgattgttccatttggcattgagccgtagaatcccggtactactgctttctctgttgctgcaagctttggaattaatttttctgctgttttgtcccagtcaaactgtcccatatcatcaaagaaaatatattttgcagcatcaataaattcaaagcctaaatacttagctaaaaccttactgttaagaaattcaccacggctggctgcataatcacggcctgccatatgtgaaaaagctccctttataatttcaaaatcttcctctaaagaaaaatcttcaattcctaagtccataataatgttattatatctgtccttaatcatctggaactgctcatcaaagttctgtccttctgatgccatttcatagcatttgtaaagcatatctgttactttaatgtcttccacatatctttttcccggtgcagatgctacaacaaaacgtcttgttggatcgtctaatattatttctgcaacctttttaaactgcttagcgtcagctaatgaacttcccccaaacttaacaacctttgtttccttcatgttatattttccccttaatcttattttatattatgcggttatatgagatatagttaataaaattaaccttctattctaattctagagattactgtgcctaattcatctgctttttttgcaaacgtagcttcactaatcttttctgtaataaatccaaattctccatcaatgttagcatcaacatattcaacattgccaaataccttttcaatgtcttcttttgaactactacttctaacaaagaatttcttctttgactttgaaaaatcttctaattctaatttttcttcatcccacattactgttgttgatacattaagatgtcttacactatctaccacgtcagacacaactgcgctggctgttggaagctttcctgcaccactaccgataaatactaagtcgcctaccatatttccacgtacaagtattccgtttacaacgccactaacgttaaataatggatgatccggtgccaaaagtctaggtgctacagatgcaactacctgattatcctcgttcttgcacttacctaataacttaattgatcgtcccatagccttagcatatttaaaatcttctgctgtaatttttgaaattccttctgtataaatttcttcaaagtttacagttttaccttttgctaaagatgctaatatagcaatctttctaactgcgtcatagccttcgatatcagcttcaggatttctttcagcatagcctaaatcctgtgcctgttttaaagtgctgtcaaagtcagctccttctttgtccatttttgttaaaatgtaatttgttgtaccatttaagatacctgttatttcacatatcttatcagctgtaatatgcatgttaagtggacgtataatagggattccaccacctactgcagcttcaaacaaaaagtttctgttatgctgctgggcaatcttaattaattctgcaccatattttgcaacaagttctttgtttgatgtacaaacactcttgcctgcttctaatgccgacttaacaaaatcgtatgatggtttaagtcctcccattacttctataataacctcaacttcagggtcatttaaaataatattgtaatcatgaactaatacattctcacaaggatctcctggaaactctcttaaatcaagtacatattttatgtcaatttcctgtcctgctttgtttgtaattaattctttgttctctttaataatctggaatactcctgaacctactgttccgtatcctaaaattgccacttttatcatgtttattcctcgcttgttaaagtttagtttattttaccattgaataatagcacggttaatggtaatccgcaacaaaaattagttatctttcttaatattaatccattttaagtatgcatttataaagggatcaatgtaaccatccattacttttccaacgtctgttatctcctgatttgttctgtgatcctttaccattgtatatggttgcataacgtaagaacgtatctgactgccccatccaatctcttttacttctcctctaattcctgaacgtttttcctcttcttcctgtttttttagaacataaagtttagcttttaacatcttcatagccttatctttattctgaagctgagatctttcattctgacactgcacaacaattcctgtagggttatgtgttattcttaccgccgatgatgttttgttaatgtgctgtccaccggcaccacttgaacggtaagtatcaattctaatgtcatcatcatttatttcaacatcaaggtcttcctcaatatcaggcattacatcacatgaagcaaaagaagtctgtctttttcctgctgcattaaaaggagatattctaactagtctgtgaactcctttttctgatttcaaataaccatatgcgttttcgccgttaacctgaaatgttatggactttattcctgcctcgtctccatcaaggaaatcaagtacttctgttttatatcccttactttctgcccaacgggtatacattctatataacatacttgcccagtcacaagactctgttccccctgctcctgcattgatttttacaatggcattgtttttgtcatattctcctgacaaaagagtctctattttagttttttcaaattcatctataaactctttcgtttcctgctcaacttcttctactattgaagcatcattttcctcttcacccatttcaattaaagttccaagatcttcatatttctgctgaaggtgttcaatggtttcaaggctgtcttttaattgttttaattcttttgttatttcctgagaccttgttaaattatcccaaaatccctgttcttccattattccttcaatttcttctattctttctttttttgcctgtatgtcaaaggctttgcgcagttcttccaattgatctgcatattgattccattgatatttgtattgttcaagttctaccacgtcatacctcaatcttactttttctaaatttttaaaaaagaaaggagtcgtctaaagcaacccctttctttataattcaagccgttgtattaagccttacgtccacaacagtttttatacttctttcctgaaccacatggacaaggatcatttggataaatcttttcagattctctgtgtttagtcttgctaacacctgtatcatccttgtttgttcctgtaacttctgccacctcttcacgttcaactttctgttcaacctgaatatgatataaagtcttaacagtttcaactttgataccttcaatcatgtcattaaacatttcaaagccctgaatcttgtattcaacagcaggatctctctgaccataagccataagaccaataccctgtttcaactgttccatatcatctaagtgatccatccactttctgtcgattactcttaacagaacgattctttctaattctctaatatgttcaggttctgggaactcagcttccttagcttcgtaaagcttaactgcagcttccttcaataactgtttaaattcagcttttgaaagatgttcaatctcgctctttggaatttcaagttttacaggaataatttcaaataatgactgacttaaacctgcaacatcccaatcctt

SEQ ID NO: 12773 - DNA, 2671 bp, Unknown
  gut microbiota DNA sequence
catctctcatattctcgccgttaagaactcttgctctttcagcgtatataatctctctctggtcattgttaaccttatcatattccataaggttctttcttatgccaaagttatttccttctatcttcttctgtgctctttcaatagtcttagttaatgacttatggtgaatttcttcattctctggaacacctaatgcattaaagattgacataagcttctctgaagcaaacaatctcataatatcatcttccaatgaaatgtaaaacttagattcaccaacatcaccctgacgacctgaacgacctcttaactggttatcgatacgtcttgattcatgtctttctgtacctataatcttaagaccgcctgctgctcttgcagcatcatcaagcttaatatcagtaccacggcctgccatattagtagcaatagttactgctccatgttgacctgcctgagcaacgatttctgcttccttctcgtggaatttagcatttaatacattgtgtggaatacctctcttcttaagcaaagcactgatttcttctgaagaatcaatgttaatcgtaccaaccaatacaggctgtccctttgcatgtgattcaacaatgtcttctataactgcatgaagtttctccttcttagtcttaaacattgcatcttcatggtcaattcttgcaattggcttgtttgttggaatttcaacaacgtccatactataaatatctctaaattctttttcttctgttaaggctgtacctgtcatacctgccttcttgtcatatttgttaaagaagttctggaatgtaattgttgcaagagtcttgctttctctgttaacttttacatgttcctttgcttcaatagcctgatgtaaaccatcagaatatctacggcccggcataatacgtcctgtaaattcatctacaataagtacttcatcatccttaactacatagtcctgatctctatgcataaggttatgtgctcttaatgccaaaataacattgtgctgaagttctaagttttcagcatcagcatagttgtcaatgtggaagaatttttcaactttttcaataccctgtgctgttaaagtaacaatcttgtccttttcatttacaaggaagtctccatcttcttcaatatcaacacccataatggcatccatcttgctaagttcaggattagctgtgccacgttccatctgtcttgcaagaatgtcacacatttcatataacttagttgacttaccactctgtccggaaataataagaggtgttcttgcctcatcaataagaaccgagtcaacttcgtcgataatacagtaatgaagtccacgctgaactaactgttctttgtaaacaaccatattatctcttaagtagtcaaatcctaattcgttatttgtaatatatgtgatgtcacagttataggccgctttcttttcttcatgttccatgtctgaaagaacacagcctactgttaatcccaaaaatctgtgaacctgtcccatccactcagcatctcgggtagcaaggtattcgttaactgttacgatatgaacgcccttgccttccaatgcattaagatatgcaggcaacaaacatgtctgtgtcttaccttcaccggttttcatttctgcgatacgtccctgatgtaagataataccaccctgtaactgacatggataatgttctgttccaagtgttcttcttgttgcttctctaactaaggcaaatgcctcaggaagcaaatcgtctaaagtttcacctttctgtaatctatttctaaattctgttgtcttagccttcatctcgtcgtcggtaagtttttccatctccggcttaaggcttaatatcttctctattgtatgattatgtctttttaattcacgctgactatgcgttcctacgattttattaattacgcccatggtaatctcctcaaatatatttgttgtaaaatacaacacgctaaggaatataataccatttaaatcggttttattcaatacaagtatgtgttatttatttgttaaaaaagtgtaaacgtaggcatttcataacttttgttcttataaacggaaaaaagaatccctaactgatatatttcaaccaatcagggactcttattagatattatttagttttcttagttactttttatcttttagtcaagttcaggttctattaaaccgtatgtattacctttacgtttgtaaactacattaacttcttctgtctctgcattaaggaatacaaaaaagttatgtccaagtaattccatttctacgcaagcttcttcaggatccattggtttaataccaaatctcttagtctttttgattttaatctgatcctcatcctcgtcttcgtaatcagcttcaatgtatgtctctgtaaaagcttccttaattgatttcttcttgtcaataatcttattcttatacttaacaagctgtctttcaattgtttcctcaaccatatcgattgatacatacatatcatcacttatttcttccgctctgataatacgtcctttgactggaattgttacctccaccttctgttcattcttattaacacttaatgtaacgtccactctagtctcttctgcgaagtatttatcgagctttccgattttctcttctactgcgcttctgatgcct

SEQ ID NO: 12774 - DNA, 1069 bp, Unknown
  gut microbiota DNA sequence
atacattcaagtgcaacttattccttttatcctttgcataattcagcagaattttacctataccctgcgattgcatttcaccagaaacaaaaatgccctcaacatattcatcatttaaccctataaaaccctgtattcctgtatcatactcatacacataaacctctgctagtaacaacgcttcttttactgatttgaaattgcttttccagtattcggcggggataaaattatgtgcctttatattcgtatccaaccatatatctgcaactttatttatatcattcctttgaaattctctaatcataacggtgactctccataaacttgaagttagaagttactttttgacttcctttgtgatttcagttgtctttaattgtaactgataagtgttttcttctccgctcaaattggttgttttcaattcaaaccacaaattatcagtcaacttatcgtcactatctctaagaatgtcaccagaaatttttccaatatttccagaaacatctattgtcccacctgtctgattatcaacaccattagaaagcaaaatttctttttcacttccatttatataaatggtagttgagtatgtggtaatatcagaaaaatcgtctgacatcactttcaaatcgccaccataacaaatttcatctttgccatctaaaataattacaccattcgacacagaaatatatttattttctccgctaaatgaatatacctttaagggctgttcttcattgctttcagaggaagtgttgcaccctgcaagcagaaccgtacaagcaagcaaccatagcacaactgccattatctttttcataatataaccctcccatcaaattctaatttatcaaactctttttatttctgctgaatcatcttaaaatgctccaatgcctccacaattgctctctctttatctcatcatatgttgacttagtctctgctgatgttatatccatatcatcaagttcaatcgtaacattaatgtaatcatctggcttttattttagtttggacaaaagagccacagtctcaacggtactttcgttgtcccaac

SEQ ID NO: 12775 - DNA, 1205 bp, Unknown
  gut microbiota DNA sequence
aacaatatttcataatcaaaatatttttcctgaaacttgacctgttcttctatctgttctttagaatatagttcatcttctggtgccacaacccatttatcttcaacatcatttaacctatgaattatcgcaattaccttccctgtaaattcttcaaccggtttatttacacccaatatataagcatcttgttcttctccatcaggtgccattattccttcgatatatccataatttatcggataataaatatctttatactttgggtgatatgtccccattggtctatcaaccgtaacttttacaatctttcctaacatattatttctccaaatagtattcgatattgcaaatactatgcaattctgcttatttttagattcacggcttttttcttttataatattatcatatacatttagctattgaaagaaaaagccggttttgaattcacaaaaccgacttgcatataattcctattttaaacaatttatcgaaatctcatttaactcacttattaatttgtcatcttgcaatttctttacaacaggcataaatattgctattgtttcttttgctcttttctgcctctcacattcttccatatactctatagttctcatgttatgaagtcgttctgcaatctttaaaacagcacattgttcatcttcaagacctactttttcaatatcatagtcctttaatcttattaaaatctgcaccacgctatcaggcaaattttcctttaactcatcaattgctatattagtttttctaaaaacatcgcaaaacattcctgcataaataacactttcttccgcttccatttgcacaagcaacaaagatacatttaataaatgcgttacatagtcatctcccgaatatctttttctgtctccatatatactcttacagaaattataaatattatttagtttttgattatcatatccatgttctatcattttttcgtgcagcacttgaaatagttcttcttttgataaatgttcatccattattttataaaagttacaattgctcatatctccacctccaaaatgtattatttctaatttcattgcatacaagagtgaaggtgaaaaaccataataacttttgaaagctttaataaatccgctgtgcgattcccagccatattcaattgccacatcgagaattttgtttccatttaagatttctctggt

SEQ ID NO: 12776 - DNA, 2586 bp, Unknown
  gut microbiota DNA sequence
actgtgcgattcccagccatattcaattgccacatcgagaattttgtttccatttaatatttctctggttgcatatatcaattttctttccctgacatattccataacagaaactttcatttcttgtttaaatagtcttgaaaaataaaactttgtataacctgcattaccagcgatttcatcaatggttattttattctttatgttgttttcgatatagttaagactctctgttgttactgtttttctatccatatatcttgcctcttgtgattaaatgatatattaaaaatatcatcttgaatggatatttgcttttccaatgttgctctaaatataaaaattatgcattccaagtaaatttaatgtggtggattttactccaccacaccacatctacttatttctgtgcaacgattaaatatctatgaatagttccctgcacttttccatacttgtctattatgtcttgcatttttagcaaattttcataacacttgctcactgaaaaatttggaaactcccactcaataatatgtgcaaaccatacaaatgcacctatatcataaaatgttataggtctgtatgtttcttcggctctgattattttaaaaccagcctcttcaaactttttcctttgaaccgttaggttcatattgggaaatggtttgggtatatctggtaaaaccatctgaactaagtcacgttcattattttctccaacctgctctgttataaaaataccatcttttttcaataacctatatatttcatcctgttcaaattctccatgtcgatttatcatcaaatcaaacatttcatcttcaaacggaatatttttaggattcgaacattctttgaaattaatacctagcggtaataatcttcttttgcaaagttctacatttggtttatagccctccgtcacagccgttttgtcatatggatgattcagagataacaaaaattctgcaccacctgtatcgtaatccattatctgctttgaattatcaagataacttcttacaatttcttcataactccaaggtaaatcattttctacatcatatcgtccttcaatatgcgaaaaatcccacccttgaatctgtgcgacctcttcttctcttttccatatattgtataattcctttttattcatatttactgctttcctttcaaataaattcataaagggtgcagtccaacaacataagcttttgcctctaattaacctcaatacaatctattgtcagttttagaactgcaccgagtatttaattcgtctcatcaccttagtatgcttcatttatctatctccttaatttatttagcaaattttcaggccattcgtcgccttcatctaagttattatccataagccacttgtcttctactgagataatttttttctcattattttcatttacaagcgtaactgtcacctttggattttcactttcagaatgttcttcacatccataatcgccatcaaatatatgcttaattttccacattttattactccgttccttcaattattgtacctgtccacttcactctgaatccatgtcataattacatctaccaaataatcctgctgaattctgcttaattcttttcccggctgaattttatgccactttctgatacactctctgcagcatgtagctgttgcatactgagcaacaaacaccggatgtccttttgttggagtctgctttctgtcattaggaataaatgcaggagcttctcttttaaaaataatttcaaaattattaatatttttatgcttctatatttgcttaacatacaataaacggttaactcaaataggattttactacttcaaaaacattcaaatatccatttgcatacatatgcacaccgtcaattgcatactctggtttttgttctccattttcattaacgagacctgcattgcagtcaatataatagcattcatatttatttgcgatttctttcaaatgctcattgcaaattcgaatattttcagaagttctaagcttcatccattgaattgcctcttctgtatgccaaggcaaatgtaaatttgcaggataaaatgccattatataaatttctgcattaggaatactatcttttgtagtttcaataattttgcaaaaattgtccatcagatgtgacatccatttatctccatatcgtgcttccgtaatatcatttgttcctatattgataaatatcttcgatggttcaaggtctaaaagcaatgtattaatgttttccaaaaactcatctgtattcaatccaccaacgcttcgattataaattacctcatcaaatcctttacttcttgcaatttcacaaataggaaactgttccatcagtgatgaacctgtaaaaagaattttcccctttaatacgttctgatttaaataattaaaatttttaatttttatcatctgctcattattcattgtaataccctctctttttataattgatttttcctctatcaactaagccggcaaattatatcgttatatttgtctgtatgaatttagatttattttcattaatgtctataatactatcatatttctt

SEQ ID NO: 12777 - DNA, 5851 bp, Unknown
  gut microbiota DNA sequence
ccgggctctggtgcatcaaggtattgtcctgcttgtgccaagaagatacggagggagaaatcaaacgagagcaaacgcaggagcagagaacagaaaaggatagcatgtatgaactgtccgcaaaaaatgaccgactgatgtggaacaggtaggagagttcagatacaatatatacatattaatggaaatgcttatgccactaagcaaatgggtacaaaatactaatataacggtagaggatgttttaaagataggaatagacatatcaagcggtttaagcgtatgccacaagaacaatattatccatagagatataaagctaagcaatatatttgtgacaaaggatggcgtatttaaattaggtgattttggagtttccaagaatataaatgatacaaccggagcaaagacaataaaaggaactcccaactatatagcaccggaggtttatataggacagggacagtacaacagttctgtagataattattctcttggaatacttttgtattatttatttaacaaaaaaagatttccatattatcctgactttccaagtgaatatactacagaggatgaagataaagctttttataagagaatgaagtatgaaaaattaagtaatccggtttgtgcacctaaggagattgcagcaataataagaaaagcaatatcttcacctgaagagagatataaaagagcagatgatttcctaaatgatttacttgaagcaaaaaacaaattaagcaaagaggaactaagtagaaaaataggatttgattcaataaattttaaggatgaagttattagtgaaaaagaggctgagttagttgaaaacctatatggtagaaatgatgacagcataagctttcaacaatatggaatcacactggaagatgacagtataataaaagagaaccataatgctgcaaatcatatggttaaggaagttaaggaagaacaggaagggtctgtaggcattgttaattcttatgtaggggaggcatcaggtactaaaacaataaacaatgaatcagaaaatcccgtaaaacaagaagaaaataaaactgacaaaaaatatagaattcctataattgtgattataatattagctaatatattgattattttattagttgcatatggattaactgacaggatatttaatatggcaatggagaatagcacacagtttaatacaaccgtgcctgaaaatacaatgttagagacaacagcggttccggagacaacaactgttataccaacaactgttccggaaacaacaaagaagaaaaagaagaaaaaaacaggaaaaaacacagttacaactgtaccggcagtaaataataattcatcatggagtacaggaggaagctatggaagcagttcaaccggaaacacaggaagtagcagtggaaatagttcttcaaaagatacaggaagtaagtcatcttcaggttcagaaaacaaaagtagcaaaactaaaaaaaatgatgatgattttgactttaaaaatgtggtagaataaacacagttacaatgtgttgggataggataagagaattctatgttaaacataatagtggacacataaggagaagtcatgagaattgcaattgttgatgacaaccatactgacagaatttttttaagagaaggtttggagagaattcttttaaaaagaaatattgaaaattcagagatacatatatttaacagtgcagaagatatacttgaatatttgaaaaatgaacaggaaacgttctttgatttgatttttatggatatatacatggaaaaattaacgggtgttgacgctgcaagagagatacgaaagaaagataaaaaagttaaaattgtatttattacaacgagcaatgagtttgccagtgaaagttatgaagtaagagcagaagattatttaattaagccttatgataaaacacgtcttgagaatgttatggatagaatcttttcagaaaaaaaatacggaaaaattttagaactgaaagatggtcggaaaataataattaattctattgtgtatacaacattttcaggtcattatgtaactatttttatgagtgatggagaacagatacaaacaagaagtacacaaaaagattttgaaaaaatgatggaatcattcggacaattaattccaagttttaaaggtgtaatggttaatttggaacaggttgacggaattgaagaggacagatttagaatgaaggatggtgaatttgttccaattagcagaagaaagtatggtgaagtgaagaagcaatatacagattttcttatgagaaaattaatggaaaaggaggaaacgtaaatgacctcttttagaatgtttgaaattatattgtattcaatggttagtcttttgccatatttaggactggcgttgtatcctttcgaggacaagtttagaatgtccaaaattaagttaagcggatgcattgttattcttacggtaattcaaagtgctcttggaatatatgcaacaatgtgttcacaggaacagaaagctttattttcactgctaagcacagtatgctacggtggattttattttcttgcaataaaagagaatgtaggaaaacttgtatttgttttattaatagtatctaattttgccaactttgttgtaatgtgtgcaaagtgtgtggaaggtcatatttttccacagcttgcagttgaaaacaacaaatggtctttttctttatgcacaatgatagtgcagcttatttttattccacttttatttttatattttaaaaagtatataaaaggggtggctcatatagaaacgggaaaaaagatttggagatttttgtggacaattccggcaactttttatctgttttggtatcatgggctttattttagtacaaaatcatcaattgagttagcaatggacccggttaatatgatttttacgttttttattaatcttggagctttggttgtttatacggttattgttaattctatggctgaatttcaatataatcttaatttggaagaagaaaagaaacagcttgaaattgaaaatctttgttttgaaaatatgaagaagcaaatggaatctacaaggagggcgcgtcacgatttgaagcatcatatgaaggctgttcacacaatggcagaaaacaatgagtgtaagaaaattacagagtacatagaaacatatttggaacacgtgtcattaaagaagcctttggtttattgcaccaattttactttaaatgcactgattgtatattatgttcagcaggcggaagctcacaaaataaagttaaagttaaatattgagttgccggaagaaaccaatgttaaggaggcagatttaacagtattgtttggaaatcttttggagaatgcaattgatgcctgtgatgaggttcaggaaaataaaagatatattaatttaaaaatctacaagcctaattcagactcaatagttttctatattgagaatggttttaatggaagtattaaaaagaaaaatcagcaatttctgacaactaaggctaacggcaacggtattggaattgagtcggtaaaatatgttgttcacaaatacaacggagacgttaatataaaaacagacgaaaacaaatttatcgtttcaggagttttattacaaccacttgatgccacaaaataaccgtttgacgccagcttatagatttcttatatattatttttttataataatgttgtaatagacaaggtacgataaaaaaggaggataatatatgaggagaaaatggaaaaaattactaagcacaacattggcattggcaatggttgtaacaactattggtgtacgtgaagtgccggtaagtgcagcggaagaagagaatacaaatgagagtgtggtttatatggataacatggcatatgataccacaacaggacatttttataagttaagtagtgtgggaacatacgagcaggtaaatgcagaagctaaggaaagcggtggctaccttgcctgtatttcttcagcagaagagaatgagatagttgcaaaggtttcaagtacaggaacaacaactgcatcatcttatattggacttacaagaaatgcagagaatcttcaggaatggttgtgggcagatggaagcgaagtaaactacactaattggaatgaaggtgaacctaacagtgaaagtgaaatagtagcggaaatttacaatagcacaagaagttcaggtgcagaaaaatggaatgactgcactgtgtcaagtggaaaaacaggtgtcgtagaatacaatgaatgtattcatcctgaatcacagtatgttgtaaagaataaaacttttgcagactgtgaacagggaggctatacaggagatacttattgtggtttttgtaatgaaaagatagcagacggaaaagagacagagccgggaggacatgcagaagctgttattgatgaaaaaacagtaaaagaggcaacatgtacagaagagggctatacaggcgataagatttgccctacatgtaagaaggttttggaacatgggaaaacaactacggccaatggacatacagagtcagaagagcttcgtaaggttaggaaagcaagctgttatttagatggttatacaggtgaaaaatattgtacagtttgtggagaaacattagaagccggggatgccattacaaaattagaacataaatatgaagataatgtatgtaaaaactgtggaagaattaataatgcccagttagagacaacatatacatcaaaaacaacaaatttatatccgtttcaggtaatacagtttaaggcacctgaaaatggaacgtacaagttttattgtgaaaatattacaaattgggattcatatggctatttatttaaagaagaaaactttaatgaccaggttataaaaggcggaatagaaaagtttaatgcaaaattagaaaatccgaatgtagagaattcaagattagatggtttttggggtgttaatgatgatgggggtaaaaatggtgcacctgcaataacagaagaattagagaaagataagacatattatttcgttttaggtacttattatgcttatacatatacaggagaatttagcgtaacaataacatgtactcacgataaaacacatatagaaggaaaaactttatcggattgtacagttggaggttatacaggagatactgtctgtgatatatgtggaaaagttgtggaacagggacagactttggaaccgggtgaacatcaggaagcagtattagatgttaaagatgcaacctgctatgtaacgggttatacaggcgatacatattgtagtgtttgtaatataaaattagcagagggaacagttactccaaaacttgaacatgaatatgaagataatgtatgtaaaaactgtggaagaattaataatgcccagttagatacaacatatacatcaaagacaacaaattcatatccgttccaggtaatacagtttaaggcacctgaaaatggaaagtacaagttttattgtgaaaatattaaaaattgggattcatatggatatttatttaaagaagaaaactttaatgaccagattataatagacggaatagaaaagtttaacgcaaaaatagagaataataccggaggcaattctagattaaaaggttattggaagattaacgatgatgatggcgcaaactcggcacctgaaataaccgcagaattagagaaagataagatatattattttgttgtaggacctcattcaacagctacaggtgaatttagcataacaataacatgtactcatgagaaaacacacagggaaggaagaacactttcagactgtacagaggg

SEQ ID NO: 12778 - DNA, 75269 bp, Unknown
  gut microbiota DNA sequence
ctgtggaagaattaataatgcccagttagatacaacatatacatcaaagacaacaaattcatatccgtttcaggtaatacagtttaagacacctgaaaatggaaagtacaagtttcattgtgaaaatattacagtttgggattcatatggatatttatttaaagaagaaaactttaatgatcaggttataatagacggaatagaaaagtttaacgcaaaaatggagaataatgctggagacgatcctagattaaaaggttattgggatactaacgatgatgatggcgtaggctcggcacctgaaataaccgcagaattagagaaagataagatatattattttgttgtaggaccttattcaacagctacaggtgaatttagtataacaataacatgtactcatgagaaaacacacagggaaggaagaacactttcagactgtacagagggtggttacacaggtgatgttatttgtgatacatgtggaaaacttgtggaacagggacagactttggaaccgggtgaacatacagttgaggttgtggatgccagagaagcaaattgttatatcgaaggaaaaacaggtgaagaaaaatgttcagtatgtgataaagtattaaaagaaaataaggtaataccaaagctcgaacataaatatgaaaataatatttgcaaaaattgtggaagaatagagaatgctaaaaaaggcacagaatattcttcatatataacagaaaaattaccaattcaggtagtagaatatactgcaccggaaacagaaaaaattatttttgaatgtaacaatacaagatattggaatagcatcggatacttgtttgacgaaacaaattatagcgatgaaatgcttatggatgaacttgaaaaatattattcaggagatagcgattatataagctttaaaaactatttggcagaaaatgagtatggtggaggaacgggtgctccggcaattaagtataaagttcaaaaagataagaaatactacttagttatagtgcctcaagaaaatgattatggagaatttactgtaacaattgattgtccacatgacagaacacatgtagaaaataaagcaattaaaacatgttcagaaggtggttatacaggagatgttatatgtgatttatgtggaaaagttgtaaaacatggtgaaaacatagaacctgacagtgaacataattacattaattataagtcaattgaacctacatgtaatgaatatggtaaacgttatttaaaatgtgtgaattgtggaaatgagaaagttttagaaaatgaagacgatggatatgcagatcataggtatgtcttagttaatagcgtaaaggcaacatgtacaactgacggatatttaggtgacagtaaatgtaagtattgcggtttggaaaatgaaaaccagccggaaaataaggtcataaaggcatatcatgatatggatccggaagaaatagattcatgtttgataaaggattataaaggtgtagaagcaacatgtgaaaaagaaggctacacaggagatgtatattgcacaatatgccataaagttattaaagaaggcaaaacaattgagaaattagagcactcatttaaagatggcaagtgtatggaatgtggcgctgacgagaaagtagtaaaaagcgagaaagacggttactatgaaatttctacatttgaccaattaattacatatttgaaaaatgtagagtcaggaatcagcggaaaacttataaatgatatagagtttccggaaaattatgatgatgaagatgacgttattggaagaaaaacactgaaaaatagtacttttgatggcaatggtcataaaatatcaggaattaattcaaatggaactcaaacaatgttattcgatgatatttacgtaagtgaaataaagaatcttgaaatcgaatgtaaagaaaaagaagatggcagaggtttgggcgtctaccttgcaaattctactattgattcaaaatttacaaactgtagtattacaggtaataggattgaaatagacggttattgttcagctatgataaaggaagcatatgcgagtgaatttatacattgtataaataatgcagacattatatacaacaataatacgcagatagtggcaggattggtatgcggggcagagaattgtatttttgataaatgtgaaaataatggaaatattgctgccacgaaggcatttgtagttggtggtattattgctcaagctaaaaattgtattataaaagactgtattaacagaggtgacattacaacttatggttatacagcaggaattgttgcaggagttactaatacagataatagaccatgtacaacatcaataacaggatgtacaaatgaaggcaaagtggaaagtatagcaaagggtaatcatacttatacagcaggaatatgtattatatataatgggtctaatggatcaacatatgccgatgaattaattataaataattgtgttaataacggtgaaattgaaggagatacagtagcaggaataattggtaacagttctggaaatttgaaattatcagactgcgaaaataacggtgccattaatggacgatatagtgcaggcggaatcgcgcaatgtatagaaaataaaaatagtagtgaggctgaagtaagcaactgtattaataatggtaatgtatttggtggcgaagaagcagcaggaataattgattatgcggaaggtataactgttacaaactgtataaataacggaaatatttcatcaaatggttatgtaggcggaatatttagttatacttcttctgtaaaaggaacagggcttgttaacaatggtaaaataagtggtttggaagatattggtggaatcagcgcatatgatgaaggcaattcaatatttagcaagttatataatacaggtgtaattgatgaggaaaacataggtgctcaagtaagtaatcttgttaaattgggagaaagttcaacaggcgaagaacttgaagaagagcataagcatgattatgttgcattatcaacagtaacaaaggcaacaactgaaaaagacggttacatagaaaacaaatgtaaatgcggtcagaaagaaaaacagcctataaaacagattaagagtgttgatatttcaaatacaaaatttgaatatacaggaaacagcattactccaacagtaactgtaaatgatacagatgacaaggtgatttcatctgaatactacacagtaacttacagaaacaaagcaacaggcaaggcagtaaatgaagtaaaggaagttggaacatacgaagtagttgtaactttcaaggacttatatgaaggtcaggttgtaaaacagattgttgttgaaaatacaaataagccatcaaatccaaaaactgacaatcctaatgctggaggtaaggtatccgcaaaagtaacaaaacctgcaaaggttaaaggtgtttctgcaaagaacaataagaagaaatcattaacagtaaaatggagaaaagtaaatggcgtaaaaggctatcagcttagatatgcaacaaacaagaaaatgaaaaaggccaaaataataacaattacaaaaaacaaacttgtaatcaaaaaattggcaaagaagaaatactacattcaggtttgtgcatacaaagtaaacagtaatggaaagaaagtcaaaggaaaatggagtgcaaagaaggctataaaagttaaaaaatagcaagttagagaaacagtaaagttagagaattatttaagttagataatcagtaaagctagagaaatagtagagttagataattatttaagtttacctaaacggggcgctgtgtcgatgaagcaatatcgatacagcgccttaatagttggagaggatggaatttttttgttataataaatgaataaatatgcagttaaagtattgccaaatagggtgaaaaaaactataatttttttggtgaaaaattttaaaagactatgttagttggtgaaaaccagagagaagattaagtaaaaaatattagaggagagactgaaatgaaaacaagaattggtattttaggttatggtaaccttggaaaaggtgttgaatgcgcagttaaagaagctaatgatatggaattagttgctgtatttacaagaagagatcctaagaatgtaactattttaacagaaaatgttccggtatgtcatattgatgaagtagcagactggaaagacaagatagatgttatgattttatgtggtggtagtgctacagatcttcctgtacagactccacagtttgcttcaatgtttaacgtaattgacagttttgatactcacgcaagaattcctgaacattttgcagcagtagataaggcggctaaggaagctggaaaagtagcagttatttcagtaggttgggatccgggaatgttctcacttaacagagtttatgctaatgcaattcttccagatggaaaagattatacattctggggcaaaggtgtaagccagggacattcagatgcaattcgtagaattaaaggcgttaagaatgcaaagcagtacacaatccctgttgaaagtgctttggaaagagttagatcaggtgaaaatcctgaacttacaacaagagaaaaacatgaaagagaatgttttgttgtattagaagaaggtgcagatgctgcaacagtagagaaagaaatcaaagaaatgcctaactatttctcagactacaatacaacagttcatttcattactgaagaagaattagaaaagaaccacagcggaatggctcacggtggttttgtaattcgttcaggaaagacaggaatgaacaaagaacataatcacattatcgaatatagcttaaagttagattcaaaccctgaatttacaacaagtgtattaatcgcttatgcaagagctgcaaaacgtctttatgatgaaggccagaaaggatgcaagacagtattagatattgcacctgcatacttaacagaaatgagtgatgaagatttaagagcacatttattataagaagtagataggatacaaatattgaagattgaaagtattgaattgtagagtagttgattcaaaattgaatttgtataattgaatatttgaaataaaaaggtctggtagaaatatcggaccttatttatttttgaaaaagtgagcaacgctctgaaaaagtaaacaatgcctcgtaagattacaagcagggggaacagtttttaaaaaagaaccccgaaaagcatttttgccgtatcggggtactttctacaacatttaatctacagcggactttttctcttgcctttcataaagtttagaactttctttttggtagccttgtcttttattggtgcaggttgccagttgtttgtatctccggtgtagacgtagcatggaattatgtcgccggtttcctttgatactttattatttgaagtaagagttattgtgtgctggtatatgattgtgcggttttcgggatggcggttgccaccaaaaataaagttgcccattgaataaataattgttttgtttttgtatttctctaatggctgtagcacgtgtgggtggtcgccgattatcaggtcggcaccggaatcaattaaagtatgacaggcgttaaccttccagctttcaggttcgtgaagaccttcagttccaccgtggaaataaataatctgatagtcacttttcttctccgcttttttcagggcagactgaattgtaggtaaaacataatcgccatacatagatacacaaattacagcaattttaaaattatgcttttcaaaataaacaatcttaccttcctcgccccatttaacgttagctgcgtttaaagcttttcttgtgtcttcatgtccctccaagccgtaatcattaatatgattatttgaaatagaaaccatatcaattccaccggctgataagattttggcattttttgcaggtgacttaaaccaaaaagcacggacgttaggatctgcatattgtcccttgtcgctaactttcaacttcttgctgtctgaataaacattttcgcagtcagcaattgtaaagtcatcatttaagaaataagagttaactttctctagaaaatatgaaggattcttagcctttgcaacgtcattaaaacaattctcgtaagaagtattctcgtctgttgcacagagacaatccccaacaaaacttaacttaatagtattagcaggagcggttgttgcaacagtacttgaatctttagtagtggtttgtcctgaacttgaagatttgctttcatcggatgaattgcctgtgttgcttccgattgattttgaattgctattattttgagctgcgtttcctatagtgtttttcttcaaatttttattctgactcatcgtttctttctggcccaaaacattagttgccgtatccataggtttaaccgaaaggttaaaaaatattgccacggttataaccgacagtattatgggcaaaattactataatattttttttcattttctctccattcttctataattatgtagaataaatttaaaggcgtttgtaaaaatatacaaaacccaaccttagaatttattgtaccatatgagtcgttaagatgaaaaagaaaaaacaataaaaaagaagataaaatatatataaaaatagattgaccgtatatacaaggaataaataagtgtgatacaattatcgaagttaaaatttatgggagaaatcatatgtcaaaatacatattagaagtttgtgttgattcagtagaatcagcaatttccgcatataatggaggagcaacaagaattgagttatgctcaaatcttgttataggaggaacaactccggatttagaattgtttaaaactattagaaaccatattcagattccaattaacgtaatgatacgtcctcgttacggtgatttttgttacacagaatatgaacacgaaattatgtgcagacaggtggaaaactttaaaaacgaaggtgcggatgcagttgtaattgggagtttaaatattgacggaacattaaatgaaaagcagatgaaagaacttattaaagaggcaggtcagtgtaaaattacgcttcatagagctttcgatatgtgtaaggattattttcaaacaatggaagaagccataaaacttggtgtggatacgattttaacttcaggaggaaaacagaactgcattgtaggtgctgaaaccattagaactttggttgaacaggcggaaggaagaatagaaatattagttggtgcaggtgtaagtcaaaataatattgcagaactgattaagagaacaaaaaccaaaagcttccatatgtcgggaaaaacaattatagagagcataatgaaatatagaaatccagacgtttttatgggacttccgggaattagtgagtataaaaaatatcaaacagatgaaaaaattataaaacaggtagtagaaatactacaaagaaatatagagtccaaaacacagattcagaaataaaaattttaatttaagaaaattaatataatctgaaaactaaaaagtaacttgcaggaaaatgcaaaagaaggaggaaaaaatgtattcagcattattagtaattatttatttagcatttataagtttaggtttgcctgatactctgttgggctcagcgtggccacagatgcatatcgaacttaatgcatcattgtcttcagcaggaattataacaatgattatatcaatgggaacggttatatcaagtttgttttcagacagattaaacattaagcttggaacgggaaaagttacagctattagtgtattaatgacagcagtagcattgcttggattttcactatcacatagtttcataatattatgtgtgcttgcagtaccatatggattaggtgcaggagctgtagatgcggcattaaataattatgttgcactacattattcctcaaaacatatgagctggcttcactgtttctggggagttggcgcgtcaataggaccatatattataggaacatgtatggctcacggtttaggctggcgtggtggttacagtgttatttcagtaattcagtttacacttacagcagcattatttataacattgccattatggaaaaaagtagaaaacagcgaaaacaatgtaagcaatgaaaataacgaaagaactcaggaagagccacaggagagaaaagctaaatcattatcagaagtattacacattaaaggggtaatctacattttatttgcattcttctgctatagtgcagttgagcagacaacaacattatggtgtgcaagctatcttgtattaaatagaagcattgacagcaacacagcagccaagtttgcagcattattctacataggaattacatttggacgtttcctgtgcggatttattgcagacaagttaggcgacaagaacatgataagacttggaattataataattgtggcaggtattgtaatgttatttatgccaataccgggttcagccattgctttggcaggacttataacaataggtcttggttgtgcaccaatatatccgtcaattattcattcaacaccatttaactttggtgcggataattcacaggcggttatcggaatacagatggcatttgcttatgtgggaacaacatttatgccaccattattcggacttattgcccagtatattaacataggattattcccggtatatattttaatatttactgcaataatgtttataacatcagaggcattaaataatattaataaaaataaagcttataaataaaaactttaataaaactaaaacaataaaaacttataattacaaataaaagaaaaacaaaatttcacttgaggggaaaacttaaataaatcttaagaaatatattcataaatattaggtcttttaagataacattacgatatcagaaaaaagagattaaggtaattgacagaaactatatcaggaacaaagaccattaagtttattgacagaaaacatgtcaggaacaataagtttatgaataaaaaaaggtgatgaaaatcacgattataggggagtgaagaaaatgaataataacaaaaaaagtcaggttagaaatatattaggatttgtatcagtgtatacttttatatttttgtgcctggcttttgttttggacagaatttttgattcggagggaaaaacatttatatggagcattgatgggctttttcagcatgtgatttccctgaaatacataagacagtacataattaatctgtttaccaagggcagttttccaatggttgattttaatcttggacagggatttgatgtaattggaactcttaattattatggctttggcgatccgattacaatctttacagttctttttcctgagaatgaaatggaattaatgtatgaagttttgatttttataagaatgtatttaagcggattatttgttgcctaccttttaagaacattgggaaaaacaaaaacatcaacaatacttcctgcctgcattttgtatccgttttgtaattatgcacttttgggaggcataagacatccaatgttttttaacggcataatgtatctgccacttctcattgcagcagtggaaagggtaataacaaagaaaaaaatcggacttttagtatttgttgtaagtatagcttttattaataattattattttatgtatattaatacggtgatggcggcaatctacttctttgtaagacagattggaagctatagggctaaaggtataaaagaacttgcaggaagcattggaagaattgtgatttcatatatatggggaacttgtatgggcgcaatgcttttgattccctcagtttatgcattccttaataatgtaagaacaaccacaaagattgctataccggatactttttttggagatgactattatgagaaatttctaaagaactttataataacagacaatgatatgaatatgtttacaattccgggaattggaattcttggagtaatcgccatagtagttcttttgatttttagaaaaagcagtgacaaaaaaatactcacattatttgcaataatgtttattatgctattattcccaatggtaggaaaaatgatgaacggcttttcatatgtaacaatgcgatttagctacggaatggcactgattctttcggtggcagttgcttttgccatagatgatttaagaagcataagcatattagataagaaaaatcttattaaattaaaacaacaaaaagtaaagcagtttcttccatatctagtaacaatggcgtctgtaatcacaatagttattaacatgaatatgatttttggtgaaaattattcatataatagcaaggattatgttaataaaggcacccttgaaaaagaaatgaacacagctgacgtgaaaatgattaagtctattaaagatgacagtttttatagaatagagcgagttagaagtaggagcaacaaatcggcttattgcggtttcaaccagaccggtttctattacagtattattccggggaaaatgacagatatgtatgtgtcaacttgcctttcggactgctataggtcatatgttataaaaggtttggaggacagaataggaatgcttgcgctggcaagtaccaaatattatgtgaactacggtggaaaggcaccttatggttttgaaaaaataaaagaagaaacaatagattgcaggaaagtttgcctttatgaaaacaaaaattatctgccacttggagtcacatattcaagttatatgacaagaactgaatatgacaaattaaatccaattgaaagagaaatggcactgcttaacagttcagttgtagataataggattgaagaaaaaaattttgaaaatagcaaaacaaaaacagaaagcgaaaataacaaagcaacaagtgataacaacaatacagaaataaaaaataaccaaaacgtaacaggtgtttacacttctgaaatgaaaattaataatgagaaaaacattgatgcaggaaaaagttacctgaaagcaaaatacggcggagctttggaatataattttaatggcttaaaagattgccttacttatattgtttttaagggagttcatgttaaggatacagaccagggtgacacggcggcagagtataaaggtgatggcaacacaggaaatcttagagttataggcgattactctgacggatattattacaaagaagccagtgtttttaacataggatattctaaggaaagccagaaccacgtagatattaaatttaacagcaacagaaaatacactttcaaagacgtttatgcagcaatggtacccgcaagtaattatgataatgctgcagcaaacttaaagaaagaagcacttgaaaatgttaagctgtctgacaatcatataagtggcaacattaaagtaagtcaggacaaaatacttcaactatcaattccgtacagcaaaggctacaagatttatgttgacgggaaaaagacagaaactttcaactcaggaataggatatattggggcaaaagtcttaaagggaagacacactattaatgttacatacaaaagccccggaatagttgcaggagcgatgttaactataataagtacattgttttgggctttttatgtaattagaattgaaagagtcagggaacaataatactagaaagtgcaaaaaaagccctaaattaataccacaaaactatgtacataattaaaaaaagtatgtattattaaagacgcgacagttaaggctgtcgcgttttgtggaaagaagggtgaaaattatgaaatatatgagacaatttgggattattatgttagtaacctgtataggtgaaattctaaaatatttaattccgttggcaataccgtcaagtatttatggattgtgtctgatgatggttttgcttgtgacaggcattgtgaaagtagacgatgtaaaagagtcaggaacttttctaatagaaataatgcctttaatgtttattgcatcgggagtaggaatagttgtttattggaaacagcttaaaaccatgcttattccacttataattattacttttgtgtcaacagtccttgtaatggctgtgtcaggaaaagtaacccagtatgtgataaagaggagaaaaaaacatgaatcagatgataattaattctacaacaataggtgtagtaataagtgtaatgggatacgagttaggcttattattaaaaagaaaatttaagtcagctatttttaacccacttttaatttcaataatatttgtaatatgctgtctgctcttgtttagggtagattataataattacaacaaaagcgcacagtatttaagttatcttttaacaccggcaacagtatgtcttgcaatacctttgtatcagcagattaaattacttaaagagaatatggtagcaatatttgcaggcataatttcaggtgtacttacaagtttggtttgcatatttgtatttgctttaatatttaatttcggtcatgaagaatatgtaacaatgttgcctaagtccattacaacagcaattggaatgggaatttcagaagaacttggtggatatgttacaattacagttgcggtaataatcattacaggagttcttggtaacatatgtggtgaggcagtttgcaaaatatttaaaataacaaatcctgtggcaaagggaatagctctgggaacgtcttcccatgccattggtactgcaaaagcaatggaaatgggcgagattgaaggggcaatgagcagcctttcaatagtaatagcaggaatttgcacaatggtaggagcatctgtttttgcaaattttatataaagagttataataatggcggacagatttttatttaataagaaattaatttggaaattctattaagcaaaaatcccaccgaggattgaagaggtgcggataggaggcatattatgataattacaattgcaagacaatgtggttgcggcggacatgaagttgcaagaatattggctaataaacttggcatggaactttttgacaaaaagaaattgcttgaagaagcaaagcagctaggacaggctgaagaacacagtaatttttttaatgaagtacctattaatagtcttttatatggaatagcaatggggtttggaaatacgaagccaatggataggtcattaaaacttgttaaggctattaccgaaaacaaagacgccataattattggaagatgtgctaatataatatacaaagatagcaaggatgttacatcagtatatctttttgcggacaaagaatttagaataaaacatcttatggaaagagacggaatttcagaaaaagaggcagaaaagtatataaaagaagttgacgagaaaagaacatctttccataaatactgcactgacacagtgtggggagatgcaaaagaatatcagctttgtcttgatacaggtaagattggttttgaaaagacggcagagtttattatgaattatattaatgcaaaaaaagaatcctaaaaatttgaaaatgaaaaaaatatataaataattatacgataatattagaaatgattataggagttgattattatgaaacagacaaggcagatgtcagagactataaaacttggaatacttcttgcactttcaggtggatttatggatgcgtactcttacatacagagggatcaggtttttgccaatgcccagacaggaaacatgctgctgtttggtgtaaatttatcagagggaaatcttaggggagcgcttcattacttcttcccggtttttgcttttgcaataggaattgccatagcagagcttgttcgtgccaaagaaagagaccttttacattggagacaggtggctgttttatttgagggaattatacttgtgggcgtagcttttattccacttgacatgaaccttatagccaactcacttacatcttttgcctgcggaatacaggttgaaagttttagaaaaatcagaggtaacggcattgccacaactatgtgtataggaaatttgagaagtggtacacagaacctttgtaatttcattcgcaaaaaagataaggaagattttaagaaagcagtattgtattatggaattattgtatgcttcgtaaccggggcagtaatcggtaacttctttatacatatgttccacgaaagagcaattctttgttgctcagtaattttattctttgctttcttcttaatgtttattgattatgaaaaagatgacgctagagcaatttaaagaacagtttaatataaaactaaataatcaacagttaaaagcagtgcagtcggttcaaaatcctacactgcttttagcagttccgggcagtggaaagacaacggttcttgttacaagactgggttatatgatttattgtcttggaatagagcctgaatcaattctcactgttacatatacagttgcggcaactaactacatgagacagagatttgaaacaatgtttggtgaacagctggcggcaagacttgagtttagaacaattaacggaatttgttcaaaaataattaactattacggaaactgcatcggcagaaaggctttcgacctgataacggaagaaggctttaaatctaaaatattgtctttaatttatcagaaagaacttaacgaatatccgtcggaaaatgacttgcagacagttattaccctgattacatacataaaaaacatgatgctttcaaatgaagaaattgaaagccttggcaagaaggaaaacctgccacttgctgaaatttacaaggcatattgtggggaacttcgcagacagtcattaatggattatgacgaccaaatggtttatgcctacacaatgctaaagacaacaccacaggttttggaatattttcaaaatatgtaccaatatatttgcgtggacgaagcacaggatacatcaaaaatccagcacaaaattattgaaatacttgcaatgaaaaataagaagctgttcatggttggggatgaggatcagagtatttacggatttagggcggcttatcaggaagcattgctttcttttgagtcaacttatcctgaaggaaaaattcttctgatggaagaaaactttaggtctgacggagcaattgtaactgcagcagacagatttattcagaaaaacaaattaagacataagaaaaatatgaaagcttcaaggggtatggcaaaagatattcgacttattgaagtaaaaacaagaaagtctcagtatagctatttaacaaaggtggcagaaaactgcaacgtagatacggcagttttgtacagagataatgaaagcataattccagttgtggatatgcttgagagaagtggcattgattacaaaatcaaaaacgctgacctgacgtttttcaatcacaaaatagttacagacataaaaaacataataagatttgcagaaaatccaaaggatacggaaatctttatgcagatatattttaaaatcggaacatatttaagcaaaatgggagcaattgaagcttgtcgtataagtgaagaaaaaggcattcccgtaattgacagtgcattaagatatggaagaataccaaaaggcacggagaaaagtctaaaggcaatgaagactcatatagaaagcattttagaagagtcggcctacaaagcagtttatagaattgttaatttcatgggctattctgcttatcttgaaagagcaaaaataaaagatggcaagataagtattctccaggctttggcagcaaatgagaaaacaccggaagattttctaaatcgtcttgatgaactggcaatgattataaagaataaaaagaacaattatgattgcaaatttactttgtctacaattcactcaagcaaaggtttggagtacgatacggtatacataatggatgtaaaggacggagtttttcctgaaaaagtggttgccaacagaaagaaagccacagatgaggaaataaaaacttacgaggaagagcgaagactttattacgtggcagttacaagagcaaaaaatcagttgtgcatatttgactttaaggacagctcaactttcaacaaccagttgcttggcataaatgttaaaagcagtgccgacaaaactaagtttcaaaaatcgggaaaaaagggtataatagccacagacaagaagacctccaaagcaatagaaatgctaaggtcaaaatcttatctaagataattggaaaatctttaattaataattaggaataaatgattcaaaaactaattaggaatctatggtttcaaaaataatcaggaatcattttgaaaataaaaattacgaatggagtaaatatgaataaagataattcaaaagtggacaagggactgcagggcaatgaaaaaatcgaagaagccattgccacacttcaaagtcagtctacacctgaactgttggcgcacgcacttacagttatcagaagaagaatgaaagaacagggacagcttattattgcagttgaaccttcaccattaagcaatgaaatgaacgttcaggcagtaaaaacatcagacggaaaaaactggtgggttgcttttacaggttttgatgaagagttaaaaggtggcgacagtgtaaaatctacttttttaacagatatggataagctttttcaatcagcattaacagtggatgaaattgagggtgtaataatcaatccttggaacagaacaataatgttaaacaagagattgataagtataatccttggaacagctgataattagataagattagcatgttaaaacataattgcacggcatatgtgagataagaccttagacactgtaatctaaataataaagaagaaacggagaaaagtatgaatgcaataattaacaaaacaggaaatgtaattcaaaaaataatatggggaatccttgtggcaatgtttggaattctatcaatttttaatattttgggaacaacaaaaattgatataaaagttaacgattacaaggaatatgcagagtatagccttaacaatattcttatgataattttgtatgtggtaactatttttgcaattctgtatattattgacagatatacaaaattactaaaaatggatacaaagaagtttgccaatattgcaacaatatatgttattgcaattggaatcgcatacatagttatggcaagggcataccctataagtgaccaaagtgttgttcagagaattgcatcaagttttcttgatggagattacagcgagcttacaggtaaaggatatttggtagcatatccgcaacagcttggaataatcggcattattcaaattatttattacatattcggaaaagataattacatcgcaataatgctttttaatgttcttgcaatggcaggaattttcaatatgctatataagattctaaccaaaatgacagataatattagaatccacaatctgtattgggttatggtctttggatgtttcccattgattttctatagcttctttgtgtacggaacaatatttggactattcttctcattagtaggtttctataatcttatccttgcaaaagaaaatggaaaaatccttaattttgtaataagttttctggctttctgcatgggaacaataagcaaaagcaattgtttgatttttgtaattgcagcagttttggttactttattttatggaataaaagaacaaaaattaaaatatgtagttttctcaataatcttaatgggagcgttgatggcgcctaaatgtgtaaatctgtattatgcaaaaaaggctaatgtaactatttcaaaaggcgttccggcgaaatgctttatagccatgggattgcagaagggtacaaaagagttaggttgcggtgttgatggctggtacaacgcttataatttgacaacttttgtaaacgcaggtcgtgacagtgaaaaagcatcagaaatagcgggagaaaacataagtgaacgactaagtgagtttaaaagcaaaccattagagtttgtggattttgcaaaaaataaaatcacaacacagtggtgcgaaccaacattccaaactttctggatgcttcaggcaatggataatcacgcagaatggtcaaaggtagctaaaagtatagaaaagggaaaagcaaacaaaatcatattcgtaataatgaaactatatcttatatttatctggcttggaaaccttgcataccttatagcaaaaagaaaacagcttaccatctggaacctgttactacaggtggcagtacttggaggcttcatattccatttcctgtgggaaggcaaggcattgtacattatgccgtattatgtgatttcctttgtggcaggagtgcaggggatgtatatgttatatgagaagataaaaatagaaactttaaatatacaggaacaaaataaaaaggctgtgagtgaggtgaaccacaaaagttagacttcaattagtctaaaaaaccaacactttcattaattaattgaacactttactttattaataagggaaaaacaaggcgatttcagttgaatttacaacgaaaatatgtataatatcatattaggaactttgttttttagttccacaaggttgatataagagccggcgcaagcaggtgttcattatattactatatttaaagaaaagaggtttaaataagatggcagaaatcaatttaagcaagtatggtatcacaggtacaacagaaatcgtgtacaatccttcatatgaaacattatttgaagaagaaacaaaaccagaacttgaaggttacgaaaaaggacaggaaagcgaacttggtgctgttaacgttatgactggtatttatacaggtcgttcaccaaaagataaatttatcgttgaagacgaaaattcaaaagacacagtatggtggacaacagatgaatacaagaatgataaccacaaggcaagcaaggaagcttgggctgctgtaaaggatcttgctattaaagaactttcaaataagaaactttatgtagtagatgctttctgtggagcaaacaaagacacacgtatggcaatccgtttcatcgttgaagttgcttggcaggctcattttgtaacaaatatgtttattaagccaacagaagaagaacttaaagacttcgaaccagactttgttgtatacaatgcttcaaaggctaaggttgaaaactataaagaattaggacttaactcagaaacagcagttgtgttcaatatcacaagccgtgaacaggttatcgttaatacatggtacggcggagaaatgaagaagggtatgttctcaatgatgaactacttccttccacttaagggaattgcttcaatgcactgctcagctaacactgacttaaacggtgaaaacacagcaatcttcttcggtctttcaggaacaggtaagacaacactttcaacagatcctaagcgtttacttatcggtgatgatgaacatggttgggatgacaacggcgtattcaactttgaaggtggatgctacgctaaggttatcaacttagataaagaatcagaaccagatatctacaatgcaatcagacgtgacgctcttcttgagaacgtaacacttgatgctgaaggaaagattgattttgcagataagagtgtaacagaaaatactcgtgtatcttacccaatcaatcatatcaaaaacattgtaagacctatttcatctgcaccagcagctaagaacgttatcttcttatcagcagatgcatttggagtattaccaccggtatcaatccttacagaagctcagacacagtactacttcttatcaggatttacagcaaaacttgctggtacagaacgtggaattacagaacctacaccaacattctcagcatgtttcggacaggctttcttagagcttcatccaacaaaatacgctgaagaattagttaagaagatggaaaagaatggagctaaggcttacttagttaacacaggatggaatggtacaggaaagcgtatctcaattaaggatacacgtggtatcatcgatgctatcttaaacggtgacatcttaaatgcaccaacaaagcagattccatacttcaactttgaagttccaacagaacttacaggtgttgatacaggaatccttgatcctagagatacttacgctgatgcttcagaatgggaagctaaggctaaggacttagctgaaagattcatcaagaactttgctaagtatgaaggaaatgaagctggtaaggctttagtttcagcaggaccacagatctaatttaaaggtcaaaagacacatataagtgtcatataaatatatagaacaatatatgtttaaataaagaacccgggtgcgtattttgtacccgggttttatacaagaggagaaagaaaatgatacattttactgtctatgatttattatggctgttttttatatattcatttctgggatggctatttgaaacagtgtcagcatcattaaaacagaaaaaattcgctaacagaggtttggttaatggacctttttgtgttctttatggaataacagcagtaataattacggtgggtttacaggaattaacaggaatctggctatttttatttgcaatgatttatgccactgtagttgagtggatagcaggacatcttattgaattggcatttaaagaacgttggtgggattactccaatattaaatggaattttgacggatacgtatgcgttcctgtttcagtgttttggggatttttaggttatgttattgtaaaatggggaaataagattacattaaaaattcttacaattttgccggaactgttaatgaacgtcattttattagttcttgtaggggtaatgatagtagacatattggcatcttatcttttgttaaaaggaaaaagcaaaaatttaaaaaaatgggaaagtgccaatgataagatagacagctttagggtaaaacttggaactttaatttacaattttgtagacggacgtattcacaaagcttatcctaaagcacaaaaaactgaaaatataaaagttcagtcaaaagaagaaagtgaaactaaggtttttgcctacggatgtagtttttataaaatagtattgttgttttttataggagcgtttcttggtgatataacggaaactattttttgcagaataactgaaggcgtgtggatgagccgaagcagtgtggtttggggaccttttagtattgtctggggacttgcaatagctgtggttactcagatgctttataaatataaagacaaaagcgacagcttcttatttgcggtaggcactctccttggtggcgcttatgaatatttgtgcagcgtttttacggagatagtttttggaaaagtattttgggattatagcgatattccttttaacttgggtggtagaattaatctgttgtattgttttttctggggcatagcagcagttgtctggtttaaaaaactttatccgtacatatctagagcaatagaattattaccaatgctatggggcaaaattgtcacatggattttgataatatttatggtaataaattgtggtgcatcaagcttagccttaataagatatgatgagagagataggggcataagtgcaacttcccaatggcagaaggttatggatagtcattttgatgatggcagaatggagagaatttatccaaaggcaaagtccacgaaatagagagattagaattacagaatatcaaatataacagagaataacatatataatatagaatgtgttggataggacgtgtaatagaggaacgaaatgttaaaagatcaggatataagagagccgttatttgatttttttgatgaaaaattcggtaaggtacgaataatagaagaaaagcagattgcaaaatcaagagctgatgtaatgcttgttcttgaagagaagcttattggcgtggaaatcaaaagtgatgcggatacatatgcaaggcttgcaagacaggtgaaggattataataagttttttgattataattatgtggttgtgggaagtagccactcaaagcatattgaagaacatgttccggaatactggggaattattgaggcgattagtaaggaagaaagtgtggaatttaatgttttaagagagccggaaattaataagcgtgcccaaagaacttataagatgaagcgtaagctaagtatattgtggcgaccggaactttcccatatacaggagattaacggtatgcctaagtacaaacagaggagcaaggattttgttataacaaagataatggagaaggtgccgtgggatttgttacacaggcagattagtgaagaactttttcaaagggattataatactataagtgaagcaataaaggagtggcgaagctctaataaacattaatatatatgacagactaaaattgttgaaattgccacatagaatagacaactgttttggtgtagaatagaggtatattttttaacaaaagaaacagacctgcttaggggcaaggaggtaggtatggcaaaaggaagcaatcagaaattaaagatagtatatctgataaagatattaactgagaaaactgatgagcagcatagcataacaatgaatgaaatcattagtgagttaaaggcgtatggggtgaatgctgaacgtaaaagtctttataatgatattgagaatttgcgtcaatatggattggatattgtaggagaacagcacgacagaacttattactattatttggtaagcagacagtttgaattggcagagttgaagttattggtagattcggtgcagtcagctaaatttattactgaaaggaagactaaccaacttattaagaagattgagggtttggcaagcaaatatcaggcatcacagcttcagcatcaggtttatgtatctcagcgcgtaaagacaactaatgagaagatttattataatgtggataagatacatactgcaattgacagaaattctatgattagttttcagtatttccagtggaatgtgaagaaggaaatggttttgagaaaggacggagaaccttacatagtaagtccttgggctttaacttgggatgatgagaactattatatggttgcaattgattcaagtgatgaaaaagttaaacatttcagggttgataagatgcttaacattgaatttttggacaaaccacgacttggaggagaaaagtttagcgggcagaatgcagatgtaggtttatatgctaagaaagtatttggtatgttttccggcaaagaggaaatagtaaaactagagtgcaaaaacgaaatggcaggtgttattattgaccgattcggaaaagacactatgtttataccaaaagatgatgaacattttactgcaaatgtaaaagtaatagtaagcaatcagtttatatcatgggtattttcattaggaaacggagtgaaaatagtgggaccggatgatgttgtagaaaaggtaaagtcagaggtggaaagacttggaaaacaatatagtgattaaaacaggaaaggagcaatttcaaagtttaagtaatatgctgaaatatttaattggcgttatttaaacagaaatgatagtgaatatatgtgtacagcagcaacttataaaacaaaggatttttattttggaagaaccttagattatgaattttcatatggtgatgaggttacaataacacctagaaattatagatttgattttagacatatgggaatattggagagccattatgcaattatcggtatggcgtatgtggcaggagggtacccattgtattatgatggaattaatgagaagggacttggaatggcagggcttaattttgtgggcaatgctaagtttcagcctattgaagagggcagggacaatatagcccagtttgaatttattccatggattcttggtagatgccagtcagttaaagaggcgagagaacttataggcagaatgaatcttgtttcaacaccttttagtgagcagttgccatcagctcagttacattggattatttcagacagtgaagaatccataactgtagaacctgtggcagaaggattaaaggtttatgacaatcctgtaggagtgttgactaacaatccaccatttccacagcagatgtttatgttaaacaattacatgaacctgtccccaagacagccagaaaacaaattcgcatcagaacttgatttgacaacttacagcagaggaatgggagcgttaggacttccgggagatttatcatcagcctcacgttttgctaaggttgccttcacaaagatgaattctgtttcaggtaattcagaggcagaaagtgtgagccagttcttccatattttgggctctgttgatcagcagagaggctgttgtgaagtagcggaagataagtacgaaattacattgtacacttcatgttgcaatgttaaaaagggaatttattattatacaacatatgataatcagcagataacagcagttgatatgaacagagaaaacttagatggcgcggaagtagtcagatatccgctaataaaggaacagcagattaattggcagaattaagaaaatagataatcagttgatttatgtaaataaagagactgattaaactatgcgtaatgccgattccagttacgtgtcatataacatttcctttcactgatacgtaattattctcgaaatattaatgaaatttctagtaattacgtgtggtacaacgtttcggctcaccgacacgtaaattcagccgaaaggacaagctaagtttcaataaattacgtgtggtataacgtttcggctcaccgacacgtaaatccagtcgaaagtacaagctaaaattcaataaattacgtgtggtacaacgtttcggctcaccgacacgtaaattcagccgaaaggacaagctaaaattcaataattacgtgtcatacaacgttttcgctctatgacacgtagtcgtgaccgaaaaaacaacttatactgcccccagagtgtggacatctccacggacgactttgtacggaaaatggagcgaaaatcttcaaaaaacacaaatagaaactaatctcaaaagtaaaagccacgacgaaaatccgtcgtggctttccaataatgctacatcctccctgcaacattaatcttctccccttattcagccttttcacatatatgtcttgcaacatacacaccactggctgaagcatgtgaaagtgaatgtgtaacaccacttccgtcgccgataatatataatccgtcatatttacattcaagattgtcattaagttcaacttccatattgtagaacttaacttctacaccatatagcaatgtatcatcattggctgtacctggagcaattttatctaaggcataaatcatttcaatgattccatccaagatacgctttggaagtacaaggcttaaatcacctggagtagctgaaagagtaggagtaacaagtccttcttcaattcggctttcagtacttctacgacctcttactaagtcaccgaaacgctgaacaattacgccaccaccaagcatattagaaaggcgggcaatactttcaccatatccgttactgtctttgaaaggctcagagaaatgcttagcaaccaaaagggcaaagttagtattttcagtctgcatttcttcaccttcataactgtgtccgttaacagtaacaatgccgttagtattttcgttaacaacaataccgtgtgggttcatacagaaagtacgaacattgtcttcgaattgctgtgtacggtaaacaatcttgctttcatacaattcatctgtaagatgagagaagataacagcaggaagttcaacacgaacaccaatgtcaacacggttagacttagtaggtatatccatttcgtggcaaacctgttccatccacttgcttccgcttcgacctacagaaacaatacaatctttacattcaaaatcttcatcttcagtatgaatactatagccgttatctaaatgagtaattgaagaaacaggtgtgtcaaagtaaaaatcagccttatcttttaattcgtcatataaattttcaagaacaacatagttaatgtcagttcccaagtgacgaacagaagcatcaagaagtttaagcttgttctgcatacaaatcttcttaaacttagttccggcagttgagaaaagtcttgtgccttctccaccgtgttccatgttaatttcgtcaacatatttcattaattcaatggcctgttttttaccgatgtgttcataaagagtgccaccaaaatcattagtaatattatatttaccatcagaaaaagctccggcaccaccgaaaccactcataatagagcagcttttacaattgatgcagttaggaatcttgtcaccatcaataggacactttcttcctgataacttatgtccggcttcaaaaacagcaatagaaagttcaggctgcttttttgccaattcatatgtggcaaaaataccacccggtccggcaccaattacaataacatcataatgtctcattcaaaatcctcctaaatgtaataattaaagtaaattaaaaatatttttttgcacacaaaaataccgcaaaataaaattcacctataataaagattatagataaccatttgcggcagttagtagaaacgttcatccatatcatgaacttatataatcctttgatatgatagcaaaataataagaaaaaatcaataaaaaataaacaaaaatagcgtattaaaagctgtatatttttagcgaaaaaataagcaaagcaatgctacgaaaaattagacatttatgttaaaatatagaaagagatagaaaacgaaagaatgaagtggaggaagtgaatacttatgataaaggaatcaagagaaaaaaatagattactaattgcggatgattccaagatgaatagagaaattctgaaagaaatcctcggagatgaatatattgttacagaagcaaaagatggaacagaagcaatcgagttactaaagaaggaagaagattcattttcagcacttctattggatttaaatatgcctgaaactaacggatatcaggtattggaatggatgaatgaagaatatgttattgaacgtattccggtaattgtgattttagcggaagataatcacgaaagcattgagaaagcctacgaattaggtgcaatggattattttacacatccttttgatatgtttgaaatacagaaaagagttgcgggaactcttaacttgtataagaaatacgagaatttaattatggcatcaaagcaggttatatatgtatgtaattcagattatagtcgaatactttatgccagtgatggtttttgccgcaagtttaatgttgaaagaaacaatccatataatgtgttaatagcgcgaggtataagtttctacattgatgaaaatggaaataaaaaatctgttgatcagtggtttagagatgcagatgaaaaaatgtataaagacaaaaaagaaagtcgttaaaatataacaggaattaaataataattttaaataaaaaatttatgcgattaaaattaataatcaatataaaatcaaagtaaaattgaaaggaaaaataaaggaggaacttttaatgaaattggaaaatcagtatcttttggtagaagcatcagaagacggagcagagattacaaaaatttacaataaggaagatggaacagacattatatgggaaggtaatcctgagttttggaagagacattcaccggttcttttccctaatgtaggtaaaacatacaagaacaagatgctgattaatggagaggaatacactacaagccagcatggatttgcaagggatagtgtttttgaatgtgtggaaagcacagatagtatggtatcttttttgttaaattcatcagaagaaacaaagaagaaatacccttttgattttaaactatttattaattattacttagaaggtaaagaagttaaagttgaatggaaggttgaaaatacaggaaatgagacaatgtattttacaataggtgctcatcctgcatttagatttgccaagaaagatgaagttaagtcagattatattcttaaattccctggcaaggatcagttagaatatattttagtagataaagaaacagaagacggaatgggaacagcaattccggaagaaaaaagaacacttaagcttgaaaataatacatatgtattaaatgaagaaatttttgacaatgacgcacttattttggatggaactcagattgaagaagcatgggtatgtcacaaggatggaacaccttatgttggaatgaaatgtgaagggttcccaagtttcggaatttggtcagttaaggatgctccatttgtatgcttagagccatggatgggacgttgtgacgacagaggttttaataaggaaatttcacagaagaacaatataaataaagtagagccgggaaaagaatttttaaaggcatatacaattatagttgcataatatcaaagagaccacttaccatagaaggtaagcggtctttttaagagtaaagatttaaggataatgtagagaggtttttatgtctaattataaaaaggtgaagaaacaatcagataatccatatcttaatttatacaaattagatgcggtagatagagaaggaaaagtctttgactattattttgtatcaagaagagatgaagaacatattaaattaaaaactaaagacaatactcctgagggcattgttgtttatgccgtaacagatgaggaaaaaccaagattattagtaattaaggaatatagatatcctttggacgaatatatttatgaacttccagcaggaatcatagatccgggagaagtggcagagcagtcggctgttagagaaattaaggaagaaacaggtttcgatttgaaagtatataaaggtggtaatgaagcatttagaagacctttttatatgggacctggttttacagatgagtcaaatggcacagtctttggaacaattcacgttgaagaagtggagcagcagcttgaaagtgccgagcgcatacaggttatgctggcagataaggagcaggtgaagagaatattaaaggaagaaagagtaacacttcgaggggcttatctcatgatgatgtatttgaagtccggggatggattggattttttggaagtttaattcaaaatattttttttacacagattgccaaagcaatctgtgcccccaaaattcgtatatcgtgaaactgttgtttcacgatattactcattttggggcgccttctaaggtcattactccacctttgtgcaagcacaggtggagtatgaccttgaaggctgtaaaaaaaaattagaacatccgagggaaggatgttctaataagaaggagtagaaaataaaaaaactaatatatgtcaatccgaatttaatcggactatgaatctttttctgaaaaaattttttgctgttttgtttaaaaactgtttctcgtttgctatggttatagtatagagtgaaagtgtggttattttgtgaattagatatgaaataaaagtgaatattgtaaaaaaataaggagtttttttgaaaaatatggataaaaaggaagagatgtctaagaaatattgggaggaaaaagaattttcctatttttctcataggaaatgtgaatttttcccttgtcacaagaatgctgatgaaaataattttaattgtttattttgctattgtcctctttatactttgggcaataagtgtggtggcaattttaggtatttggataatgggattaaggattgcagcgattgtctgtatcctcattttaaggagaattacggaaagattgtggagcgatttggtgaaatcgtgaaatctatgaatgaaaaaagataaacatttacagattactaaagattatcagattgttaatttaatggattgacaagtgcatcaagagattaaagttgataattaacaaatattaaatttaataattcataaatattaatttgtttaataaataaaatgattttatttgtttcatatgttataatttacgcaaatagcgaaaaaagtaaaaccggcgaaaggaatttttaaatgtcaaaagaaacaagatttacaggaacagatacttatgtggcatcagatgatttaatggcatctgtggaagtggctactaaattgcagaagcctttattgattaaaggtgaaccgggaacaggtaagactatgttagcagaagcagtagctaaatcattggatatggaactgcttatttggaatattaaatcaacaactaaagctcaggatggtttgtatatatacgatacaattcagcgtttgtacgacagccagtttggtgtagagggtgttgacgatatttcaagatatattaaacttggaaagcttggcgaggctttcaagaaagataaacaggttgttttgttaattgatgaaattgacaaggcagatttggaatttcctaatgacttgctttgggaattggacaagatggaattttatattaatgaaactaaagaaacagttaaggcaaaggttaggccaattgttattattacatctaacgcagaaaaggaattgccggacgctttccttagacgctgtattttccattatattaccttccctgacgaaagattaatgaagcttattgtaaatgctcattttgaaaatttggaagagaatcttttggagcaggcaatgaagactttctataaaatcagaaatattagagatattagaaagaagccaagtacgtcagaatttattgattggattagagcgttaatgataggtggcgttaatcctgatactattgagcagaaattaccatatcttggtgtgcttattaagaaggatgaggatttagaaacagtagtaagaatgaatctgtaatagaatggaggaataatatgtttacttcctttttctatactatgagaagtaatggtcttaacatatccacaacagaatggcttactttgatggacgccttggataaagacctggctcattctaattttacggatttttattacttatgtcgtactatatttgtaaaaaatgaaggtgactatgacaaattagacgccagcttcttagagtattttaaaaatattaaagacaaaaaattaaatttggatcagataaatgaatggcttcatactgacagtgagatgggagagatgacagatcctgataggtatgttgatacaagatcagagcgtgaagctgccgaggttcatcgtatgtttagggaaagacttgctgagcagaacagtgagcacaacggtggtaaatactggattggtagcggtggtggctctgagtttggtagaaacggacgagttgccggtggtattaagattggcgaccaggcaggaatgaagacagcttttgcagtaatgggagagcgtcgttacaaggattttcgtagagatacaaagcttacaatgcgtcagtttcaggttgctttaagggagcttcgccagtattcaagaaagcttgatttgccaaaaacggaattagatatagatggaacaatcgactcaacatgtaatcagggtggttatttgaaacttgaatttcagcagccacgaaagaatacagttaagttaatgcttttgtttgacagtggtggatcaatgtatccttacagcgagttgtgcaatcaactatttcaggcagttcacaaggcgaaccattttaaggatgtaaaaactttttattttcataactgtatttatgccaagttgtacaagaatccggaatgtaatagcggtgactggatagacacatcttgggcatttaagaattatgacaaggattacaaagtcataattgtaggcgatgcaggtatggcaccagaagagttttatgacaaaaacggtaactacagcggtcctaacaacggcttgtcaggctacgaatggatgcagatatttgcaaaaaaatatccacatacaatatggctcaacccatcatttcatagtcaggcagacagcatgtactggatggaatcagaaggcaagatacgtgagctggtagacatgtacccgttaacagttgatggactaaaacatggtattaagaaactaatgtcagataaaaaataaaaaccttaatagatacaagattgggattttagaagggaaatttgcactataagcaaattaaatgaggtgataaatgatggaaatgaaatgtccatattgcaattcagaaatggaaaaaggtgaaataaatcaggacagatatgccttaaaatggaaatctgaaaagaagggtgctaaaagtgtaaaacttacaagtatgctaacacagacatacgttgacgcgtatctatgcaggaattgcaacaaaattataattgatgtagattcggttgaagagtaataagctaattatattgttagatatgtcaggaaaagggattctttgcaaacgataaaatcaacgtgtttgcatgaatccctttttggacatatcatacatgaattttatttcttctgcaacagaaacagtctgttcattccttcctgccaagggtaaggaaattcaagataacgtattatttcataatatttttcaaatgcctgcttccatgaggcggtatcaacttcgcggtatctaagcaccccatcttcttcaaacaaattgttggcaataggcttaaatccaaaagactcaaggtagccttcctcataatatgggtttagttttacaaacataagtccacctttaggaattagacgtgtaagttttgaaaatgtttctgcagctacattttttggcattacatcaagaacgttagacaaaataatgccatcaaaagagccatcctcataagaatccagagcagaaatatttccaactttaaattccagattatcatagttgttaatttttgccatttttgttgcatagttaattccggtttcagatacgtcaacgccaagaccgtagccggtgttaccaaattcgtaacattggaaaatgatatcgcccgttccacagccaaagtccaaaactttcttacatttgcttgcaaatatgtcaagacaaatatcaaacataggttcaacagaaagaggtttgcctttcaagtctacaagcttacattctgagtatgtttcattccaaagatttactgcacgattatattctgtttctattaattcttcctgattattcataggaaaaccatcctctctaaaatagtactgtattttttacaaagcaaaacgaacttgtaataaaatttgttgaaaagagttactataaaaactcattgcaaaaaaatacggaagcactttcgtacttccgtatattataactcttaaaaataattattacataatttttctaaataattctttgaaatcttcaacacttgcatcttttggatttccaggtgcacaagcatctgcagcagcagattcagcaaggaactgtaaatcttcttcttttattgcttcaagttttgaaggaattccaacatctgctgataactgttttacagcatcaattgcagcttttctgtattcttcaactgacattgagtcaacaccttcaacgccaagtgcacgagcaatttctctgtacttttctccggtgcattcctggttatattccataacaattggaagcatcatagcacaggcaacaccatgtggtgtatcataaacggcaccaagtgtatgagccatagaatgtgcaataccaagacctacgttagagaagcccattcctgcaatatactgaccaagagccattccttcacgaccttcttttgtgttttctacagcaccacgaagtgatttgccaataatttcgatagctttaagatggaacatatctgtcatttcccaagcagcctttgttgtgtaaccttcaattgcgtgagtgagagcatccattcctgttgaagctgtaagtcccttaggcattgatgacatcatatcagggtctacaactgctataattggcatatcgtgtggatcaacacaaacgaatttacgctttctttcaacgtctgtaataacatagttaattgtaacctctgcagcagttccggctgttgttggtactgcaataataggaacgcaaggcttcttagtaggtgcaacaccttcaagactacgaacgtcttcgaattcaggatttgcaataatgattccaatagctttagctgtatccattgaagaaccaccaccgattgcgattatgtaatcagctccagaatttttgaaagcctgaacaccgtgctgaacattttcaatagtaggattagctttaatatctgaataaatttcgtaagctaaatcgttcttgtccaagatgtctgtaaccttagatgtaacattaaatttgataagatcaggatcagaacaaacaaaagctttcttaaatgcatgtgcttttgcttctgttgctatttcatcaatagctcctgctccgtgataagatgttgtgtttaacataattctgtttgccattgtaaaaatctcctttcaaacctgtcagctttagtaaaataatatggactatatccaataaaaatatataatacaataagcttatatttttctgctattcatacttaatagcctataattagattttaacatatttttgctaaaatgtattaatattttgtaaaatgtacacaaaaaagtttaccaaaaatcagtatgaaaaaactaaaaaaactgtttatttagttaaaaaggggaaaaatcataaagttgtaaggcaaatattaaaaaatgtacaaaaaatcataaaaatcatcaagaaattatgggcaatatttaaccttgaatgtagcaagttaaagtggtaaactagtgacagtcaaaaaaacgaaatgcaatgaacgggatacatcatatagaggttgcctgattacagagagtcacagaagctgagaagtgacagatggtatctataaggacatcacccgggagcagctcaccgaaagttacggcaagtaggttgggacgtgttcttcacgttacagaagaaactgttaattttgacagtgttaagtggttgtattttaatacagcaaacaaagtggtaccacggttagtttatagtcgcctttgtagtttttaaaactacaaaggcgttttctttttttagaattgttagagctcaatccatgtagcaattctaataattagattttataacactaataggaagttttcttatattttgtggttttcgcttttgtcttaacagaaacaatttattatccacaaaggatgaaaaaataataagaaagaaggatgaaaaaatgagtggaatattaatgatggttatagccatagtagttcttggcggtgcttatctgttatatggtcgttatcttcagaacaaatggggtatcgatccaaacgctaagacaccagcttatgagatggaagatggagttgactatgtacctgcagacacaaacgttgtttttggacatcagtttgcatcaatcgcaggagccggtcctattaacggacctatccaggcagctatttttggatggttacctgttttgctttggattttaattggtggtgttttcttcggagcagttcaggattttgcttcaatgtatgcatcagttaaaaacaaaggtagaacaataggttttattattgaagagtacattggtagagttggtaagaaattattcttagctttctgttggttattctgtattcttgtaatcgcagctttcgctgatgtagtagcaggaacatttaacggatttaacattgaaacaggtgcaaaagttgcagctaacggctcagttgccatgacatcaattatctttattgttgaagctgtagcacttggtatgttattaaaatatggtaaattaaacaaatgggttaacacagcaattgcaattgttcttcttattttcgcagtagcagttggtcttaagtgtccggtttatttatcaagagaagtatggcacattattatctttgcttatgtattggtagcatgtgttgctcctgtttgggcattacttcagccaagagattaccttaacagttacttgcttatatttatgattgttggtgcaattattggtgtattcgttgctaatccatcatgtaaccttgcagcatttaatggtttcaatgttgatggacagtacttattcccaatcttgtttgtaacaattgcatgtggtgccgtttcaggtttccattcacttgtttcatcaggtacagcatcaaagcagattaaaaatgaaaaaaatatgcttcctgtttcattcggtgcaatgttaatggaaagtatgcttgcagttatcgcacttatcgcagttgcatcatttgcaacaggtgaagcagcaaagcagggacttgttacacagcctcagatttttgcaggagctattgcaaacttcttatcagtagcaggtttacctcatcagttggtatttacattaattaaccttgctgtttcagcatttgctttaacatcacttgactctgtagccagagtaggaagactttcattccaggaattcttcattgatgatgatacagatatggacaacttaaacccattcatgaaagtagtaacaaacaaatattttgcaacaatcttaacattagtactttcatacttacttgcaaaagttggttatgcagaaatctggccattatttggttcagctaaccagttattatcagtattagcattagttgcatgtgctgtattcttaaagaaaacaaaacgtcagggcgctatgctttggattccaatgttctttatgatggcagtaacatttacagcacttggaatgacaatctacagattatgtggtcagttatttacagtaggattaacatttggtatgacattacagttaatctttgcagtattgttattatgtcttggtgtaatcgtagcaatccagggtgtgagaaagctttttgaaaaaacaaacaaagcagtagaagcttaaaaataaatataaatgaattagttataaaagtggactgagtaagtcttctaaaaagaagctgttgctttaacgattaaaatcgttggcacagcttctttttttgaaaaaatttttatgtatgtaagtattaaagagaattttaattttgcagatttttcttttttttcggcgaaaaattaccaaaaatgccaaaaaacataccaaaaatgccaaaagtatagtgtggaaattgaaattatgttaccatatgcgcgtgtaattacatagacaaaaattgtgtaaggaggataagtaatgttttgttttaaaacaaaaaaagctttagctttatgtttatgtgccattactttgagtatatgtttcacaggatgtaaagctaataaaagcaagcaaaaaacaacaactaacaatacttccgagaaatttactgtatccggagacaatttgtctctggatacaactatagagaaagtaccagacagtattgatgaagtagttgtaaagccatataaaatcgatgttgaaaaagcaaaagatatatttttagataaagctgaaaaagtatcatatgatattcctgacaatactaaagagtattatcaggataaagagggaaaccagataaggattgataataaagaaggtttgtactttacaactgagttttattggaatttgatgaactgtgtcagattagatccaagggatgaaaaatacaatggagacaaattcttaaaggatacggatttagattttatgtcaagagaggaagcattaaatgtgttattggataaattagagctattaggaatccaattaggtgacattgagtttagttgctatggtttggaacataatacattggaagaagaagaatatgctgaagacgtagaggggcaagaggacaaatctgtatataaagataaatggacaaaggacgatgactgctattattttgtaattcgtcagaagaagaatggaattgtagaatatcataagtatggtggaataatgataaattatgaagattgcaatagttccattcaggctgttgtatctaaaagagggcttgaatcattagatatggagtgtgctttaaaaatcgagaatacggggaaaaaggtaaagattattcaaccacaagctgttcttgatatagtttcaaataaatatgggaaaataattggaacagagaaatacaccattaattcctttaatctgtgttatatgtcagatttgtttaatgataataaagttacacctatctatcagtgccatatgcttgaagaaagcgatgagggtacaagagttgaacagttacttattaatgcagaaacaggcgaggaagtgcaatgagagtaatgttaaattatttaaaaatggatatgtatagggctttcgtgaatagcaaattcatatttacggtaatagtaatagcattcttaccattcttggcatgtgcagaaaagcagggatattcatttgtaaatgtattttcctccaattcaatatttgaatattttaatgaagtaaccttttggagtcaaataggaatattaatttttataattatttctttcgtatatgcagactgtatttgtgatgatttgtcacagggaaattatatatatagcataacaagaggaaatataaatggatatgtaatgtctaagataatatgtgtctttattaacagcatagttacgtttattacaggaatgttattgtttgcaggagtgtcctatgtattgtttggatttcaatgggaagttgcaggaggagaaattaacaatcaatatatttattcatatatgacagataaaacttttagtggaatgttagaaaataaaaattatttaatattttttctgtgcagcgtgggaactaaaagtatattatacggaattacatcgttaagctctctgttaatgtcattatatataaagaataaactacttattatgtgcgttccggttctgctaattacagtaggtagttatagtttggagtatattttacccaattataacggatacaaatatgtatattcagttgatttttttaatatgaaggatacatcagaagcaataataatgttaggtttaattacaattgttatagttggaattataacaatgctgattataagaagaatgaggaggattgttgttggataattttttaaaatatattagatacaatatttattctattcagtataaagtattttccacaagaaccattaccacaattgttttaatgttattatgcaatattgtcttttctgtgccaattctaaatttcgcatcagatacaggatataaggttaatgttatgactttgccattctttttgtgtaatcttagttatatgtgtgcatttgttcccatagcaatttactatttttcacaggtaccattcctgaattattcagagatgtattgtgtaatacgtgaaggaaagactaaatgggcgttaaagcatatcctgcatattgtttttatgtcatatatatttatgtttttattggaagtaacaagtattattccttatattttcagaggagatttttctaatgaatggggagaggtaattactactttgtcaattacgaatagatggatggattatggaacttctgaaattctgtatacgattttggaacattattcaccgtataagtctatggcaataatttttttatttgtaggattagttatttgtttcttaggagtatttatgttttcaatgagtctgttatttacaagacttatagcaatgtgttccggtatgatttttgaagttttaatgattacagcatttaatatgagaacaattgacaattatttaatatatctttcaccattttcatggacagacttaagtatttttggaagaaaatatgatggagtggaatattttaatggaacacctacaatgggatggtgtgttggaattttacttctattaatagttgttttgacaataatatcaattgtcagggttaatcatatgaactttgattttacaagtgaagaataatggaaggaatatgtagtatgaatgatatagttattaacgtaaaagatgcgacaaagaaatttgaaaaatatacagtacttaataatgtgaatcttcaatgttacaaaggtgaaatatgtggaattgtaggaagaaacggttcaggcaaaacggtactgtttaaaagcatatgtggattggtaaaattaaatagcggagagattactgttaacggagatgttatcggaaaagatgtaagcattataaaaaatgcaggggttattatagaagaaccgggtcttttaagatataagagcggaatgaaaaatctcgagtatctttatatgataaacaataagttagacaggaagtatttaatgacagtaatggaaaaagtcggattagatccaaaatcaagaaaaaaagtaggaaagtactcaatgggaatgagacagcgtttggcaatagggcaggcaataatggaaaatccggaaatacttattcttgatgaaccaatgaatggtttggataatcatggagtggaagacatgagaaaaatattcctggagttgaagaacatgggaaaaactattttgttagctagtcataatagggaagatattgacgtgctttgtgataaggtttatgaaatggatagaggagaattaaaacaaatacgttagtctaagaaagatgaaaaagtaagatacttctattaatatggcttgacagcggcgctatttttggagaagatggtaaaggatatcagcgaattaatatagcatgtccgagaaaaactctggaacaggcattaaatcagcttaagtcaggaattgacagccttaagtagaaaatgacagtttaagttagaaaatgatatgcttaagtagagactgatatatcaaaataagaataaacttaagaaagtaggattattatgactcttgcacaattaagatatgccattacagttgccggagcctcatcaatgaatgaagcggcaggaaagctatttatatcacagccaagtctttcagcgtcaataaaggagttggaagcggaggttggagtagagctttttaaacgtaccaacagaggaatttcagttacgccggaaggcgaggaatttataggttatgcaaggcaggtagttgagcaatataacttaattgagtctaagtatatattaaaagaaaacacaaagaagaagtttggcgtttccatgcagcattatacctttgcagttaaagcttttgtggaaatggttaagcagtttggtatggatgaatatgagtttgaaattcatgaaacaaagacatacgatgtaatcgaggacgtaaaaaactgtaaaagtgaaataggagtattgtatattaatgatttcaataagaaggtattaactaaactgtttcaccagtcaggggtagagtttcatgagttgttgaaatgtcatatttatgtttatctttggaaaggtcatccattggcatcaaagaaggagataacattagaggaacttgaggaatacccgtgtttgtcttttgatcaggggcagaataattctttttattttgcggaagaggtgctaagcacatacgattataaaagactgataaaggccaatgacagggcaacatttcttaatctgatgataggccttaacggatacacattatgttccggtataatgtgcgaggaactgaatggttcagattattgtgctgtgaagcttaagtcagatgagattatgacgataggttatatttcaagaaagggagtgccaataagtcctttgggcaagaaatatttggaagaaatcagtaagtacaaagacaaagctcttagataatgggaaatttgttagttatttttactaaacagaagtatttatattgaaaatatatagaaaaaaaatacaacatacagcttgctatagaattaaactatggctagctgtatatttttttgattagacaacaataaataacaatagtatacttgctacacaacagagaacagttgaagagaggtgaggacatgtcggagatagaaattaaaaacgtaagcaaaaaatatgaaacaaaagatggaactgttgaagcattaaaaaatgtaagtctttcgattgagcagggtgacatatacggaataattggtatgtccggagcagggaaaagtacattggtacgatgtatgaacttccttgaagaaccaacagaaggtcaggttcttataaaaggaagaacacttggttcactgtcaaagaaagaattaagaaaacagagagaagacataggaatgatttttcagcatttcaatcttctaatgcagaagtcggttatagacaatgtttgttttccattatatatacagggaaagaaaaagaaagaagcaagagctaaggcattagagcttcttgaaatagtaggattacaggatagggcaaaagcttatccggcgcagttgtcaggaggacagaaacagagagtggcaattgcaagggcattggcttcaaatccaaagattctactttgtgacgaggcaacaagtgccttggatccacagactacagcatcaattcttgaattacttgaaagtattaataagagatttggaataacaatagtaatcattacacatcagatgtcagtagtcagagaaatatgtacacatgtagccattatgaaagatggtcaggtggcagagaagggattagtaaccgagatttttgaacatcctaaatctgaagttgcaagagagttgattaacaaagatacaggcagcgacgtagatggtacccgcaaagtaacaaaggaaataaataataagaaaaatctcagaattgttttttcagaaagttcagcttttgaaccggttatagcaaatatgattttgaagtttaatgagccggtaaatatattgaaagcaaatactaaaaacgttggaggcgtggcaaaaggtgaaatgatactgggctttcgcgaagacaatcagaaaatagaagagatgaaacaatatcttatagaaaaaggattagaaatcgaggaggtggataattatgtggactagtgcaactacagatatgattattacgggaattggtcagacactatacatgacaatattatccacagtagtaggatatgtgtttggacttccattaggagtaatgttagcagtatttgacaaagacggacttagacctaacaaggcagtttacaaggtgttagatgtaatttcaaatattatacgaagcataccgtttttgattttacttattctgataataccattaacaagaataattgtaggtcaaagctatggctcatcagccacagtagttcccctggtagtggcagcgattccttttattggaagaatggttgagtcatcaatcaaagaagttgacgcaggagttgtagaagcagcaagatcaatgggagcaagtgatttaagaataatagtaaaagtgctcttacttgaatcaagaacatcacttataaccggagctacaatagccattggaacaattcttggctattcagcaatggcaggttccgtaggtggcggtggtcttggggacattgccataagatacggttattacagatatgaatctcaaattatgatagtaacggtaatacttcttgtagtattggttcaggttttccagtctataggaatgattattgcatcaaaacttgataagagaagaaaataacaggtaacactgttacttataaaataaaaaatatgaaaaagaaggagaatgaaaacatgaagaagaaaattttagcattagcattagcaggagtattagtagtaggagcattaacaggatgtggttcatcaaagagtgaaagttcagaaaagaaaactgatgacaaaaagattacagtagcagcatcagcaacaccacacgcagaaatattagaagaagcaaaaacattacttaaagacaagggatacgaattagaagtaaaagtattcgatgactatgtacagcctaacaacgtagtagaaagtggagagtttgacgcaaactacttccagcatgtaccttatcttgaacagtttaacgaagaaaaaggaacacaccttgtagttgcaggaaagattcattatgaaccatttggtatttatcctggaacaaagaaagacttaaaggacattgccaagggcgataagattgcagttccaaacgacacaactaatgaagcaagagcgcttttattattacaggataacggaatcatcaaattaaaagatggagcaggaatcaaggcaacagtaaatgacattgaagaaaatcctaacaacattgaaatcgtagaacttgaagcagctcaggtaccaagagtagtaaacgaagtagcttatgtagtattaaatggtaactatgcattagaagcaaattacacagtaaagaaagacgcattagcttatgaaaagtcagattcagaagcagcaaaaacatatgttaacgtaattgcagtaaaagaaggcaacgaaaacagcgaaaaaatcaaagctttagtagatgtattaaagtcagattcaattaagaaattcatcaatgaaaagtatgatggagcagtaatcgtatacgatggagaataagaacataatataagatgtaaaaggctattgcagggcgtatcagagacttgcaatagtctttttttctaacataagatatgatataattctgtggaaataaccaatcatacaagggggacaaagatgctcagtattgcaatatgtgatgaccagcaggattcgttagaaacaatagaagaagaattacatagatcatctaaaaatttaaatgttgaaattgaaacccaactatatacagacggaaatgatatgcttggactgatgaagaataataaagactattttgatgttgtgtttttagacattgacatgcccaaaatatcaggtcttgacgtggctgcaaagatgagaagtataaatcaggaaattttacttgtattcatttcggcacatgaacagtatgtgtttgactcaatagattacagtcccattaaatatattagaaaattaaaaatgcatgatgaaatagaactggcattgaagaaagctaacaaatgtattaatagcagaaatacaaaaacaattataatcaaaacggacgatggagaaattcgtttaagacatgatgatattatgtattttgaaatgtataggagaagaataacagtatatacaaatgatgggaaagcaatagaattaaaggaaagaaaaacaataaaatctctttatgaagagcttgaggacgaggatttcgtacaaatacatagcggtggaatagttaatgtaaaatacatatatgaatattcgggatatagtataacactagacaatgaaacgaaacttgtagtaagcagaagcaggctgaaagaagtaaaagaacaaatggcaagatattggaggaatagagtatgacagcattgtattgggtagttgactgtctggcaacattggttgaatgtataggatgttgtgcctttacgggaatatttgtggaaaagaagaatgttaaaaagagaatattagtggattcaacattttttagcatctttattattatgatgaataaaatcagtcttttttcttcattaaatggagtgatgtcaatagtaatattggcatccttacaggcggcagtttataaaagaaaaattaaaacactaatattgtcaacggtaatattttcaataatagatatggcaatagattttacagtagtacaaatgggagcgatagtatttagtataaatacaggcgaggtgttattaaattatggaattgaaagaattttctgtacaataatgagcaaaacaattttagtaattgttgtatatttaatgcataagtataacagaaataaaacacagatatcaggtagacatttaggtatttgtggtttgatagcttgtatattagtggcgttagattattatattgcagaaaacagtatgatggcagtaaatgacaagatgcgtatgtttcttggaatatattttatatcatcaatagtaattattctgcttgtttttagtttagtattaaaattaggcgagaattatcaccaaaaaaatgaaatatctttattggaattacaaaatgaaatgatgatacgaactgaaaaaaatactgaacaagtatttaatatgtggcgtggtagcattcatgattataaacataagatttttgcaataagacattggcttgaagagggaaatgttgataacgttaaagaatttgtagaacaggaatgcgagaatttaactcagaaaatgttctatgtacagacaggaaatagtgccgtagattcaataataaatacaaaacaaaaaattgcagaagataagggaataatcttttcgtctaatatttcattgcctgctgagtatgcagtttcagatatggatatggtatgcgttcttggaaatttgatagataatgccatagaggcatgtgaaaagcaaacaagtaaatatatagaagttgatataaatgaagtgaaaaaaatgatactgataaaaatagttaactcatataacggagaaaaaatcgacacttcagttacatcaaaaaaagaaaaaacaatgcatgggataggaataaaaaatgtaaagaaaatagttgctaaatataagggagcatatgatatggaatgcgaagatgatgaagtagtgactacagttacaatgttatataagtagaaaaaaatagttgagaataggttgttgatacctaatctcgactattttttacttttaattaccaaaaaatccataaaatataccaaaaaatccatattgagtttttttaataatttttatgctattatatgtgcaggcaatcagaatgaaaagattgtctggagaaaaagggaaaaataagggaaggaggacacgctgatgaaggaaaataaaacattggaaaaaatgttggaaaccattgcagaggtatttagtgaatcaacatcatgttttgggctttatgaacctaaagtaccggaaaaattggtagaaaaaaagaagaaaaatgtttaggaagatgtcggaagcattaacattccagttggtaaaaaataaaatactgaacatagaagcttatgagatttgggcatattcaatagaaataattctattaaatggaagtattttattaggatgcttattaataagttttatgttgggagaaatgacgcacatgttatcatttgttttattttttataccattgagaatgttagtgggaggatatcattgtagaaagagtgaaacgtgctttttttgcacacttttggtatatggagcatctacgctgtctatacaattgtatgagacggaaattatggaagaggcgatatggattttagcagtgatttcaattctgattatattgatatggtcgccgttggttaacccaaatcatcttttagaggattatcaaatcagacgaaataaaaacattatatatgtaatggttgtgattgatgttgcactttacggaatattttgcaagacaaacatagccatggcacatagtgaaatgatgtttattattttggtagcattgacactgctggcaggagttatgaaaaacaaaagaataggaaaaaatgagttcaaaggagaaatgctttgtatgaaagacgttttaaataaataattttattgtataaattagtattttggatttttatgcaaggtgtgtaaaacatagaaggttgagatgaaagaaaaattaagaagaacgattgcactattgttttgtggtggcttaatgtttgcaggattgttgagtagttcggttaaagttgaagcaggaacaagtaaaacggtagaaaatgaaaagagctatttgtttgcagttccggaaggaggctggtcaacgataacagtatatgtattatagtacaacaacgaaaaattatgcctcagtatcctatacagtacattgtaaaggtggtattcttacatcaagtttaaacggtcatacactaaaaatgagattaaatacgaagtaaggaaagattaggtaaaagtatgaagaaaaaagttattataagcattatcgcatttagtctaataataggaggaacagtattgacaaatgcaaaacctaaaagtaatttagcaaaaatgtggggaaatgtgctttcaaaggattatgaaaagaaagaatcaaagaaaaataacgaatacagaatatcattatatggaaaaatatcagaaaaaacagaagaaattaatgatatagcagaggaaggaaaggatattttaatagcaacagatgaaatagataaagctgaagaattttataagataaacggtaatgatgaagagcttgcaaaagaaaaagcaaaaagttatgtagaaggtcagaatgctttatatattgaggctattaagaaaggatatgatgttacggacaaagaattagaccagtatatagcggagttgaaggaaacagtttcaaccgcagaaaacagggaagtagcgcaagacattattgattcttttgattcggaagaagactattggaaatatgaaagagaattatataagaagttattacctattcagaaatatgttaaaaaacttgaaaatgattttataaaacaaaatttaaaaaataaaaccgatgaacaagttaaaaatgaatggacagaagaattagaaaaaataaaagcaaaagcagtaaaaaatcaggattttcaagaactacaacatgatgaaaagatagatagtaagtttataaaatagtggttattctttcaattaacacggttgttcataacagtctgtttgtgctattataatgctaaatcagtaagtagcgcaaaggagaaattatgggacaggtttattttacaagacatgggcagacattttggaatgttgaaaataaaatatgtggagcaacagatattggcttgacagaattaggacataagcaggctgaggagttgggacagaagattttgaaggagggaataaaaatcgacgaaattttgtactcaccacttagcagggcagcagatacagcgaagcatattggggaagtaacagggattccgatgagagaagaaatccgattaaaggaacagaatttcggaaagtacgaatctacaccaagacacggcgaagaatttgaagaggcaaaaaagagcttcataaatcattttgacggtggcgaatcaatgtttgaaatggctcagagaatctataatctattggatgacttgaagaaagaatcaggcgaaaagacatatcttcttgttgcccataatggcatatcaagagtagtaaattcatatttccacgatatgacaaacgaagaatatgcggcgtttggaataaagaattgcgagatattaaagtatgaattttaacgccagttaaaaagtggaacttgtggatcaacagcaacaacaatagaagaattttgaaactgtttctaatttagatattaagtttgatgaatctttcaatataaagatagattgcaacaatgaaataggaataatgtatttgcgaagtcaggacaaaatatgttatttgaagaacaaagataaagcataccagttatcaaaggaagactatgatttcataattaataaggtagaagaggaataataaaaaaggcacagagttaatcagttacggttagccctgtgttttttttgtcaagataaattatctcacagttatagattgaagattatttatccatttcaaaaaaattattaatactttttcggcattttgaatatattgaactgttaggaatttttcctgcaaaaaacagtgaggaggtgaaataatgcacaggtttttccggctatggaaaaagcaaagtatgaaaaagtatggagcatgtatgttatgtatggcaattacaatgacaatgtttcaaccggttttgggaaatatagggccgggaacggatacactaaagactgatgagggaacaccggtaaaaagtatttacgtttctgacagctccacatctgacattgaatctttgtttcagggaaaaaacaaagatgacggaaggatagaaactgacaagtcagtaatgtatggaaaagatgattattccatatttagcagttataatccgggagaatttagcgtaattttgtcagcacttggacagaagtatattgatacgacttcgggaataattcatgtacctttagatgtggtacttgttcttgatatttcaggaagtatgtctgtggatggcgatggcaagagggctgataatctggtaaaagctgtaaacaagaccattacttatttgatgaaagaagatgagaataacagggtagcggttgtggcatacaacacaaaagccacaaagattttgccacttggaagatattatgttggaagtaaggcagactactctaataccaattcttatttttctgtatcaaaatcatctaagaatgatggctacaaaaaattagatataggaaaaattaaaaacgaaagcacaaacaatcttacagataaggcatcgaaatcaattgaggtatatggggcaacatacattcaggatggaataaagcagggggcggatattcttattaatgaaaaaacaacaacttacactgacagtgtttctggtcagaaagtaacaagaacacctaatattcttttgttatcagatggttgtcctacccttggcaattcggattacaagaatttgccttcgaataaaaaatttggtgacggttcatgttgtggaagtgaaaatactacggacaataacaaggagtattcagaaaatgacaaggggatttttggttattacacaattcttacggcaaagtattataaggacagtgtaagtaagcattacaatggtcaggaagaccataaaaacaacaagttttttacagttggtgtaggcgttactgaaggggaagattatgactacattagtcaggtacttcatccaacggcgcagaatcttgaacgatgtaagaacagcaaagatccgcgagctaacgaattgcacaaggctttgacaaaacaatatgccgataatacaaagataactgtaggaagtaaaaatacgggagttcaggcaaaaagttccacgtattattacaccaatccatacagcaattatgattatgccgacaacagcaaaatggcaaaagatgatgcaatggacagcgaaacactgtcgcaaatctttaagcagtttttgcaggaaggcatggaaataatcaactatcattcctgtgtggaagaaggacttgataacgcagtagagtttactgacaaaataggtcagggaatggaaataaaggaaacaccgattctaagatacaatggcataaattacaaagcggcaaaaatctcagaagacggtgacgttaccacctatatatatgaaggaaaagttccatcggcaacagatggaaatgacgatgtaaacttaaaaaacatcaaagtcacagtaacaaaaaacagtaaaggattacaaaacgtaaagttcacaataccatccaaactgttacctgaaaacgtccaaatccaaggcggcacacaatacaacaaggcattgccaatcagactatgctacaaagtaggtccaaccaaagaagcaatccttgaagcagccacttttgaaacaatggaaatggaaaaaatactctacacaaatatgtgggatgagggcaaagaagcaacagccacatacattccaaactcggaaaacccatactactacggttatgaagaaaatccaaacttcgtaggctatgagaaaggcgaaatagccaaagacaaaaacgcaaccaaaacaaagcaatactcgaaatcatatggaaaaataaaaaacaaaacaataacggcaacactaggcaacaacggcaaactaaccataagtgcagccaacacaaacaaaatctaccaactgcccgacacaggcggaaacggaacaaacacatacacatatataggagcaatactaatagcaacatcactaatctacaaccgatacaaaaaaaacagagacaatataaatttgacataaatagaggcgggcgacaattgaaaggggaagtatgaaaagtataaaaaaatttttagcagtcattttatcaatgactttaatgttaacacttggcacagccgcttttggcgcacaaaaaactctgccatcaggcaaggacacaggcagcattaacgtaaccaacctaaagccgggagacacagttaccgcatatcagtttgtaaaagccgactacaatgagtatggcttcacaggttattcggcaataaacaactacgtaaaagatcctgttgcaccaacagcacaggaagtaattgatatggcatcaaatgcagccactatgacagttgcagcagagaagaaagttgccacaggggatacggaagttacacttaatggacttcctgtaggttattatcttgtaatggtaacaagcggttctgaaacagtttacagtccaatgattgccggtatttattattcaaaatcagctaccgacaacactttgacaaacggtgcaatcagtgcagattctgattttgaaattaaagctcaaaaatgttgggcaaagtcatcaacacctaagcttgaaaaaacaatcgttacaccttcaagcaaaaacagcaaaggtgacgatattgcaattggcgacaaaatcacttttaacttaagtgcaactgttccatcttatagcaaggaatacaagaaagtaacttacaagatttatgacataatgagcgaaggacttgactacgtggatggttcaatgaagtgctttattgaaaaatatgaaaataacagagagaatattaaagttacacctaaagtaaatggaggcattattgaaattacatttgactcaaaatttattcttgaacatcccggccagaagattcaggttgaatatcaggcaaaacttaatgaaaaagcaggtgtaaactttgatgcaaacattaataaggcataccttgaatactcaaacaatcctgccagtggttctactgcaaaaaccggtgaagataaagtttacgtgtacacatttggcattgattctaacttatttggcaagagtactgagaaatggaacgagaagactaaggaattaattaaggtagaagaaggggagtaccaatgggttgaaactgaaaaagaaagtggaattttcactacaacaacggcccttgaaggtgctacttttactttgacaaataataaaactaagaaatcttacacggcaacatctgacaaatacggatatcttaagtttacaggtcttgatgcaggtgagtacacattgcaggaaacagatgcgcctgacggttttacattaaatgacgcaaaacatacagttgttatcacggcagaatacaatcaggatggaactttaaaatcatacacaataaaaatcgatgacaaggctacatcaacttatactgcaacttgcgataagggagtaatcaaaacaattacttcaacaaaagacagtcagggaaatatttctgaatctgctattttgaaaaactcaaaaatgagctttttaccttcaacaggtggcgttggcacaactatttttgcaattgtaggtgttgtatttgtggcagtagcgttaggtcttcatatgattttaagaggaaaaagcaagctggaacaggacagatagtttgagataaaaaaagagtttcagacagctttaaaataaaaagtttaagataggtagttttcgtaattgaaggggaacagattaatatctaaaattattatggttgtaatttttcttgtaggatttggttttattttgtatccaattgtggctaacgagtggaacgaaatatgccggcgaaaagttataaccgtatacgacaggcaggttgaacagtctgtggagcagggcaaaatcagttatgaggatgagaaaaggaaggccgacgaatataataaagctttaagatttaacataactgatgacggatttgtctcaaataatgataatagtgtcaataatagtgacaatgatactgatgaagataataataaagataatgaagaaagttcctttgatgaaaacagtgagtacaacaagtgtcttaatttaaacaatgacggtatgatgggatatatttcaattccaaaaattgacgtaaaacttccaatttatcactctactgacaatgaagttttgcaaaaatatgtggggcatttggaaggctcaagcctgccggtagggggcaaaagtacacatggagttttggcggctcacagggggttgcccagctccagactgtttacggatttggacagaattgaagagggagacaggttttatatttatgtgcttaatcaggttttgacttatcaggttgaccggatttatccaatgatagacaaaaacgacaaggcaaaattgacggaagcattgcagacaaaggagggtgaggactacattacccttctaacctgtaccccatacggtgtcaacactcacagattattagttaggggaaaaagagtagaaaatagtaacgagagttatgatagaaaattaaacagcaactcaaacttgtggattctaggcggcgcagcagttgggataattgcaacgtcagtagtgctggttattttgataagaaagggggagaaagcagattgaagaagcattgtaaaagcaatccgggaagattggcaaaacacatattaggcaagtattgtagaattagtcaattaagaaatggttgtattttaaataagatttgtgtgggatttactttgatttttttatttggctgtttggtcttaagcaatggaaaagttttggcagaaaacgctgtagacattggtaaactttgtaatcttatggttcaggtgccgaaagaaaatccggagcttaataacgcacaattgcaagtgaaattgtacaaaacagctgatattacaaaattgtggaaatacaacacaataggaaattatgaactaatgaacaattatgaatattcctttattaatggtaataacgtaattgaaaaaataaaggttaacctaaatgaaatagacagcaataccacagcaaaggaatgggaggggcttgcttttgtggcaaaagaagtggcaaagagcgaaaagcctactgccgtggcgacaattgctgatggaaaagctgtttttcaggggcttcaaccaggactttatttggtggaagtgaacggcgcaattgtaaatggcaaagcataccgatttatggcatatttgatttcagtgcctaactacaacgcccaaaatcccactggagaaaaaatagaatacaacgttgacacagagttgaaagtggaagtaaacgatgacaacataacaactcagacaaccacgtttaaaccaacaaaaaacacaacaaaacctaaagccaaaacattaaaaacaccaaagaatcagccggatgaaacttcaaaatattttggcatattgccacaaacagggcagcttaagtggattattcctgccctactaatagtaggatttgtttgcataggaataggaatacaactactaaaaaaggaaaataaaagtgaataaaaaaatatctgccgtagttacactagtaggtttaatacttataatgtgtgctatggcagttttgtttcacaacaaaaaggaagacaatctggcacaaaaatcatccaacacagttctgtcaagtctgaaagaaaaaatagaagaaagcaatttaaaaacttcggaggaggaaaaagatttgaacaaggatttgaatcaatatgacggctacatcaaaattccaaagttaaatcttgaattgcctgtaatgaaaaaactaattcaggcaaacttaaaaaaatcaccatgtatatattcaggcacggcaaaagattcaaacctgataatagccgcccacaactacagcgcccactttggcaaaataaaccaacttgaaaacggtgacaaagtacaatacaccgacttacaaaacaacacctacaactactgtgtaaccgctaaagaaaaaataaatggcagcaactcagagcaaatgcaaaacgaaaactatgcactaaccttattcacttgtgactatacagggagggataggattacaataagatgcgagaggaaatgaggaatgttggggataaatgggatgaagaaatgtaagacaattaagttgaaacgaagaaatgcaggaaagtaggaataagtgttgagatggattcatagaatagaatatagtgttttctggaatatttttagtctgatagtatacagaaaattttggaaacaaacaataggcagtgttgcgcaattttgcgagcatagtgtatgtggaaaaacgactgtttgagccattaggcgagtttcgtttttccacatacagtggacggcggagcaaaataagaaacacaacgtgtttgtgccaaaattttctgggactatcagaagtgagaaataacaaaaatactatattttataaatgaattaggagggaaaaatgaaaatacgttttagatcaattaatgcaattgaggaatttctagacattgtcaacagattttcagcagaaatcgacatcaaatcaaaaaggacaaccgttgacggaaaatcaatgatgggaatttttagtttggatttgtcaaatccagtggaggttactgcaattggaaatgaatcagagcaggtatatgaggcaataagcaaatatgcggcgtaggctacatataatttaagatagaattccaggggaggctcctgcgggagcctttctttatgcataaaatagattttggaaaaacaaagtttaaaagctgtttgaaaatagggattacgtgtcatagagaaaattttttatatgacaagtaaaatctcttgggttttatgcaatttaattggggattacgtgtcacagagaaaaaactttatataacaagtaatttttaaatttttcagtataatttgactgggaattacgtgtcagatgaaaaaaatgtcaaatgacaagtaattacttattataatgcttatattttcctaaaaattacgtgtcatatatcaaaaacataatatcacacgtaattcttatccattacgaagttctgaacaaaaaacgctgtaatatccgtaaattcttgtttttagcttgtccattcgcaaccatcacattttattttacaccaagctattgacatatcataatattagtactataatcgctaacactgttaataattaatagtgttagcgattttctttgaacaacaaaagagtaaaggagcatttatattctaatggatgataaaaagaaatattatgaagagaaagcaaaggagttattaaactttaatatgatggcgaagcagtctaagatgagcgataaccttcataagatggcaagaggagaagccattatgttggaatgcttagcacatagtgacaatgggttaatgcctaatgagattgctaagagtgcgcatgtaagtactgcaagagtagcagcttttcttaaagcagttgagaagaaaggctatattcaaagaattagccttgaaggggacagaagaaaggtgaatattgtattaacagacataggctgggatgcagtaaaaggtagaagagagagaatgcttaaaggcgtagtggcttatttggaaagacttggagaggaggacactgaaaatcttttaagaatattagaaaaaactcgaactataatgaaggaaaataatgatatgaaaggaaaacagtaatgaaacatatttttgaaaatttaaagaaatactggtactttgtaattttaatattggcattacttgttgttcaggcgtattgtgacttatcattgccggactatacatctaacattattgatgttggtattgttaatggcggtgttgaacatcagatgcctgagtttataacagagaacagttacaatagtttgaagctgtttttgaatgaacaggagacaaaagactgggataatgcttatgagtttagcaagtctgacaaagcctataagcttaagaacacagacaaagataatatggaagaattagacagtgaatttggcaatgttattgcagtatattacatgatgtcatcacagcaggattcacagtttaaaaatatgagtggtaatgcacagcagatgactcctgagcaacagcaggaaatggctaagaagctacaggaatttggtgttgatccacaaagtccaacattaatgtatgatttaagaaaggtttttgaaaagaaactttcaagtcttggagattcaactattagttcatatgctaagagttttgcaaagagtgaatataaagcctgtggtaaggaccttgataagttgcagacagactatatgtttaaaacaggggcaaagatgatttcaatgactttgcttatggtaatcgcggcaattcttgttggtttctttgcatcaaaaacagcagcaggagttggtagagatttaagagagaaaatctttacaaaagttatgagtttctccaacgcggaacttgataagttctcaacagcgtctctaattacaagaagtacaaacgacgtgcagcagatacagatggtttcggttatgcttcttagaatggtactttatgcacctattcttgcaattggcggaattattaacgtagttaattacagttcaggaatggaatggacaattgttcttgcagtggcagttgttgtatgtatcataggagtgcttatggttgttgcaatgcctaagtttaatatgatgcaaaaattagttgacaaggttaaccttatttcaagagagattttaacaggtctttcagttatcagagctttcagtagagaaaagaaagaagaagaaagatttgaagaagccaacggcaatcttacaagagtaatgctttttacaaacagagccatgtcatttatgatgccggcacttatgtttgtaatgaacggcgtttcagttcttattatctgggttgcggcaaagaagattgaccagggtgttatggaagtcggaacaatgacagcatttatcacatattcaatgatgattatcatgggattcttaatgcttacaatggtttcaattatgcttccaagagcagcagttgcagctaacagaattgatgaagtattaaaaacagaaattaccataaaagacaaccacaatgcattaacagaaaaaacaaacaatgcagttgttaagtttgaccacgttgattttaaatatgcagacggcgaagaaaatgttttggaagatattgattttgaggcaaagccgggacagacagttgcaattattggtagtaccggaagtggtaaatctactcttgcaaaattaattccaagatttttcgatgtaactaatggaaagattactttggacggtgtggatattagagatatatcaattgaaacattgcgttcacagattggatatgttccacagacaggtattttattctcaggtgatattaattccaatatttcatatggtgcaccgggaatagatgaagcaggaattaaggaagcagcacagattgctcaggctacagaatttattgaagacaaacctgacaaatttgaaagtgcaattgcacaaggtggtacaaacgtatcaggtgggcagaaacagcgtctttcaattgcaagagcaatagcaagaaatccaaagatttatatttttgatgacagtttttctgcacttgattttaagacagatacacagcttagaaaagcacttaaaccaaagactaaagatgcaacagtatttattgttgcacagcgtgtaagcacaattcttcacgcagaccagattcttgttttggatgaaggaaagcttgtaggaaagggtacacataaggaacttgtaaaaacttgtgaaacatatatgcagattgcaaaatctcagctttcagaagcagagtttgcagcaagtattgaaggaaaggaggactaagccatgccaagaatgaatcgtaaaccgggagagaaagcaaaagactttaagggtacattaaagaagcttattaaatatgccggaagatacagaataggcattattgctgttatgatatgtgccatagcaagtgccacatttgcaattgtaagccctaagattttgggaaaagctacaaccaaattagcagaaggtttaatgtccaagatttccggaacaggcagtattgattttggttatattggaagaatacttattatagtattggttctttatggaataagctcattatttaacttagttcagggctttacaatgtcaacaattacacagaagttatgttacagacttcgtcgtgaaattgttgaaaaaatcaatcgtatgccaatgaaatattttgaaagcagaacatatggtgaagtactttcaagaattacaaacgatgttgacacattgggtaatggtttaaaccaaagtgtaacacagcttattacttcattaacaactatgattggtgtagtaataatgatgttaacaattagtccgcttatgactttaataacattattaatacttcctgttagtatgatttttataagctttataatgaagcattcacagaaatactttaaaacacagcaggaatatttaggtcatattaatggtcaggttgaagaaaattacggcggtcatttagtagttaaagcttttggaaaagagcaggatgtaatagatgaatttaagaagacaaataatgttttgtataattcagcttggaaatcacagttcttgtcaggtatgatgcagcctattatgacttttgtaggtaacttaggatatgttggagtagctatttcaggtgcgttccttgcaattaacggaacgattacaatcggtgatattcaggcatttataacatatgttaagaactttacacagcctatagcacagattgcccaggttactaatatgatgcagtcaatgatggcagcagcagaaagagttttcgaatttcttgaggaagaagaggaagaccaggttactgaaaatcctgttcctattgaaaatgttaagggagttgttgatttcgaacatgtacatttcggatacaatcctgataacattattgtaaatgactttaacgctcacgttaaggcaggtcaacaggtagcaattgtaggaccaacaggtgctggtaagaccacaatggtaaaacttcttatgagattctacgatgttaattcaggagaaataaaacttgatggacataatttaaaggattacaacagaaatgaacttcgtaatgctttcggaatggttcttcaggacacatggttgtttaaaggttcaataatggagaatatcagatacggtagacttgatgcaacagatgaagaagtaattgcagcagctaagtcagctcatgcacatcatttcattaaaacattgccaggtggatatgacttcgagttaaatgaagaagcatctaatgtttctgcaggtcagagacagcttcttacaatagcaagagcaatccttgcagacaaccctgtaatgattcttgatgaggcaacatcatcagttgacacaagaacagaacatagaatccagagagccatggataaccttatgaaaggcagaacaagtttcgttatagctcacagacttagcacaattaagaatgcggacataattcttgtaatgaaggatggagatataatcgagcagggttcacacgaagaacttatggcaaagaaaggcttctacgcagacttgtacaattcacagtttgatgtggtggcataaaaatatagttattgaatatatggattgttttgcagttggtattttaacaattctgtaaaaagtacgtgtatggtttgggactttccaaaccatacacgtacttttttgtttttaatattccacattattaatacttatcatatttctttcatattcagatgttattattcataacagcataactattaaatgataatagttataatgaaaaagttataagaatgaacaaaaaggagaattgatatgagaagaataaaaaaaggtatagcagtagcattatcgcttgttttggcattgtctttaacagcttgtggaactaaaaaatcagcagagaaaaatgataagttggtaattgcttatcagaatggtctttcatacacaccgctgttggttatgaaggagaagaaacttattgagaagcattatggaaaagacgtaaatgtagattggaaattgttggaaagtggcgcagcaattagtgaaggaattacagcaggttcaatagacattggtgcccttggaacatcagttgcaattaacggaattatgtcaaagacaccgtacaagatttgtacaggtttggcagcagtttctttcggaatccagactaatgacagtagcattaagactttgaaagacataaaatcaagcgaccagattgttgtaactcaggttaacagtcagcctcatatattattggctatggctgcaaagaaggaattgggcgacgctcatgccttagatgcaaacttagttgcaatggctaatgcagacggatattcagcgttaatatcaggtgcagttcagtgcaatatggtatttgcaccatacaatttaatggaagtaaaagaagataacatacacgaaataccggtaagcgaagacgtttgggctaaaggtgacacatcaatcgtaggaatagcatcagaaaagttatacaaaaacaatcctgatctatacaaagctttttgtgacgcaacagaagaagcaatgaaatatatagaagagaatcctgacgaaacagcaaaaatccttactgaaacttatgatgcttcacaagatgaaattgcatcatggttgaaggatggtgccgttcagtacaattcaactttgcagggagttatgaatctttcagactttatggtagaagaaaatttcttagacaaaggtgcaagtagtattgaccagttagtattcgataatgttaaaggagaatagttttgaataagaatattaaaaatagtttggtgaaaataatttttattgtttcagttcttattttgtggcaggtattatatactttgaaaatttggccggaaattttgtttccatcattaggcgatattggaaaagcttttgtaactgcttttacggaaagagaacttggaacaatggtgttacattccctttcacttattattaaaggattaattgtgggaatagcgttggctttggttttttcaagcctttcagttataagcgaaacattttacacaatctacaatatgattgtttcaatgtgcgacttaataccgggaatagctttaataccagtagcaattctttggataggcgtaggtgacggtgccataatttttatggttattcacgcagttgtgtggcctatgtcaagaagtataattgatggtttcaatgcagtgccggaattgtatttggaagtaggcagaaatataggactttcaccggttaagttgatttttggagtttttcttccggcagctttgcctagaattttttcaggtataaaagtaggctgggcaagagcgtggcgtggacttattagtgccgaaatgatttttggcggaggcggagcattgggaatcggctattttattcaggacagacgtactaacactgacattgccggagtttttgcaacaattattgttatcgtaattattggtatgatagttgagtacggaattttccgcaacatagaaaataaaacttttagaaagtggggaatgacacgatgagcaatgaagttttaaaaataaataatctggtaaaaaaatatgataattcagacagagtcattttaaataatcttgatttgactataaatgatgaagatttcttatgcattcttggcccttcaggttgcggaaaatctacattaataagatgtattgccggttttgaagactatgaaggaagcataaaagttgacggtcagccggttgtaaagccgggacctgacagaataatggtatttcaggactttaatcagttatttccttggaaaactgttttgaaaaatattacatatgcgttaaaagtaaatggaatgaaggataaggcggaaagagagcagaaagcaaagaaatacttggaaaaagttaatctggtacagtatgctaattattacccacaccaattaagcggtggaatgaaacaaagagtggcaatagcaaagggaatggcacttggttcaaaaataatattaatggatgagccttttgcagcgcttgatgcaatgacaagaaagcagttgcaaagtgaattactgaaattgaaacaaaaagaaaaaataacagttattttcataactcacaacattcaggaggcaatatctcttggtaacagaattatggtaatgtctaaggaaggaaccattaaggagcatttgtacaacactattgaaaagccggttacacctgcaagtgagggttacgccaagttatgggaacatttaaacaatcagctaacatagcattggaaaaagtacagaaaaatattataatcatattagttcaaaattgattgggagtggagctaacatgaataataacgaatttacttatataaaagaagtggcaaaacagaaaagtttctcaaaggcttcaaaagctttgggaatatcccagccggcattaagcaattacattaaaaaactggaagacagaatgggtgtattgctttttgaccgaagtatttctccaattgaaataacagagttcggcaaggcatatttggaatacgcagaggatgttatatcagccacagacagacttaatgatgttatgtcagatttgcaggatttaaaaaagggagaaataaaaataggaagtgttgtatgtttttcaacaacatatttgccgggaccaatgtcagtcttccacaagaaatatccggggattacttttaaattaacagaagaaaaagtccctgaaataatgaataaatgccttttgggagacattgatatttttctgacagatggaagaatcgatggcgagttatttgataaggaaactctttttgaagaaagattgcttatggttgttccgaaaaacctggcaattaatgaagaaataggggaataccagattccaatagaaaaattactaagtgacaaaattgactattcatcagtgaaaacattggacataagcagaatgaaggatgaagagtttgttttgttaaacgaggaccagcatgtaagacgcatggtagacagcatatttgaaaaagccggttttacacctaacgtaatattgcaaacatctcagacagtaacagggcttgccatgacacttgccaatatgggaatctctttcgttacagaaacaaccataaaatacaacaacataaaaaatcatgcatattactacaaggtaggctcagataaagatgcggttagaacaatgtgcgtggcgtataagaaagggaaatatatctccaaggcgtgcaggaagtttatagatacgctgaaagaagagttggaataaaaagcagtattatagcatacaaaagtattcaaatttacaaaaaaataatatttcggaagaaaatctgagaaaaaatctcatatattgtttacaaaaataataaatagatgatttggtaaaaaagtgaaatttattaattttgtattgtataagcgaaaacgggttctgcaaacgataggcagattttcgaaattttgcgagtataatttaaggcaaaaatcaactgtttgagccgtaggcgagttttgatttttggcttataataaatgacggagcaaaataagaaaatcaacgtgtttgcagaacccgttttcgtttatacatattaaacaaaattaataagaaccacactaatttgcgttatctttattagccaagtacagtattatatcttttcttgtgataataccaataaatacattgttgtcatccaccacaggcacgaagttctggttggtggctttttcaaaaagttcttccattgaaacctgtatgttgacagcgttgttatctctttttcgttcaatgtccgtaataggaatatcctccaactggtagatgtcaggaaaatcgtggtccttaaggtaccaaagcaagtccccttcagtaattgttcctatgtattttccttctttatctaaaagaggaatggcggaatatccgtggaactccattttttccacaacctgtctcagtgtatcgtcattgaatatatgtgacaccttttctttcggtgtcaaaaaaaataaaatgttcattaattacctcctgtaagcttcgggcaatccaggcatacccccggtcaatgcaataagggaaacattgacatttagcttcttttttaaatttttctacgccgttaattctaccaaaaaaataccaaactatccatagaatacacaaaaagttaacaataaattaagaaatctttatggattaatcaacctatgatataatgggcggtgttgaaagattttggattaaaaattaatggcaaatacattatcttaaacaaagttaagaaaatgctattgaaaacaaaatatttatcgaaaacaaaatgtttatggaaataagagggactgaaagaatgaaaaatattacaaaagaagaaatgaacataaaagagttttttgaaaaatatcctaatgtggcaattgctttgtcaggtggagttgattcagtatttttggtttatatggcaaaaaaatatgcaaagagcgtgaaggcgtattttgtcaaatctgtttttcaaccggaatttgaaaaaaaggatgcagaaaaaatttgccggcagctaggcgttgatttgaagattttgaatgtggatgttttgtcgaacaagctggttacagacaatccggtcaacagatgttattattgtaaacagggggtttttggaacaattcttgaagcagcaaagaatgacggaatgacagtaattcttgatggaaccaacgcttcagatgatgcagatgacagaccgggaatgaaggctttgcaggagatgaaggttttgtccccacttagaatgtgtggctacgtgaaatctgaaataagaaagcagtcaaaggaagcaggtttgttcgtgtacaacaaaccgtcatacgcttgtcttgcaacaagaataccaacaggtactgaaatagatgaagaaaaaatcaaacaggtagaaacagcagaaacatttttgtttgacttaggcttttctgatttcagagtaagatggatggacaacaaagccaaaatccaaatgcctgaaagccagttacaggcacttatggaaaagcgagaagttgtattggaagaattgtcaaaaatatttgatgaggtattgcttgatttgagaactagataggaataacataaaacaagacaaaaaaatatgattataagaaaggcgacattatgaaacaatcagagttgatgaatattttggatgatgttgcaacagggaaagttactaaggaagaagctttgcttgccattaaagaagagccttttaaggatatggggtttgcaaagattgatacccacagaggcatcagacagggggtgcctgaagttatttatggcgcaggaaaaaccaaggaacaaataaaagaaattgtcaagtatctacaaaaaagtggtgaggaaactgtacttataacaagaatgagcagtgaagccgctaagtttgtcagtgaagaaatagatttgagatatgatgaaatatctagggttggaataattggaccaatgcctaagaaagacggtattggaacaatagttgttgcaacggcaggaacaagtgatatgtatgttgcagaagaagcagcgttgacggcagaggttttcggcaatcaggttacaagactttatgatgtgggtgttgccggacttcacagattgataagccacgttgacgaaataatgagtgcctccgtaataatcgcaattgcaggaatggaaggcgcacttgccagtgtcataggcggaatggcagactgccctgtaatcgcagtgccaacaagcgtaggctacggtgcaaacttcggaggcttatcagcccttttgtcaatgctaaactcctgtgccagcggagtaagcgtagtcaacatagataatggcttcggagcagcatatcaggcaagcatgataaatcatatgagagcgaagtagtagggtgggagaaaacctgctctttcagaagaaattacggataattccagggaaaacacatataaaagaggaactaatatgagaattttgtatttagattgtggaatgggtgcagcaggcgacatgttgatgtctgctttgctagaacttgttccggataaagataagtttgttgaaaaaattaataatattggaatttcaaatgttaaggtgaagcttgaaagctcggttaaatgtggtataaaaggaaatcatgttagagttttgattaatgatgaagaagaattgtctgaggatgtacacaacagtgatgaattacatcatcataaccatacccatacccatatccatcatcatgctcattaccatgcaactattgattttattgagcacacgattcaaaatcttgcagtttcagacaaggttaagaatgatgtaatttctatatacaagcttatagctcaggctgagagtaaagctcacggtgtggatgtttctaaaattcattttcatgaggttggaatgatggatgcaattgcggatgtaacatgttgcgctatgttaatggaagagattaaccctgacaaggtggttgtatcgcctattaatacaggttttggaaaagtgaaatgtgctcatggaatacttccggttcccgcaccggctacagctaatttgcttgaaggaatggtttgctacagtggaaatattgaaggtgaactttgcacgccaacaggggcagcaattttgaaatactatgttaatgagtttggaaatatgcctgcaatgattatggaaaagcagggttatggcatgggaaacaaagacttcccggtggctaactgcattagagcaattcttggagaaaagacagaaaacaattcaattagggaaagtaacaatgacaccaatcaaaataatagaaccattgagaatagtgatactatccaagacaccattgtggagcttcgttgcaacattgacgatatgactgcggaagaattaagttttgcggtggaacagatttggcaggatgatgtgttggacgtttacactatgccaattagtatgaaaaaaggtcgtcagggaactttgcttaatgtaatgtgcaaagagtcggctaagaaagatgttgccgtaactatttttaagcatacatcaacaattggaattagagaatacaattgcagccgaatgattttgaatagaaagattgagaaggttagcacccaatatggaggtattgatgtgaaaaagacatatggctatggagttgaaaaatccaagttggagtttgaagatttgaagaaaatagctattgaaaataatatttccataagagaagtgaaggagaatatttaataaagacactttaggaggacaaatttatgcatatggcagacgccttgttatcaccggcagttgcagggacaatgtacgcctgtagtacagcggtggcagcatattcagttacaaaaataagaaaagaagatgatcagactaaaatcccaaccatgggaataatgggagcttttgttttcgcagctcaaatgattaattttacaataccgggaacaggttcttcaggacatttgtgcggaggaatgttgttgtccgcaatgcttggggcaccggcaggttttctgacaatgataggtattttgctgattcagtgtttgatgtttgctgacggaggtttgatggctcttggggcaaacgtgtggaacatggcattttatggatgcttcataggagcgatggttatatggcgccttgtgatgaaaaacggcgcatcaaaaaagaaaataatggcagcgtcaattattggttgcgttgttactttacaacttggagctttttcagtaacacttgaaactttggcttcaggaattacagaacttccttttactgcatttgtttcagtaatgcagccaatacatttgtgcatcggattggttgaaggaataattaccggggcagttctttgcttcgtctacgaggctagacctgaattgctttggggaattgaagctgttgacaaaaaagaaaaaatgccatacaaaaaagttttggcaattcttttggcaatggcagtaattattgcaggtggcttatcacttgtggcttcatctttgcctgatggtttggaatggtcaatttcaaaaatcacaggagctacggaagtggaaagcacaggtggaatttacaacttttttgcaggaatacaggacaagctagcaatccttcctgactatggatttaagtcttcagacacaattgccggaacatcattttcaggcattgtaggtggagtggtagtaattttactatgcgttgtgtgctgcaatttgtttaagttttttagaaagaaagcataatgggaaaatttgaaaatgcaatacacgaaatgtgtgctattgaaaatcaggctggggaagatgattttctaaataacatacatgcactggcaaaactgtttgtaacggttttgtatgtttgtatggtgacttcttttccaaaatataatgtgacaggtctggtggaaatgataatatatcccttgattatttttaaccttggggacattaaatttggaaaatgtataaaaagaatcagacttattttgccattgatttgcataattggtatttttaatcctttttttgacagaaatgttttgctgacaatgggtggagtgaaaataaccggtggcgaaatttctatggtgacactgatgattaaagggattttgacggtgattgccatttatattcttataattacaactactatagaccgagtatgcatggcgcttagaaaaatacatattcctgagattattgttatgattatccagttgatttacaggtacattaacgtgttgctaaaggaaacaaaaagaatagttgaggcgtacagccttagggcaccggaccagaaaggcattaattttaaggcttggggaagtctgccggggcagttgcttttacgaagtatagacagggcaaccgatgtgcataacagcatgagtcttagaggttacaattttaataacgtgcgaatcagaaattacaaattaagtagcagggattacgtgtggatgattttatggacactggtgattatcgcttttagagtgtaccctgtttttgaaatagtgggcggtttgtttacataaaaggacaaaaagatggagaatataatttcagtttcccacctttcttttggctatgataggaagagaaaggttttggaaaatataaattttcaattaaaaaagggtgagtcggtgggcttggttggcgctaacggcgttggaaagtctactcttttaagaatacttgttggtctaaatacaggttttcagggagatgtgatggtcaacaatattccacttgaaaaaaagaatttaaagactattagaaaaaatgttggctacgtttttcaggatgcggacagtcagctttttatgtcaactgtttttgatgatgttgcttttgcaccgagaaattacggaatgtctgaggcagaagttaatgagaaaacaatggaagcgctgaaagttgtgcacattgaacagctaaaggacaagcagatttataagctttccggaggggagaaaaaacttgcctctattgcaacaatcctgtcaacggaaccggacgttatattgatggatgagccaagcgtggcacttgatccaaagaacagacgaaacctaatcaacatattaaatcaactgaatcaggcaaaaataatagcttctcacgatttgaatatgataatggacacttgcgagagaacaatacttctttcagacggaaaggtaattaaggatggtaatacaaaggagattcttttggataaagagctgatggaaaaaagcggcttggagttaccgttagggtattaggaaagttaaaaatcagataacattttatattataaaagttaacaaattgtttacaagaaatattagcactcactgttgacgagtgctaacaaaagtgctataacataatcacagggaaaaagagagtccctgaaagaaataaaattaacaattacgactaatggaagtcgcaatatgcagtcagctaaattcacagattttgattgcagatatataaggaggtaagtattatgttagcacctagtatttttggaatgaatgatttatttgatgattttggagatgtatttgaattttcacctgcatttagaaagcaggtagtagcaactagaaatataagctcagatattaaagaattggctgacggctaccagattgaaatggaactacctggatttgccaaggaagaagtaaaggcacagttgaaagacggttaccttacaattaccgctgaacacagtgcagaaaataaagaagagaacaacgaagaaggtcagaagaaggaagccgttaaatatatccgtcgtgaaagatattatggcaagtgccagagaagcttctttgttggcaagaacgtaacagaggaagatattaatgccaagtttgaaaacggaatcttgacaatgtatgtccctaaagaagtaaagaagccacaggtagaagaaaaattcattacaattgagtaatgaaggtgaaagaacttgaataaatcttttggataaaaattaaataaggcagtagcactgcgtgttggaaacgggaattacagtaaaaaatagaaaaatcacagaatgttctgtgtaatgtaaataaaaaatatccggatagaatgtaagcttaaaatactttcttctatccggatattttattaattaatttaaaaaattcaaaccctattttttcttcttaattttcaatggcttatttttcacaacagcgctatatgagctgtagtagtattttttaccaacttttaagtaggctctcacttttacgtaatatttctttgtctttgtaaggcctttaacttttacgtactgttttgtgttgcctgaaacagtgtatttctttacgacatgcttcattttcttgtctgttgcaactctaacttcatagcctgtgcatcgtggtgagttagtccacttaaccatgattcgtctgttcttgctatatctcttagcagacttaattgttacttttgccggctttgtatacgtagtctttgctgtgcaaggtgaagatgtatatgttttgccatcagcctttaaatatgttgcaactctgtatctgtactttttagcagaagcaagtttagtgattttgtatgactttgcatctgagtttgcgatagtctttatggcttcatatttcttttttgaatagttgtaacggtaaacaatatatcctgttattttgtctacaggtgtccattttaaagtgacttttgatgttgtagtagttgaatcactaaagccggtcactttaggcataacaattttgtactttaattctctttcatctgtacagttgtttatacctgatatgtaaacctttgctgttcccggatttttattgtcagagtagcttaactgataattaatgccctctacaagttcgatatccttatatttaacagtaacagtaggcaactttcttgaaccgtcatatgtgtaacttgtcttacttaatgtgcaactaaaagctttagtgttgtacttgacacgaagaattgtaggtgtaacttcattaggattaaccatattagttgtgaagcttcgcgcaccccattgataataaacacccattattgcaggggtatcaagtgtgtaaacaccaacctttaaacctttagacaaagcaagttttacggcagcttccgtagtataatttttttctccattaaaagtaactccttcagcgttacatttaattgcgtcatttactgcatcttcatccaaaatagtactaagataagtagttgctaaagtgctgtcaatgcttttaattttcttcaaataagtgttgttaaaagaaataaaagttacacagtcttcaacgccggcattttttaaaggtttaactacttcactttcaaaatagttaggatagttaatgtcagatacgctcttaagttcaatctgccagttgacttttttgccttcggatttgtatttcttaatcaagtaaataacctggtctaatgtggcaattttaagattgctgtaagcatcaacattgttacccttagtatatgaatattttaacagttcgctgtaagttgagtctgaaatatcaacgctaacgcccattgtattttttaatgaatcgttgtgtgagataacccatgtagccttgccgtttgaatcgggcttacatcttctgatatcaagttcaatctttgaaaatcctgaagctacagccatttcaaaagccggaattgagttctccggtgcataagctgagtaacctctgtgtgcaactaagtcaaaagcatcagggtctactgttgtaggttgttcagttgtagtttcctgtggttttgtagttgtttctgcaggattagttgtagaactattcgttgtagtattgtcagttgttgatttctcagtagtagtaatttcagtggattgttctgttgaagtttcaattgctttttccaaagaatcagaagaattaaccacattagaagcagattgtacaacattatatgtggcagcttcaacttcggtagcctgtgtgtttacttcataagaatatgatgagttaaatgtgtctgccttaacttccttaggcggtgctacatatccgctcatcattgttgtaatcatagcaagagaaagaatctttgctactagtttcgtgtttttatttctttttcccatatttatatctccttttcatacaaaattgtattataacattgattgcatgatttgacatctaaatcttataaaaaatttgtgataaaaaactgttgaaaaaaaaaaaaaaatagtttatgctacttatatattccat

SEQ ID NO: 12779 - DNA, 258220 bp, Unknown
  gut microbiota DNA sequence
cagggagtatggatgtacgtagtcgaccgcctgggcaaccctctgggttacctgggtggttttttcattttgtggaatttttagaaaggtttgaaagattcttttagaaaatttcttataagttctgcaaaacaattaactatctttggagaggacagaggagttaaaatatgtttattaattctttttgcagaaaaacttcgacccattttctgcaaagagaattacattaaacagtaatcttaaattaaaaacttaaaacccaaagtaaacttaaaatcaaaattaaggagattaaaaaatgcagatgttatcacttgaaaatgaattaaaagaaaattcatatccgggaagaggaatcgtaattggaaaaacacctaatggaaagcatgctgtaacagcatattttattatgggaagaagcgaaaacagtagaaatcgtgtttttgttgaagaaggaggaggaatccgcacagaagcttttgatccatcaaagcttgttgatccaagtcttattatctatgcacctgttcgtgttcttggaaacaagactatcgtaactaacggcgatcagacagatacaatttacgaattaatggataagcagcagacttttgaacaggcacttagaacacgtgagtttgaacctgatgctcctaattacacacctagaatttcaggaattatgcatattgaagatggaaattacaattatgcaatgtctatcttaaagagcaacaacggaaatcctgaagcatgtaacagatatacttttgcatataataaccctgttaacggagaaggtcatttcattcacacatacaaatgtgacggaaatccacttccaagttttgaaggtgaaccaaagcttgtacctatgatggacgatatggacgcatttacagatatgctttggaacagcttaaacgaagataacaaggtatctctttttgtaagatatattgatattgaaacaggaaaatacgaaacaaagattgttaacaaaaacaaataattataataatcagtgtaagttttggaggaatatataatgaaggaattagaattaaaatacggatgtaaccctaatcagaaaccatcaagaatatatatggaagaaggagaacttccaattaaggttcttaacggaaagcctggatacattaactttttagacgcatttaacggctggcagttggttaaggaattaaagaaagcaacaggtcttcctgcagcaacatcatttaagcatgtttcacctgcaggtgcagcagttggtcttccacttagcgaagttgaagcaaaaatctactgggtagatgatcttggagaattatcaccacttgcatgcgcatattcaagagcaagaggtgcagacagaatgtcatcatatggtgactttattgctttatcagatgtttgtgatgtttcaacagcaaaggttatcaagagagaattttcagatggaatcattgcaccgggatatgaacctgaagcacttgaaatgttaaaaggaaagaagaaaggggcatatgcaattattgaaattgaccctaactatgtaccaaagccaattgagcataaagaagtatttggcattacttttgaacagggacgtaacgaacttaacattgatgatgatttcttcagcaatgtagttacagaaaacaaagatattcctgaatcagctaaaattgatatggctatttcaatgattacattaaaatatacacagtctaactcagtatgtttcgtaaagaatggacaggcaatcggtgtaggtgcaggtcagcagtcaagaattcactgtgtaagacttgcaggacagaaagctgataactggcttcttcgtcaggcaccacaggtacttaatcttccatttaaggaaaatatgaaacgtgcagatagagataatgcaattgatctttatattggtgaagaatatatggatattcttgctgatggagaatgggaaagagtatttacagaaaagccacctgtatttacaaaggaagaaaagcaggcatggcttgcacaggctgacggcattacacttggttcagatgcattcttcccatttagcgacaatattgaacgtgcttacaagagcggtgtaaaatatgttgcacagccaggtggttcaattcgtgatcaggatgttattgatgcatgtaataagcatggtatggcaatggcatttacaggacttagattattccatcactaaaaagcataaaatagtgagattataagagggctgtattattaacgattggacttctcctttttaaaattcttgtgtaatttaattgttttacatagcctgcagaaattttcgtcgcaaacacgttgattttcttattttgctccgccgcctattgtaaaacaaaaatcaaaactcgcctacggctcaaacagttgatttttgctttactctatgctcgcaaaatttcgaaaatctgcctattgtttgctttcaaaaatttctgcatctatgtaaaaaaagatattataagaatttcaaaaggagatatctcaccgttagtgatacagctctattttcatatagcagagttaaatataaaagggtaatataaaagggattgtttaaactctgttgacatatgtgagcctatataatataatttcaatgacattgtactatatggtgtagtacaatcctacaaaaaatagaaaatcaaagaggaaaagtatggaacgtatttacaagatattgcctaaatacgcatttattcccattatatcctgccttttattaaatagtattacttattttggaagcagaatatttacaacgggaatgcaccactatgatataagcatagccattgatagaatgctgccatttataactccgatggtatcggtttatgttttggcttatgtcacatggattttgggctttatcataataggaagagaaagcaaaaaattatgttatgaagtatgttcagcggaaatgattgcaaaactcatatgtcttgtttgctttataatgatgccaacaacattaacaagacctgaaattacaggtacaggcttttggaattggcttacctcattgatatattcaacggatgcggcggataatcttttcccgtccattcattgtcttgaaagctggatattatttagaggtgtaatgagatgcgaaaagcagggcacggcaatgaagatatttatgtttgtgtctgcaattttggtttttgcatctacagtattaataaagcagcatgttgtaattgatattatcggtggtgttttggttgttgaaataggtttattcctagcaaagaaattaaatacaaaaagaattttttatgctattgagaataaattaggtttagagtagaaaggcttggtaggattttgaagagcaataagaaacagattatatggtccttaatttttatagctttaattgttttgacagtatgggttattgtaaaacagaatgaatctttttcaatagaaggttttataaattatgtatcagctgcaaaatggcagtggatagcgttagcctttctttgcatggtaggattcatcatttttgaaggacttgctgttttacaattatgtaaggcttttggatacaaagagaaggttaagcgtggaatagtttattcagctgttgatatttatttttcagccattactccgtcagctacaggcggtcagccggcatcggcaatgtgtatgatgcaggatggaattccaggagcagtaacaacgattgttttgttactaaacttgaccttatacacaattgcgattatagttataggtgctgtttgttttatatttaattttgatatgtttaggcattttagcatttggtcaaaatatatgatacttatcggatgtgttgtccagtttgtgttattgacggtatttcttcttttggtttataaagagaagattgttacaaaaatagcaaataccggcatgaagatattgcataagcttcatctgatgaagaacatagaaaagagacaggcacatttggtcgaagtggaaagacagtataaggaatgtgcggcagcaataaagaataataaagtagctgtatttaaggcttttatatttaacctattacagagaatttcacttatttgcgtttctgtatgtgtttatatgggcgtagaaggaaatataaaaagagcgtttgatgtattttcagcacagggctatgtggttcttggttcaaacagcgttcccattccgggagcagttggtgcagcagattatctttttatagatggatttggcggtatattaaaagatcctgttagtattgaattattaagtagagggatttcattttattgttgcattataatttgtggaataattacacttggtatttattgtacaaaagcgtggaaaggaatgaagcagaagaaaaaatgttaggtttttatgattacactgttgttcttacatattgctcagtaatttcagcagtaataggaatttatgtttcacttagcggagcaggtcatccatatattggagtaatgcttttgttattatgtggtttgtttgatacttttgacggacgtgtggcacgttcaaagaagaatcgtacagagaaggagaaagctttcggagtacagattgattcattatctgacttagttgctttcggtgttttgccggtttgtattggagtggcattatacaacagagataagtttgattttattaaaacagggaaggaaagcctgttattacatattccatttgtaataattgttattttgggagcgttatttgtactgtgtgctctcataagacttgcatattttaacattacagtggaagaaacacagggagacagcgtaggcgatgacaaatattattttggacttcctgttacatcaacagcattaatatttccaacatttttgttaatgagacacattatgcttattacatgtcagattaacatttcgtatatttattatattttgctggttattgttggaatattgtatattttaaaattcaagttaaagaaaccgggaacagcaatgatttatcttatggttgctgttggtgcagttgaatttttggcagtagtgttaatgaagatttgttttggaagataatatgaaaaaagaaagttcaggaattttaagatttttatataatacagtgccgggaagaatggtacttaagataattacaagccccacaatttcaaaaattggtggggcttatatggattgtagggtatcaaaaattcatataaaaggttttataaaaaacaataatattgacatgactcaatatgaaaaagctaaatatggatgttttaatgattgctttacaagaaagataaaaaaagaaatgcgtcctattaatatggaagaaaatgcatttatcgctccatgtgacggaagactgtcagcctatcatatttcagaaaactcggatttttatataaagaagagttattattcagtggctgatttaataaagaatagtaagaaagcccctgattttaacggaggagtatgccttgttttcagattgtgcgtagatgattatcaccgctatgggtatgtggacgacggaaagatagttgagaacaattatgtgccgggagttttgcatactgtaagacctattgcattaaacagatatccggtttttgttcaaaatagtcgtgaatattctgttattgaaactaataattttggaacaattgcccagattgaggttggggcattaatgattggcaaaatcaaaaaccaccagaaatcaggcttagtaaaaaaaggtcgtgagaagggtatgtttctatatggtggttcaactattgtcgttcttcttgaaaaggacaaagttgatattgatgaaaagtatttccgaaatactgtcaatgatatagaaacaaaggtgaagtttggcagtacaataggaataaaatcaagcgattagctaatagaaagttttatcgttacattaatcctaaaattatacacgtgaataaatattcacaaatttagtattttatacttaaaaaagttaggtttaaccattaaaaatattgacacaaaatattttgtagtttattatctaacttgtgcataggaggaaagacaatggtccaaagtccgttgtcttttttctgcatataaaatttataaattagaaggagataaaagtcatgaagaagtttttagcagtagtaatgacagcagttcttgcaatgtctatgatgacagcttgcggttctagcaagtcatcaaaagaaaacaaagacacaacagcagcaaaggcagaaacaacacaggcagaaacaatcgatgcatcagaagttacattagtttctgatggagttcttacagttggagcagaaatgggttatgcaccatttgaaacacttcagaaagatggaaagacacctgaaggatttgatattgatattattacagaaattgctaagagattaggccttaaagttaatttcattaatacatcatttgatggtattttaggaaaaattggaaaagactacgacgtagtttgttcagcagtaacaattaatcctacaagaaagaaagcagttcttttctcaacaccatatattacaaactatcagacagtagtagttaagaagggtagcgacttaaagattaacagcttaaaggatcttgacggaaaatcagttggtgtacagaaaggtacaacatcagatcagcttatgtcagaatacaagtcaacaaagactattaatgtagaagtagcagctaatgacaagttattaaattgctttacacagttaacaaatggtgaaattgatgcagtagtagttgatagtactgttgctgacggtttcgtagcaaagaatcctgacaagtatgaaaaggcattttcagataagacagaacctgaagaattcggtattgctattggaaaaaacaatgcaaaacttcaggaagctattaacaaagcattagaacagatggataaagacggattccttaaggatacagcagattactggttctcatcacaggaataaaggatagaaaaggtatttatgaacactttaaaaagaattgtaaacgtaaaaggttggaaaaagaaaactaagatagttacaatcgttgtaattatcgcaataattgttgcaagtattttatcagcagttaagccaagtaggcttgaaatgattagtcaggcatcacctgagatgcagaagatgattgaaaaagatgaaacgttaacaagaaagagagtttcatctgcatataatgacttaattattattaattactcagcattttcaacttcaggtgcaacagaattaagtgaaaagtttgttggttttgcaggaaatatttataaggcagacaagggaacagcaggtattgtaggaaagatggtaaactatacatatagaatgttaggctgtggagagaatatgcttcatggtgcaaagcttactatttcacttacaacattcactgtaattcttggtgttattttaggtgttttccttgcattaggaaagatttcaaagaacagagtaattaacaagattgcaagtgcatatgtattcttctttagaggaacaccattgttgattcagttatttgttgtttattttacagtgccgggactttttggtttcgcatggagagatttcttctctgcggcagatgctgacggtgtatataaaggagctttcattgcggcacttattgcttttgcattaaactccggagcatattgtgctgaaatagtaagagcggcaattcagtcaattgacaagggacagtacgaggcagctaaggctttgggaatgaactatagccagacaatgtcattaattgttattccacagtcaatcagaagaatgcttcctgctatttgtaatgagtttattatggtattgaaggatgcatcattagtatttgctatttcacttatggatataacaactatatctaacagtattatgaatagtgatggttcatacattgtatttattccggctttaattatttacttaataattacggcattcttcacttatatatttaacaagattgagaagaagttctcagtctatgaataggaggtgcagtaatggatagtaagtatattttggaaacagaacatgttagtaaaagttttggttctttagaagtgttaaaagatatcaatttaaaggttaaaaagggtgaggttatttgtattatcggtccttcaggagcaggtaagtcaacataccttcgttcacttaaccagttagaaaagattacaagtggaaagattttcattaagggagatttattccttcatagagaaaatgacaaaaccgtagagcgtattgcaaaagagaagcagaaagaattattacttgaaatgggaatgtgctttcagaggtttaatcttttcccacacaagacagttttggaaaacattatgattgcacctattaaggttaagaatgttgataaggaaactgcaagaaaagaagcattggaattacttaaaagtgtaggtcttgaagaaaaggcagatgaatatcctaatagattgtcaggtggacagcagcagcgtgtggctatagcaagagcacttgcaatgaagcctgagattatgttattcgacgaacctacatcagctcttgatcctgaattggtaggcgatgtgttgcaggtaatgaaagatcttgcaaaagaaggaatgacaatgttatgtgttactcatgaaatgggatttgccaaggaagttgctgatagagtaatctttatggcagatggagttattgctgaagagggaacacctgatgaagtatttaataacccacagaatccaagaacacagaacttcctaaaatcaatattggaagcctaagggtttgataggaaatgaattaattagctaagaagtaataacagggctacagctttgatgatttagaatcgttaaagttgtagcctttttagttgtggtgataattgtcctttcgccaccaattatggatatttcgaggcaaagtgctgtaaaaatccgtaattatacgtatgaagagttatctacaccgtaattttctttttcattggtatttgtgcaagcacaattgccacaaatataaatatacatccgaagatttcccttgcggacattgtctggcccagtattatccagccggcaagtacggagaatacagattccatactcataagcagtgaagccactgtagggtgcaggcctttctgaccaactatctgaagtgtataggcaacaccacatgacaggacacctgcgtataaaagaagtatccagttattaattgaagtcagattgtgtaggcaattcattatacctgcaatggaatgtttcatatcaacgaagaacattggaattgatgtacagattgcacttgtccaaaactgaatatatgacaggcggatgccgtcaacaagcggtgaaaagtggtctacaacaagtatatgtattgaaaacgcaagagcgcacaaaagtaacaatgtatctgcgaatgttaatgaaaatgaaccatgtatgcataataaataaagtccaaccagtgaaaagcaaactccaatccaaatattcaaaccacattttttgccgaagaataaaccaagtatcggaacaataattatatagcaagctgttaaaaaaccggcctttccggctgaagctccgaaataaagtccaagttgttgaatattacttgcaataaagagagctataccacaggaaattcctccaataattaaggtctttttttcttttttagtcttaggtttcatataagtaagaccggtgtgatctaagattttgatagtaggtagcaaaacaataccaccaataaaagctctcagacaattaaatgtaaaaggaccaagggcattgccacctgaatcctgaactacaaaagcaattccccaaataaaagctgtaagaagtaaaagaaaagagttttttagtttaagcgaattcataattttttctccaaatgtaaatttaaaaattatatttttgtaaataaaatatttgaaaatgttaaaagaatcaataagattatcaactcatgttaataaaatatatatgattcggtaggattgtgagagcgcaaagcaggtcacaatttatgcaataaagatgtggggcgttttgacacccatatcctagtataaagaaattacaaaaaaaggcaacacaagaattaccaccattttttctttttgaaaattatacataatattcctacaaccaatacacttatgccaaatagcaaaggatagccatatttccaatgaagttctttcatgtattcaaagttcatgccgtaccagccggtgattaacgttaaaggcataaaaatagtggtaacaattgtaagaaccttcataatattattttgattaacagaaagtttctgctgataaacatctcttatttgggacgtgtattcccatatttgttgagactcattgcttaaagtaagaatctggtcgcaaagattttcaagtagctctttgttggcatcattcataaaagttttctcttttgaaagtgcccgacatatatccataagaataatataatagtggtgaagtctaagtgagtttccgcgaaaagccagaatctggtcggcgttatagttataattagaggagtcggtaagaatattaagttcaagtacagacagattttggctaatggaattaaggttttcaaggtcatgtttcaaaatactttttagcataaaataaataaaatcttggcttccttttatttcattaatattttcttcaataatgttactgaaaatatcagtcaaaaaattatcgtaatcaacgaaaagaatactgcgcccattataaataaaagaaaaatttttccgttcttcctgaatgcatggaatggaaatgcaacatacaatggtatctttaaaaaaaataatttttgaaaaattaaaatcaccaataacagttttgaagctgtcaacataattcctgacactgccagagttggaaatattaccggaattattagaaaaaatattatcattcatagaatttgtgtcgatactgcaagagagtttgttaatatcacttgcaagcacaagcccggcgtagttttcattaatggaaaaagtattcacttgggatttggcagatatatcaaagaacataagaactcctatagtttaattaaatatttaacaatatatagatttgccaaaagtatacatttttattacaaaaaggtttataatagtaattgcgaaatattgaaaggcaggcgtttgtaatgaataaggcagaacagttagtaaaattattaatagaaaaaaaatatacagtttcttttgcggaaagttgcacaggtgggaaaatggcagcaagaatagttgatgtgcccgacgcatcaaaggttttgaacgcaagcattgtaacttatgcaaatgaggcaaagatgaagtatgccaatgtttcaaaagacacgctgaaacagtacggagcagttagtgaaaacactgcaagagagatggctgaaggcgtggcaaaagctaataatgcagatgttgcagcaggaatttcaggcatagcaggacctacaggcggcacggaggataagccggtgggaatggtttgctttggattctatatagacggaaaagttttttctgacacaaaacatttcggaaatattggaagaaacaatgttagggacgaaagcgttgagtatgttttggatgtgttaatcaaagaattgtcataaagggattacaaaaacgattataaaaataattataaaagtaataataaaaaatcagtatataggacgaacatgagcaaatcactaataacggtatttgccaaatgccaaaaatgtgttaaaatcgtcaggtatacactttatatcaattagggtgaaaatgcctgtaatcatatcattatgtatgaaaatccgataaaaacatattatagggtataaaataaattaaaaacagagggtgttagtatgccaataaaagttaaacaaaatttaccggcaagagatattcttgaaaatgaaaatatatttgtaatgacggacacaagagcaatgactcaggatatccgtccgttgaaggtgttggttttaaatcttatgccaacaaagattgtaacagaaactcagattcttagaaaattatctaatactccacttcagatagaagttgagtttttgcagacagttacatatcagtcacagcatacggatgagtcacatttaaatgaattttataagacttttgatgatgttaaggacgattattatgacggacttgtaataacgggtgctccacttgatttcgttgactatgaagatgtggattactgggatgaaatatgtgagataatggaatggtccaagaaacatgtacattgtacattccacttgtgttggggagctttcgcaggactttactatcattatggaataagaaagagagacaggattcctaaactttcaggaatttacgaacataaattattaaataagaagtcacctttgtttagaggttttgatgatgtgttttatgcaccacagtcaagagctacagaggttacaagagagcagattcttaatgagcctgaacttgagttaatggctgagtcagatattgcaggtgtaacaattgtaaaatcaaaagacagcagacagttatttgttttatgtcatttagagtatgatgcagatactttgaaacttgaatacgaaagagataaggctaagggaatgaatccagaagtaccatataattattttcctgatgatgatccgacaaaagagccggttgtaaattggagatcagcaggacagttgctgtggactaactggattaactattatgtttaccagactacgccatatgacattaaggaagttgaaaatgagtaaatcaataaatataaataattggttaataaaatagtttaatcagaaaaattattttaatatattatatagaaggtctttgactataagattttgaataagaacggagataaatatggttaaaattatagcggacagcacatgtgatttgtcagatgctacattaaaaaaatatgatattgatatgttgcctttatatattcatatgggtgaaaacgaatacaaggacaggttagaagttacagttgaggatatttttaaatggtctgatcaatacaacactacaccaaaaacctcagcaccttcaattgaagatgcgcagaatgccattattccatatatggaaaagaatgcagatattattatgtttgccatttcagaagatatgtcaacaactgccaatgttatgcgacttgctgcagacaatcttgaatatgaagaccatgtatttgtaattaattcagaaagtctttctacaggaataggacttttagttgtggaagcagcagttatggcaaagaaggggatggaagcaaaagagattgttgacagaatcgaatcacttaagccatatgtaagagcaagctttgttgtggatacacttaaatatcttcatagaggtggaagatgctcagcaacatcagcccttgttggtagtgtgtttaaaattaaaccacgtatttatgttgaaaacggcaagatggatgccggaaagaagtatcgtggcaaaatcgaaaaggtaattctccagtacgtacatgaaatggagaaggatttgaaaacggctaagagagacagggtttttattactcaatcaggatgctccacagaagttgtaaagtcagttaaagattatcttaaaaatcttaattactttaaagaaataataattacaaatgccggaggagttatttcaagccattgcggtccgggaactttaggcgttcttttcattgcaggtgggactaagtttggaccttacgataaacagtttgacacaaacaaaaacggtataatggaagatgacgagagaactgaggaggctgcatacattcgtcatatggttgagcaggagaatattgaaaacagtcaggaagatgacagtgacgatgaatatgaaagacaatatgacaattaaaaatattttttggattcaatcattaacagtttgcctaatattcttttgaaaaagattgtataatatgcctatgacattttttcactaagaagagtataatactacttggaggaacgcagagactacgtttacgtctttgcgttttctttgctctttaggatgtttttagaagtagaggtgacataatgtttaacaaaggagaatatattgtacatgggagaaaaggagtatgtaaggtagaggacattacccatttggacattgacggcgcagacaagaagagtctttattatgttttgattccaatgaagaatcaggatagtaaggtattttatccaacggacaatgataaaataccaatgagaactattcataccaaagaccaggttgaagagattgttgagcatattaatgagattgagcctatttggatagacaacgaaagacagagagaatataagtataaagaagtaataggatcttgtgattgcaagcagttaataggaattattaaaacattacataaaagaggacgtagtagacttgctcacggcaaaaagattacttatgtggatgagaagtatttaagagaagccaaggaagtgttatatgatgagttctcactggcacttgatatggataagtcacaggttgaaaattatattataaataatattaatgaaagcgataaagctgcagaataaagagataatctgataattgaattgcaaatgctaattgttatgataaagttacaaataaggaaatattaagtcggggaacagattagccaatataaataattatgcaaatgacaatggtcgaaagggctgttgtcattttttacttgccaaatatagtaactgtgaattataattaactagatttgtatgcgcttttttgttaaaaaaatcacaacgttaggtgtatgcaataaaatattaggatttagcgttatactaataagagcaaaaagaatagcagaaggtgttagacatgaaaaaaaaagaaaagactaatgttatgagggttcttgacagtaaaaaaataaaatacaatgagtattattacggcgacacggaggcagtaagtggtgttgatgtggctaaggctttgggacagaatcctgaaaatgtatttaaaacattggtaacaacaggaaagtccggggagcattacgtttttatggttccggttgcagaggaacttgaccttaaaaaagccgcaaaggcagtaggtgagaagtctattgtaatgcttaagtcgaaagagttgcttggacttacaggctacattcacggtggctgttcaccaattggaatgaagaaattgtttaagacaataattcataagacagcaccggattttgacactatattatttagcggtggaaaaataggatttcaggtggagataccatttgaagatttgaagaaagtaataaatgttaacacagcagatataattgtagaagctgtttaaaatctaataatatattaatgacaaatgttattgaggtattaaaggttttataattggaaatacataaatattaacagagcagatataattttaaattctgtatgaaacacaaggaggtaaaagatgttttgtaaaaaatgcggaaagtacatacagccgggccagaatttctgtccaacgtgtggaacaccggtggagaacaataacaccgaaagtatgggggacacaaaagttataccagggcttaataatatggaagatatgggagatacaaaggttatccctaatcttaatgaattagaaaatcagaaatcttttggaaataacacaaactcatttgacaatattgacgacagcgattttcctgaagaaatcgaatatgttgaagacaaaatcgaagggtttgattttccggaggaacctgaagaagaatttgaatttgattcagacgaaaatgaagaatatgtagttgatgatgaagatgaaatcgataagtcaatgattacaaatgagaataagaagttaaacattattgctattgtagtttcagttgtaattgttatcggaattgtaattgcagcaattattcttacaaaatcatttggaaatgataacaataacaacacagttgaaacaacagtagaagtaactacaacagatgatagcagtaatgatgaaacaacagatgctgtaacagatgacagcgatgacgacaacaatgataatgccaattacacaacaacctacgaaaagagtagtgatgaaacaacaaagaaaaaggtgaaagaaacaacaaagaaggataaagcgccaacaaagcctaagacaacaaaagcaccaaaggctacgccaaagcctacggaagcaccaaaggcaacagaaccacctgcaacagaaccacctgcaacggagccaccagtaacagacgcttcggcagatgagaaggtagagtaaataaaagatccgccaggctgataaaacacgcaaaagtgttaataaatccggcggattttttgcgtgaagattactacttttgtttattttattaaaaaatcactttactttttagtaaaaagtcccagttgttccagtaaaatagggacttccctttttttaataatttagtataatagagtggtacagtgaaatatatattgagacaggagataaaaaatggagaaaaaaaatgactttaagccatttatccccgcagacaaggtattacctgagtttacagtaacttcagtaattcttggtatgatcttggcggttatatttggtggcgccaacgcttatctcggattaagagttggtatgactgtatcagcctcaataccggcggcagttatttcaatgggtgttattagagttattatgaagaaagactcaatccttgaaaataacatggtacagacaattggttcagcaggtgaatcattggcagcaggagcaattttcacaattcctgctatttttatttgggcttcagaaaaaggaagcggaattagcacaccttcattcgtttcaattgcattaattgcactttgtggtggtattttaggtgtacttttcatggtacctcttcgtacagctcttattgtagaagaacacggaacacttccatatcctgaaggaacagcttgtgcagaagttcttttagcaggagaagaaggtggaagtaagtcaaaagttgtatttgcaggacttggaattgcagcagtttataaatttattgcagatggtttaaaacttttccctagtgaagttgatttttcaatgcagggcgaatacacaacagcagtaggtatggatgttcttccagccttagcaggtgtaggttacatttgtggtgttaagatttcaagttacctttttgcaggtggtgtgttatcataccttgttttaattcctgcaattgcttacttcggtggcgaatcagcatcaaaagttgttgatgatgccggaaaagctattgcatttaataagttgtcagcaagccagatttggagcaactatacaagatacatcggtgcaggtgccgttgcagcaggtggattaattagcttaattaaaacattcccaacaatgattagaacatttaaacatgcaatcaagggatttggtaagaagggtgacagccagttaagaacagaacaggatatttcaatgaagttagttcttggtggttcacttgtaattgcagttttaatctggttacttccagagattcctgttagcttcctgggagcacttatagttgttgtatttggtttcttctttgcaacagtatcatcaagaatggtaggtattgtaggaagtagtaacaaccctgtatcaggtatggctattgcaacattaatcgtaacaacatttatcttaaaggctacaggcagcacaggtgcaacaggtatggtatcagctatttcaatcggtacagttatttgtatcgtagcagctatggccggtgatacttcacaggatttaaagacaggttacatcgtaggtgcaacacctagattacagcagattggtgaattaattggtgctattgtatcagcttttgcaatcggtggagttatgtaccttcttaactcagcatggggatttggttcagaacagattcctgcaccacaggctacacttatgaagatggtagttgaaggtgttatgggtggtacattaccatgggtattaattttcatgggtgtatttatcgccatcgttgttgaagttcttggaatccctgtattagcattctcaattggtctttacttaccaatttacttaagcacacctattatggttggtggtgttattaagtggtttatcgataacaagagaaaatatgctaatgatgaagaaagaaaagacgcatcagaccgtggtgtactttatgcagcaggtatgattgcaggtgaaggtatcgtaggtatcgttcttgcaatattagcagttgttaacgttgctgataagttaaatctttcatcattatatggtgaaagtggagctttccagacagttggtaactgggtaggattaattgcatttgtattattactttcaacattattccactttacaaaaggaaaaaagactatagaagtggacgcaaaagaaaaataaaaaaataaaaaaaatatgtatttcagtgagaaaaaggcactgctgcaattatgcagtagtgctttctaaataaaaatggagagttcatgaaagagaagaagaattatattgataacattcccagaattaatgatatgaaatgggaagttttagaggatggaatagtagaaatcacagtagaaaataccggattttataataaagtagcacagagattatttaagaagccacgttacagttttattaaattagatgaatatggaagttttgtgtggcagcagattgacggcaaaaaaagtatatatgaaattggaaaagaacttggaaataagcataagggtgcttcaaatcagttatatgaaagactttcaaaatattttggaatattagaacgcaataaatatattgtttttgaaaaataaagccttaaggcagtgaaaaggataaaaaatgaaaccatcaacagtaattataggtataattttatttgccatagtaacaatgattatatatggctggggaatcgtaaaacaaaaaaatcaaacaaaggatttaatgaatttgctttttagcaaaggacaggataaaataaaaaagtatttaaaacagaatgaatacattacaatatcgcaagttgagcagatttgtgatgggcttgaagcaaaacagcctttttcgcaaaacagggctgttgtaaagaataagcaggactacgcaaagaagcttatagaatatatgctaaagactaaccagattgaaaaagaaggtagccgttataaatggcacaagaaataaggaggacattatggcagtattatcagagttagaaccaaacaaagtgtttaaatattttgaggagatttgttcaattcctcatggttcaaataatgtaaaacagataagtgattatcttgtagattttgcaaaagcacataatttaaaatgcagacaggatgatgatttaaatgtaattatttggaaagacggatctaagggatacgaagattcagaacctgtaattcttcagggacatatggatatggttgcagttcaggaagctgattgcaagaaggatatggaaaaagaaggattagacttagaaattaacggagatttcatttcagctaagggaacatctcttggtggagatgacggaattgcagtagcttatacattggcagttttggatgatgaagaaatggctcatccaccagtcgaagctatttttacagtaaatgaagaaattggtatgcttggtgcagcatcaattgatgtttcagaccttaaaggacgtctttttatgaatatggattcagaagatgaaggcgtgtttacagtaagttgtgccggcggtgcatcagtaatatgtaagatcccatacaagagagatcttgttaacgctcctgtaatcgagattaaattacacggtttcacaggtggacattcaggtgttgaaattattaaggaacgcgcaaattcaaactgtgcaatggcaagagttcttcttaacgtattccagaatgttggtatgagattagtttctgttaacggtggtgaaaaagacaatgctatatcaaaattaagcgaagcagcaattgttgtacttcctgactcagtagataaggctaaaaagattatcgaagatacttttgcagacattaaggaagagtacagggttacagatcctgatgctaacttaactttaaatgtaagagaaccagatatggttgatgcctttacagacgcagctacacttgcaacaattattgcaatggttaatatgcctaatggagttcagagaatgaatcctgaaattgacggtttagtacagacatcacttaatatgggaattttaagaactgaaatgttagaagttaagatgacatttgcagttagaagttcaagcgaaacagaaaagcagtacttaattgaaaaattaaaatcccttacagaaatctttggaggaagcgtagaaatagtaggaccttaccctggatgggaatataaggcagattcaagattacgtaaggtaatggttgatgcttacaaggatttatataatggtgaagaacctgttgtagaaggaattcacgcaggacttgagtgtggaatctttgcatctaagttacctggacttgatgctgtatcatttggaccacagatgaataatatccatacaacaaatgaagaattaagtatttcatcaacacagcgtacatgggagttagttgttaaggcacttgcagcgttgaagtaggcaggaagcgttaatgtcaaagctgggtgtttccagataaataagaattttttaaagagcggatgtttcagttgagcatccgttttttttgaaaaaatcatctgtaatgacagaactttacagattttcttcatatgtatttacaactgtcttgtcagttctatatgtttgtgctatactaagtggcaatgtagaaaaaatatggcaatttaagtccatatagaacattaggaggaagaaatgcaaacagatgttttgatagtaggcagtggttgtgcaggtttatattgcgcacttaatttgccgaaggacaaaaatatattaatgataacaaaggatatagtagaacatagtgactcctatttagcacagggtggaatgtgtatgcttaaagatcctgatgattttgacagttatttttatgatacaatgaaagcaggccattttgaaaatgatactgcagcagtagaaactatgataaaggaatcacctgatttggtgaaagaccttttaagttatggggttgattttcagagagatgaagatggaaatcttgcctatacaagagagggcgcccatgccagaaacagaatcgtttatcacgaggacattacaggcaaggagattacaagccatttatacgagcagtgcaagaaacttgataatcttacaattaaggaacactggacaatggtcgatttgttaactaaggacaattgctgctatggtgttgttgtaagaaaggatgacggttcacttgatacaataactgctaattatacagttttggcttgtggtggaatcggaggtatttacagatattcaactaattacagacatttaacaggtgatggtattgcagttgcaattaaacatggtgtagaattaaagaatgtaaactatgtgcagattcacccaacaactttttattcagaaaaagaagaggacagaagtttcctgatttccgagtctgtaagaggtgaaggtgccaagttatataacaatagtaaggaaagatttacagaggaacttcttccaagagatattcttacgggaaatatcagaaaggaaatgaagagagaaggcagcgaacatgtatggctttcaatgaagactattgatcctgaacagttgaaggaacacttccctaatattgttgaacattgtaaagaacacggatataatgtgcctgatgaaatgatacctgttgttcctgctcagcattattttatgggaggaataaaagtaaatcttcagagtaagacttcaatggatcagctttatgcaattggcgaaacagcctgcaacggagttcacggaagaaacagacttgccagcaactcattattggaaagtatggtttttgccaagagagctgcaaaagaaatgacagcagagtttgataagactaaaacaaaaagctttgacaatgttgatttcacaccatatgaagacaagaagaagcttgaagaagaatacaagcagttaattagagatgaaatcgataaagaaaatgcaaaaatgaatgataaagaaaaacaggaaaattaatcttcacaatgcttaaaaaattgaaagattatttgaaaaagaccgtgaaattatttgaaaagtcgataaattatttgaaaaacataaaaaattatttagaagactaatggaaatttaacataaaaactgggaggaaaaatataaaatgtttgatccaattacattaaaattatcagtagatccacttattttaagtgcattaaaggaagacgtaacaagcgaggacgtaacaactaattcagttatgagagaggcttgcatgggacaggtagaccttatttgcaaggaagatggagttatctgcggacttcaggtttttgcaagagcttttcagttattagatgaaaatgtagaagttgatttgttagttaaagatggcgaccaggttaaaaaaggtcagcttatgggaactgtaaaaggtgacatcagaattcttttagttggtgaaagaacaggacttaattatcttcagagaatgagtggtattgcaacatatactaattcaattgcgaaattattagaaggcagcaagactaagcttcttgatacaagaaagacttcacctaataatcgtattttcgaaaaatattctgttagagttggtggcggaaataaccacagatacaaccttacagacggtattttgctgaaagacaatcatatcggtgcagcaggtagcgttgaaaaggctatccagatggctaaggaatatgctcctttcgtaagaaagattgaagtggaagttgaaagcttagatatggtccgtcaggcagttgaagccggtgccgacattattatgttagacaatatggaccatgatgtaatgaaggaagctattgaaataattgatggaagagctgaaattgaagtatcaggaaatgtaactaaggaaaatatttctaaattagtagatttgggagttgattatatttcaagtggtgctttaacacattctgcacctattatggatatctcattaaagaatcttcatcgtatttaatagaggtgagaaatgggcggagaaaaaagaagagagaatctattaaaaattttacaggaaagtgaaagtgcagtatcaggaacaaaacttgccacaaagtttcaggtaagccgccaggttatcgttcaggatatagcattacttcgcgcaaaaaatcacgatataatatcaacacacaaaggctatgtacttctggacaaaggaaacattcagagagtttttaaggtaaaacacagtgccgaaaagatgcttgatgaattaaatcttatagtagattgcggtggtaaagtggaagatgtattcgtataccacaagctttatggagtaatacgtgttgagatgaatataaaatccagaatggatgcaaagagatatgttgatggcataaaaggaggtgtttctgttccccttgaacaaatcacctcagaataccattaccatacagtaacagctgacagtgtggaaacattgaacataatacaggaccggttagacaagcagggttaccttgtggcactaagagactacgagcctgtagacttctggagtaatacagaggcagagagttagaaaaattttcggttggcaagaatataataatatataagtgaacaacaacaaatcaagctggaaatagcatttgtaattgttagtaaataaaatattgattaatatggttgctccgttggaatattggagaatgttccggcggggcagcttttttaaatgattgtagtgtgagtggtgtaatggtaggataggtatagtggtagccatagaaaagccggattcattatgaatccggcgtataaattcatatatttaattagtacaattctaatccagggatttatttctgctttcctttttcgattgctgcatttacaaatcctaagaataaaggatgtggtctattaggacggctctttaattcaggatgtgcctgtgttgcaatgaagaatggatgtgaaggaatttcaatcatttctacaatacgtccgtcaggagagatacctgataacttcattccctttgaggtaagggcttctctgtaatcgttgtttacttcataacgatgacgatgacgttcatgaattaattcttctccatataatttataagcaagactttctgtatccaagtgacatggataagaaccaagtcttaaagttccaccgatatctgtaataccttcctggtcaggcataagactgataacaggatgtgtagttgcaggattaagttcaatactgtgagcatcatggaaaccaactacatctcttgcaaattcaacaattgaaagctgcatgccaaggcaaagaccaaggaatggaatattgttctctcttgcatatttgatagaagcaatcttaccgtcgataccacggctgccaaaaccacctgggacaagaatacctgaaacatcactgaagatttcagcagcattctcatcagtaacttcttctgagtcaacccatttaatattaacagtgcaacggcttggataaccggcatgttttaaagattcaacaacactaatgtaagcatcatgtaatgcaatatattttccaactaatgcaactgtaacttcctgaacaggatgcttagctgcgtcaaccatagccttccattcgtcaaggtcaggttcaggacaatcaagctttaagctctggcaaacaatttctgcaagatgttctttttccattgcaagaggagcttcgtaaagcatatcaactgtaaggttctgaacaacgtggcttgcaggaacattacagaaaagactgattttgtctttaagattgtcgtcaatttcgtattcagtacgacaaacaactacgtcaggctgaataccaagtctctgtaattccttaacactcatctggataggtttagttttcatttcttcagatgcaggaagataaaccataagagctacgtgaataagaatacaattctcacgtccaacatcatgctggaactgtctgatagcttcaatatatggctgtgattcaatatcaccaactgttccacctacttcaataatagcaatttcagtttcttctgaaagactgcggtgaaaacgacttttaatctcgttagtaatatgcggaataacctgaacagttcctccaccaaaatcaccatgtctttctttttcaagtacagaccagtaaaccttaccggttgtaacgttagaatttcttgttaaactttcatcaataaatctttcataatgacctaaatcaagatcagtttcagcaccatcgtctgtaacgaaaacttctccgtgctgaatagggttcatagtacctgggtcaatgttaatataaggatcaaacttctgcattgttaccttgtaaccacgagctttcaaaagacgacccaaagatgcagcagtgataccttttccgagaccggaaacaacaccgcctgttacaaatacatattttactgccatgagacattcctccatttgtataatacactatgatgtttagtagttttggggctaaacatcatctgaacataaaaattcaccttactagtgtactacaatcaaaaaattaattccataggaatgtaaaaattttaaaagtttaaactttttttatcaaaaattcacattatttacaaagtatatggtatattattaaagtctaaagatatacataaaagatatgcagaatgtaaagaaagggaagacttgatggataataatactaatagaaatactaataggaataatccgaaaaacgatagggataacaagaatcaaaagaaaaatcaaataataggcatagtggttgcacttgtagccgcatttctttttacaacattaagctcatatatagttgattcaatgactaccaaggagattagttacaatcagtttatagctttgcttgaaaataataatgtggaatcagttgttttcaataacaataagatagaaattacacctaaagataataatggaaacattataaaagtaagatattggacaacagaattaaatgaccctgaacttattcaggaattaaaagaaaaatatacacaggtaaaattcaaaggagaacagcagagtagttcgtcaaactttttgcttattttgcttgaatgggtattaccttttgttatgttttatgtattactgacatttataatgaagaaagcaggcggtggcgcaggcggtggagtttttggtgtcggaaagagcaatgccaaggtatatgttcagaaggaaacaggtgttacgtttaaggatgtggcaggtcaggaagaagctaaggaatcagtagttgaattggtagatttccttcataatccgggcaaatatacagaaatcggtgccaagcttccaaagggagcattgttagtaggaccgccgggaacaggtaaaacattgttggctaaggcagttgcaggagaggctaatgtgccatttttctcattgtcaggttcagactttgtggaaatgttcgtaggtgtaggtgcttcaagagtaagagatttgtttaagcaggcagaagagaatgcaccatgtatcgtatttatcgacgaaattgactcaataggaaagagcagagactcaagatatggcggtggaaacgatgaaagagaacagacattaaatgcacttttggcagaaatggatggttttgatacatcaaagggtattttaatacttgctgcaactaacagaccggaagtacttgatccggcacttttaagaccaggacgttttgacagaagaattattgtagacgcacctgattttaagggcagacttgaaactttaagagttcattcaaaagatgttaaattagatgaaacagtagatcttgatgctattgcaaacattacaagtggtgcagtaggttcagaccttgccaatatggttaacgaagcagcaatcaacgcagtaaaatgtggtagaagagcaatttctcaggctgacttaatggaagcagttgaagttgtaattgccggaaaagaaaagaaagatagaattctcagcaaagaagaaaagaagatagtttcttaccatgaagtaggtcatgcattagtaacagcattacagaaacatgcagaaccggtacagaagattacaatagttccaagaacaatgggttcattaggatatgttatacaggcgcctgaagaagaaaaatatcttatgtcaaaagaagaattaaatgcaaggcttgtaacattccttgcaggtagagcagcagaagaaattgtatttgattcagtgacaacaggtgcatcaaatgatatggaaaaggctacaaagatagcccgctcaatgattgcacagtatggtatgtcagaaaagttcggcttaatgagtcttgaacaggttgaaaatccatacttaggcaacagaacaacactcaactgtagcgataagacagcaacagagattgaagaagaggttaagattcttcttaaagaaaaatacgaagaagctaagaagcttcttagaaataaccgtactaagcttgacaagattgcaaaattcttatacgaaaaagaaacaatcacaggcagggaatttatggatatttttgaacagtgcgagagagaagaagctgaaaaggcagaagcttctaaaacacagaatacagaaaataatgcaaatgcagaaaatttagatacacagaatacagaagcatagaatgcaggtaatttagaaactactgaaatgtagaatacagattgtttgttcaaaaacaaacagcacaaagattattaccggatgactatatgaaagctgacacctttgattattcaaagttgtcagctttcgtaagttagtctgtagaataaatacgattttataaaagcaggtagaacaatgggtgaatttaattttgcggaagaactaaaaaaaatgccacagacaccgggggtgtatttaatgcacgatgcccacgatgatgttatttatgtgggaaaagctgttaatcttaaaaggcgtgtaagctcatattttagaaaaagcacaaaaagaacaacaaaaatagaatccatggtttcaaaaataagaaggtttgagtatattcttacagattcagaacttgaagcattaatacttgaatgtaatctgattaaagaatacagacctaaatataatacaatgcttatggatgacaaaacatatccttatgtaatgattacagtaagtgaggattatccacgaattgttttggcgagaaggatgaagaaggacaataataaatattttggaccttttacaagtagtgcagcggttaaagacaccatagatttgttacagaaaatgtatcaaattagaagttgcaacaaggctattgtaagtgatggcacatatactgctgatggagaatataagaatattccaaagattaatggaaggccttgtctttattatcatattggacagtgcaaaggtccctgtcagggatatatttccaaagaagattacagggaaaatattaataaagccattaaattcttagaaggcaattacactcagacaatcaaggagctggaggaaaagatgcaggaggcatcagctaatcttgattttgagaaagcaatggaatgtagagatttgattaatagcattaatcatgttgcgggaaatcagaagattacaactcatcagtttgaggatagggatattattgcttatgcagaggaaggaaacgatgcagttgtacaggtgttttttgttagaaatggtaagcttatcggccgtgaacatttttatcttacaactgtcccgggagataccggcaaagatattcttacaagtttcataaagcaatattatattggaacgccttttattccaagggagcttttggtgcaggaagaggtggaagagccggaacttttgtcacagctccttagcagaaatcagaattatacagtaagaattgtaaatcctaaaaaaggaagtaaggagaagcttgttgaacttgcagcaaagaatgcaggcaatcttttggaacaaaataaagaaaaatatagaagggaacaaaaacgtactgtaggtgcagtggaggaaatagaggaacttattggtattacgggaatccatagaatggaagcctacgatatatccaatactaacggttacgagtccgttgcatcaatgatagtttatgaggacggaaaaccgaagcgtaataattatagaaagtttagaattaagtctgttaagggtcctgacgattatgccagcatgagagaagttcttacaagaagattccgtcacggaatagaagaacgtgaaaagcttgatatggaagaaaaagactacaaacttggaagtttcagtaacttcccggatattcttatgatggatggtggaaaaggtcaggtaaacatagctcttgaagttttggacagccttaaccttcatattcctgtttgtggaatggtaaaggacgataaccatagaacacgaggactttattacaataatgaggaaattcctatagcaaagaattcggaaggattcagactgattacaagaatgcaggatgaaactcatagatttgcaatagagtatcatagaagtcttagaaacaaaaaacaagtacattcaatacttgatgacattcctggagtaggtccggcaagaagaaaggcattaatgagagaatttaaatccattgaaggaattagggaagctacagtggaacagcttagtcaggttgatactataagcgaaaaagtggcaaaggacatatacaaattttttcattaattaatatatacaaaaaaaagctgtaatgttaaaataatgtatgacaatgaaaaatggtcgtgaaaattatacttgtagcgaaaggagcaaatttatgaaaaaaattaaatttacaaaaataatagaaaactacaatttaaagaattatatacctgaaatagatacggataagatttatattaatactccggaagttaatagaccggcgttacagttagcaggtttctttgatcatttcgataaggaaagagtacagattcttggaaacgtggaatatgctttcattgatagtatggaaagacagaacagactttgggtgtacgaaaagttaatgagtagtggaattccatgtctgattttatgtagagggcatgaagcagatgatgatttgattgaagcaggaagaaaatataatgtacctgttttaatgacagaatggactacatcaagatttgatgcagaacttacaagatggcttaatgttcagcttgcaccgtgtattacaatccatggtgttttggtagacgtttatggtgaaggtgttttgattatgggtgaaagcggaatcggtaaaagtgaggcagcccttgaattaattaagagaggccatagacttgtaactgatgatgttgtagaaataagaaaggtaagtgatgaaacattaattggtgcatcacctgaaattactaagcattttattgaattaagaggtattggtatcatagatgtaaaggctttatttggtgttgaaagtattcttgacacagccaatattgacatggttattaagttagaagaatgggatagaagcagagaatatgatagacttggaattgaagataattacacagaatttcttgggaataaagtagtttgctattctattcctatcagaccgggtagaaatgtagcagttattgttgagtcagcatcagtaaaccacagacagaagaagatgggttacaatgctgccaaagaattatataaacgtgtaactgacaatcttatgaagcagaatgacgaggaggaataggaaaaaattatgaaaaagtattgttttggagttgacgttggaggaacaacagttaaagtaggactttttacagtagaaggtcagctccttgataagtgggagattattacaagaacagaaaataatggtgaaaatattttatttgatatatgtgaatcattagaagctaagttagacgaaaagtctattgatttagatgaagttaagggaatcggcattggtttgccgggacctgttttagatgacggaactgtattacagtgtgttaacttaggttggggtaagtttaatgtatcagaaaaaatgtctgaaatgttccacggaatagaggttaaggcaggcaatgatgccaacgttgcagctcttggtgaagcgtggaaaggtggcggaaaggattttgatgatatcgttatggttacacttggaacaggtgtaggcggaggtgttattttagaaggaaaaattcttacaggacataacggtgcagcaggcgaaatcggtcacatgcatgttgaagatggtgaagaacttaactgtaactgcggcggttgcggatgccttgaacagtatgcatcagctacaggtgtagtgagacttgcaaacagatatattgcaaagaatagtgaatcaactaagatgacagaatttggtgaagacattacagcaaaagatgtttttgacttggcaaaagaaggagataagggtgctgtagctgttgttgaacagatgagtacatatctaggaaaagccatggcaagtattgcaacagtagtaaacccacaggcatttattattggcggtggtgtaagtaaggcaggccagtatcttattgatgccattgcagatgtttatgttaaatatgctttcccagcttgtagagaagcaaaaattgctcttgcagaattaggaaatgatgcaggaatttatggtgcggcagcacttatagtataaaaagtaactagaggttttaggaggattcaatggataacgcattcatagaaaagattaaagaagtagttggagaaaaatatgtaaaagagaatgagagcatggcatctcattgtactttcagatgtggaggaaacgctgaattatttgtaactccgggcagtattgatgagttaacacaggttgtagcactttgtagagagaataatgtggaatttcttgttataggaaacggaagcaatcttttagttaaagatgaaggctacaagggtgtaataattgaagttaattcaagaataagttttattgatgttattggtgaagatattgtagccgacgcaggtgcaaagctttcagcagtggcagttactgcaatggagaacgacctaggtggttttgagtttgctcacggtattccgggcaacattggtggtgccgtaatgatgaatgcaggtgcttatggtggagaaatgaaacaggttcttaaatgggttaaggtacttgataatgaaggaaacattattacacttgatgcatctgagcttgaaatgggatacagaacaagcattattgagaagaaaggttatattgttcttcaggcaagaattggtcttaacattgaattctcagaggatattggtttgattatgcagatgtttatgcagaagagaagagcaagtcagccacttgaatatccaagtgcaggaagtactttcaagagacctgaaggatattttgcaggtaaattaattgacgatgcagggcttagaggatacagagttggtggagcaatggtatcagaaaagcattgtggttttgtaattaattacgataatgccacagcaacagatgttattaatcttatgaaggatgtacaggctaaagttaaagagaagttcaatgtacagttagaacctgaagttagaattatctaaaagtctaagtatgagggagtacaaatgcgattagtaatagtaacaggtatctcaggggcaggcaaagtaactgcccttaagatttttgaggataacgggtattattgcgtagataatctgccaatagatttaattgaaagttttgcagatattctttttggacagactaatgaaaagaataaagttgcaattggagtagacatcagaagcggaaaaaatcttgagaagatgtcagaagttcttaagaatatgaaagcaaaagaacagaattatgagattttgttcttagactgcaacaataatactttaataaagagatttaaagaaacacgaagaagtcatccaatgggtgacagagatagtgttgaaaatgaaattaatgaagagaggtcaaagctggaatttttaagagaacaggctgattatataatcgacaccagcaatcttctcgtaaaagaactaagaggagaaatagaaaagatatttgttttaaacagagattacagaaatctttttgttacaataatgtcttttggtttcaagcacggtgttccggcagattgtgatttggtatttgatgtaagatttcttccaaatccatattatgtgcctgagctgaaacacaaaacaggtaatcagaaggaagtacaggattatgttttgaactcgcctgtgtcacacgaatttcttaataaattagtagatatgattaaatttcttattccaaactatattgaagagggaaagaatcagttggttataggaattggttgtacaggtggtcatcacagatcagtaacaatagctaatgaattatataatcaattaaatagttcagacgcttcttatggaatcagattatctcatagagacatagacagatagtagaaatagtaggaagtggcatgagtttttcaagtaaggttaaaaaggaattagcaggtcatatcagtaatgcaacacattgtcgaatagcagaaattgcagctattatttctatgtgcggaagtgtactgatagacgttgatgaaaagtattccataagagtcagaactgaaaccgattcaacggcagaaaagtttaagactttggtgtggaaaacatttcatatagatgcaaaaattgttgtaaaaaagaatgcatattcaaaaaatgcggagacatatactattaccataaaagatcacaatcaggcaatgaaagtcttagaggcaactaaattaattgatgatcaggggcagataggagagaatctttcagtgaccaataatgttgttataatgaaagattgttgcaagagagccttcataagaggggcatttatggcagcaggttcgataagtgatcctaacagctcttatcactttgaaattaagtgtaataacgaaaaaaaggctgagcaattaataaaattactaaataaatttaatattgaggcaaaaacagttgcaagaaaaggtcattttgtggtatatatcaaggaaggcgaaggaatagttgatgttttaaatgtaatggaggctccggtagctttaatggaaatggagaatgtccgaatcctaaaaggcatgagcaactattacaataggcaggttaattgtgagactgccaacattaagaagacagtaacaactgcatgcagacagatagatgatattaattatatcattgaaaatgagggcttagaatatttgcctgataagttacaggatatagcaacattgcgagttgaaaatcctgacgcttcgttgcaggagttaggtcagatgcttgaaccgcaattaggaaaatcaggggttaatcacagattgagaaagatttgccagattgcagaggaaataaggggaatccccaaggaggaaaggttataatgataacaaaggatgtaacaattgatattaagcaggctacagatgcaagtccggtggcaaaatgcgtacagttagctagtcagttcaagagtaaaatatatattgaaaatggagctacaaaagttaatgctaagtcaatcatgggaatgatggcattaggaattctttcaggagaagaagtaaaagtatctgctgaaggagacgacgagcagaatgcaattgatacaatggtaaattacttaacagctaattaatcgaaaatagcatgaaataaaaaatcctttctgtcggtgacggaagggatttttttgtggtgattacgtgtcgtagatataaagcttgtccacattcaaacttatacatatctgcccacggaaacatattccaagctttatagtataaattcaaaggcaattaaacccggtaattccccataagtctttgctcttaattccaatatatagtataattatttagttagcagtaaggttaatgataagaatataaaagaattaaagagtaacataaaagtagactataaaaagaagaataacagtgaacatatattaccaaaaagaaaggaacagcttatgaaacttatatcatggaatgttaatggaatccgtgcctgtgttacaaagggctttatggatttctttaatgaaatagacgcggatattttttgcatacaggaatcaaagatgcaggaaggacagcttgaacttgaaatgccgggatattatcagtattggaattatgctgaaaagaagggatattcaggaacagcgatttttacaaagaaagagccaatggatgtgaagtatggcattggcatagaggaacacgaccacgagggaagagttataacgttggagtttgaagatttctatatggttacatgctatacgccaaattcacagaacgaacttaaaagactggattacagaatgcagtgggaagatgattttaaggcatatcttaagaaacttgaagaatctaaaccggtagttttatgtggtgatttgaatgtggcacataaggaaatagatttgaaaaatcctaagactaacagaaagaatgcaggctttacagatgaagaacgtgaaaagatgactaagcttttagatgacggattcatagatacatttagatatttctatcctgatttggaaggaaaatatagttggtggtcatatagatttaaagccagagagaagaacgcaggttggcgtattgactattttattgtatcggaagcattaaaggacaagcttgaaggggctgacattcacacagaaatacttggctcagaccattgcccaattgaacttgacttgaatatataaagacaaaataacaattaacaggtgattatatatgaattttgcacatttacatgtccatacagaatacagtctgttggatggctcaagtaaaattaaagaaattacaaaaagagccaaagagcttggaatgaacagccttgccataacagaccacggtgttatgtatggatgcatagatttttacagggcagcacttgaaaatggaataaagcctattatcggatgtgaagtgtatgtggcaccgggttcacgtttcgaaaaagaagcaggggacaacgaagacagatattatcatttgattttgttggcagaaaataatgaaggatatgcaaacctttgtaaaatagtttcaaaaggatttgtggaaggattctattacaaaccccgagttgactatgaagtattggaaaaataccacgaaggaattatttgcctaagcgcctgtcttgcaggagaagtacagaagtatctggcaagaggggaatacgaaaagggaaaagaagctgccttaaaatatgagaaaatatttggaaagggtaattatttccttgaaatgcaggaccacggtattccggaacaggcaacagttaaccagcagttaatgagaatgagcgaagagttgggaattgaccttgtttgtactaatgacgtacattacacttttgcagatgatgtggaggcacacgatatacttctttgtattcagaccggaaagaagaaagctgatgaggacagaatgcgttatgaggggggacagttctacctgaaatcaccggaagaaatgtaccggcttttcaaatacgcacctcaggcaatggagaatacacagaaaatcgccgacagatgtaatgttacatttgagtttggagtaacaaagattccaagtttccctgtgccggaaggctacacatcatggacttacctaaaagaactgtgcgaaacaggacttcacaaccgctatcctgtttttaagggagaagttgaccagaactgtcatttgacaaaagaagaactggaagaaagattaaattacgaattaaatacaataaagaacatgggatatattgaatattttctgattgtttgggattttattcattatgccaagtctaacggaattgcagttggaccgggaagaggttcagcggcaggaagtatagtttcttattgtttggaaataacagatatagaacctatgagatataatttgctctttgaacgattccttaatcctgagcgtgtatccatgcccgatattgacgtagacttttgtattgaaagacgacaggaagttattgactacgtaggtagaaaatacggaaaagaccatgtggcgcagattgtgacttttggaacattaaaggcaagaggtgtaataagagatgttggacgagttcttgatatgccatatgctcaggtagataatatagcaaaaatgattccacaggagcttaacattactcttgatggagctttaaaacaaaatagagaattaaaaacattatacgattcagatccagaggtaaaataccttattgatatgtcaagaagacttgaaggacttccacgacacgcatcaatgcatgcggcaggtgtagttatttgtggaaaaccggtagacgaatacgtgccattgtcaagagcggcagacggttcaattacaacacagtatataatgactactttggaagaacttggacttttaaaaatggactttttggggcttagaaacttaactgtaatacagaatgcccaaagattcataaagaagaacagaggcatagaacttgacctgatgaaaatagactacaatgacaaaaaagttttggattatattggaacaggaaatacagagggaatattccagcttgaaagtgccggaatgaaaaacttcatgaaggaacttaagcctcaaagtcttgaagatattatcgccggaatagctttgtaccgtccggggccaatggattttattcctaaatatcttgaaggaaaaaataatcgagatagcgttacttatgactgcccacagttaattccaatacttgagccaacctatggatgtattgtttatcaggaacaggtaatgcagatagttagggatttggcaggatattcacttggccgaagcgatcttctccgtagagcaatgtcaaaaaagaaacaggcagtaatggaaaaggaacgccaaagcttcgtgtatggaaaccgggaagagggcgtaaaaggttgtatcaaaaacggcataagtgaagagattgcaaacaaaatctacgatgaaatgatagactttgcaaagtatgcatttaataagtcccatgcggcagcttatggcgtggtggcttaccagacagcataccttaaatattactatgcagcagaatttatggcagcaatgcttacttctgtaatggatatttcaactaaggtagcagaatatgtttactcatgccgttcaatgggaatagaaattcttccaccggatattaacgaaggtgaaagtggattttcggctaagggcaacagcatacgatatggacttacagccataaagaatgttggtaaaaacattattgacggcatagttgaggaaagagaaaaacacggcaagtacactgatttggaagactttattacaagaacagccaatcttggtgtaaacaaaagagcaatagaaaactttatcaaggccggtgcctttgattcacttaatgccacaagaaaacagatgatgatggtttacattcagattcttgacggggtaaacaaggaaaacaaagacgcatgggaaggccagatgtctatttttgatatggcagatgacagtaccaaagaaaagtataaagtaaaaatgcctgatgtaggagagtacaccgttgaccagaaattagcttttgaaaaagaagttattggaatatatgccagcggtcatccacttcaggcacaggaacagaaatggcgtaaacacataacaaatatgtcaattgatttcactgaacctgaagaaggggaagagtcaaaagttcctgacaagagcaaagttgccgtaggcggaatcattagtgccataacaaagaagtttacaaaaacaggacagcagatggctttcataacattggaagacttagttggaacagttgaagttgtagtatttccaagacagtttgagagaagtcgaatgttaatggaagaaggtcagaagatttttgtaaaaggcgaggcaaacatagaagaaaattctgcaggaaaagttttggctaactcaattgtatctttcgaccaggttccgtcagaactttggatagcctttaaagacaaggaagagtacatggcaaaggagaaagaactacttgaaacattacttcttcacaaaggtggcgacaaggtaatgatagctttggcaaaagagcgtcagcagaaagcattgccaatagaatacagagttgatgccaataatcagtttattgaagaactaaagaaaacttacggacaggattttgtaaaattaagagtttaatattcaaaaggaattataatgactaatttaaatataaattttaagaaaatgcttaaagaaacaaaattcaacgctgccagaataataatagttggatttctttgggtgataatagttggaacattaatgctaatgttgccggtaagttcagctaaagggcagtggacggattttgtgacagcattatttacagccaccacatcaacctgcgtaacaggattggttgtggtgccaacttatgcctactggagtctttttggaaaagtagtcatattaatacttatacagcttggcgggcttggaattatcagcatagccacaggcgtattaattataataggcaaaaaaataaacttaaaagaaagacgattaattcaggagtcatacaatcttgacacaagtcagggcgttgttttgcacataataagaatattttcgggaacctttgcagtggaaggcattggagcaatactttacagttttagatttattccaaaatacggagtggctaaaggcgtgtggtattctgtgtttcatgcaatttcagctttttgcaatgcaggaatcgaccttcttggagacaacagctttatggcgtacaagggagatgtgctgattaatataacgacaatgttccttattgtggtaggtggaataggctttatagtatggtgggatattttgaaaaacataaagaatattagaaataaaaagtacccacttaaaaaattctctgaaaggttgtcacttcactccaagatagttcttacagtaacggcaattgcaatatttggaggagcaatcttaacgtttgcttttgaatacaacaatcctgaaacattgggaactttaaagacaggtgaaaaaattctggcatcattctttcagtcagtaactcttagaacagcaggtttttgcacaatagatcaggcggggcttagaaatgcctcagtacttcttgcttttttcttaatgctaatgggtggctcaccaatgggaactgcaggaggaataaaaacaacaacagtagccttgttgttccttgatgtaaaatcagttgttacgggaaaaaacgcaacagaggcatttaagagaagaataaacagagacaacattaagaacgcattggcagtgatgacaatggccattagcatattaatgattgcagttatagcacttacatttacggaaacaggttctcttaccaagatatgctatgaagcattttcggcaataggaacggtaggtttaagcatgaattttacggcaagtctttctcttgcaggcaagctaataattatcgtcttaatgttttttggaagaataggacctataacaatagtaatggcattagcgagaaaacgaagaatagaccagcacataaaggacttacctgagaaaaaagtgcttataggatagattaaagaaaggacagcattaatgaaagaaatcgcagtattcggacttggaactttaggaaaaagccttgccatatcatattcaaatatgggtggaaaagttatagccatagacaagtcacaggaaaaagtagatgaaatatcagattatgttacttttgccattcgtgcagacctgactgaagaaaacgtaattaaaggtgttggagtgtcaaatgtggacgtggcaatagttacaataggtgaaaactttgaggcaagcataatcgtaactgccgtatgtaaggaaataggaatcccttatataatagccaaggcaagggacaaattgcagggcaatattttaactaaagttggggcagacgaaatagtttatcctgaaagtgaaacaggaatcagaatggcaaagaaccttgctcacggcgaaaagtttatggatattgcagaaatatctgacacatttagcataatagaagcaaaagttcctgaaagttgggttggaaagaatctaatggaattaagccttagaaaaaaatataaatttaacattatagcaataaaaaaagaaggaaaatacaaaattaatcctgacgttaacattccttttaaacatggaatgcatttggtagttttaggcgaaacagaaaaaatggcaaaggtatttaagtaaaatggtaataacatcaacatcaaatgaacaaataaaaaaattaatacagttaaaagaaaaatcaaaagtacgaaaaacaacaggaacatttacagtggaaggcaagaaaatgtttgttgaaataccggcagaggatcttgtaagtgtatatgtttcagaaacttttttgaaagaaaacggtgaactggtaaaagacaaaaaatatcagatagtaagcgatcaggtatttaagaaaatatcagatacagttacaccacagggaatagttgccgttgtaaagcagaaatcatacagcatagactacattatagaaaaaagaaacaaggaaaaaagttgcatagtagtgcttgacagacttcagaatccgggaaatatgggaacaattgtaagaaccggggaagcagcaggtatatcaggcataataatgagcaaagacagtgcagacatatacaatcctaaagctatacgttcaacaatgggttcaatattcagagtgcctttttcaatagtggatgacttggcagcagcagttgacacattaaaggacaacggcattacaacatatgctgcccacttaaagggagaactttacaattcaggaagccttacaaaggactgcgcacttttaatcggcaatgaggcaaggggcttaagcgaggaaatatccacaaaggcagacaagctaataaaaattccaatgcacggaaaagttgaatctttaaatgcagcagttgcaacagcgatactaatgtatgaggcggcaagataaaataagctgatgaaaggtagtagaaattaaagtgaattggttatgacagaatttaatggatttaactgatttcgtgagttaatattatggtagtgtatgatgataaaattttagaggagttaattgtagaaaaaagaaatggttttcatatattagcaatgagaaaaagcatttatatataatgaaacaaagagagatattgactttttaacaaagaaaggtgagagctggtttaaagctatcaaaaggtttgtatcatatgcaacaagtaaaatataaaataataggaataactattagtattacttgtatagcattgatgagtataattatttatgattgcaaagagagagtaaagaaagaaaaacaaatacgaaaaaaattaggggtatttgttgatattatattggacatattagattggtatcagttagtgatagtaattatagtcggattaattatagtcggattaattataggggtgattctaattatatattcataaacagtaaatagacattgattataatgggaaaaaataattagctaatataataacaatagtgcctatgtaataactttagtataggggtatagaaaaaaagattttattatctgcagaaaggtggtaaaaaatggtagatatttgtgttgtaaaaagaatgttatctgaaaaatacaaaatatacaatgacaaatcgaagttatgtattacgcagaatatagaagcggagtttctggaaaatgaaatcacaataatgtgttggaattttgaatatgtgtactattcctttgactaccgtagtgagaaagaaatgtttgaaagtataaattcttttattgaaacacttatagatagacctgttaagataaaagaatattattacaaaaataagttatataaaagaactttaaatcaacaagatgataaaggtgtttggaaaaaaataggaagttcaaagcgattttcgattattttcaaaagaaaaaatataaaaatggttgaaaaaatattcaaaaataaaaaagaggaacgttatgaatgttacattgaagggaaacggtgaaaaaattatttgtatacaacaaaaagaacaaaaagtaatatataacggagaaaatactctaatagataacagaatgccgatttctctttcgtctgtcaatacgaaaacaatagaattattttattgtatatgtaaatttccgctacgattaatagtagcaatatttgatatagtatttatatatggattatagattgttgcataatttttgctttaatagtgaaaatatcattagagtatcataaattttgcaatatcaaaagacaactcaatctacaaaaaaagaataagaatgggtttgtaaattattaaattagaataaaaagaataaagaaccctgtgttgtaccgattcgatgtacaacacagggttttgtttattataaagcaccaagtgtttcaattgctttgtttgcaagtatttcgtcaaagtgttccatatagaaaagttctttggcatatgttggattctcacgaactccgtgttcagtaagaatactgtatatacggttaagtttcttaccctgtgaagcttcaacacataaagataagtaatacttgtcattgaatggtgacttgtatactgagctgtcacctttaaatgttggagcaatcaatcttgaaacatcaattacctggcttaaactgtcgaatatataaatgctatacaacaatgaatcatcgttgtcatctttcttgtcattagcggaagcgtcaatatcttccatgtcatcatcaaattcttcgaaatctgtaaggtccatatcggaatcttctaagcgtgaaagaataccgtctttcatctccttagaaaagaattttgagagatgttcttcggtttcggaaggattctcaaccttggttataacaaggacgatggtttcaggagaaacaggtattgcttctaccattagtgggatgtcattgacctcaaaaccgaaatcatcattagcctgctgcatcatatcctgaaaaagttcacgggttttgcctgttccgtaagccaattcactaagtttaatgttgcggtcagctaagtcttccttactcagagtgcaacgaatctgattatcattgattttttcaattttcataaaaatcacctctctatcattagattcgtgtaaattcaaaataattaaaacaactatttcttgctattagtatatccaatatcttaaatagtgtaaagttattaaggtagtaaaatcttacaaattgtagtaaataaagcttttatgtaaaaaaatatataaaaaacaagtatttgcaaaataaaaaattgctgtaaaacaaaaatccaaaataatattatcccaattgcataagcaaatatgaaataagaccttttaatactgtaatataatatatatacgaaaaaaatgtacgaaatattacaattttttgaaaaataatgaattaagacaaaaaactatttgaaaaatgattgaaaagtacattcaatatgtgtataataaagacacggataatacgaatacggaaatgtacaaataataacaactgtttaacttaatatatatcacaaggcattgaccgcctatttagttaatatagttagatttattatggagtttccctaagaacgagaaagagtcatattttgtggctcttttttcattaataaaaattatgaaaaaatttatattaatgaaaaaacctaccgtggatatttattctttttttatgttgaatgtggtatcatagtagatagacattagcttaaggaggatttttgatttgagaaaaactataaataaactatttttgattataaccgtaatatcagcacttctgctaactacaggatgtgacttgtttataaagactaacaaggggcaggttgaccaaaaatggtacatgggacttacctacgaggatgacaatggcaacgacacggattacacaatagagacagatggaactattgcagcagtagctttggaagatggatatggcgatgagttcggaattataaagggcgaggaagcttaccttaatatcaataccattataaaaaatattgacaaaagattttatgtggacacaaccaacaatcttgtaatgtttactgatgccacaaaaacttacaaaactaaaataggtggtaagacaataaatgaaactgaaaatacagactatgttatttcttttatggacggaaaaaattgctatgttaatgtaaagtttgttaagaaatacgtggactttgattataaagttgtgaaggcggagggaaaatctcctgcaagaattgttcttaaatacacatcaggcgagaaaaatcagatgactgttaagagtaacattgaaatgcgtacaaaggcagattaccagaaccttattgtaactactttgaagaaaaataccaaggttacagtattggaagaaagtggcgaatggacaaaggttggaactgacgacggtttcataggctatgtgcctgcaaagaaattaaaagataaagaaacaaagaagactgattttaaatctgacgcagatacatatacacatgttttgatggataaaaagattagtttaggttggaatgcaataacgaatctgactgctaatggcaatttggaaacaataatcgaacatacaaaaggtttaaatgttatttctccaacatggtattctttgtctgataataaaggcaacttaagatcatatgcttcagcaacttatgttgaaaaagctcacagcaaagggcttaaagtatgggctttggttaatgattttggaactcaggacaaggcaagcaaggaatacacgaagaaagtgttaacagatactactaagagagaaaatcttgttgataacattatgacaaacataaaagattataatcttgatggcattaacattgattttgagtttattaataaggatattattaacagttatttgcagtttttgagagaactttcaattgaatgcagaaaagcaggaaaggttctttcaatagataattacgtgccatcatcaggctcagaatattacgacattgcacatcagtctttggttgcagattacattattataatgagttacgatgagcattacgcaggaagtaaggaagcaggttctgtttcatcaatgactttcacggaaaaagccgtaagcgatgccattgctttaacaggtgatgcgtcaagagtaattaacggtatgcctttctacacaagagcttggattacaactcctgcaactgatggcaaaaagggcgaaggcgtttatgtggaagatgcaactaatggcaattactacctttcaagtcaggcaattacaatggataaagctaaagaactttacaccaatgcaaaagtaaagccgacattcgatgaaacaacaggtcagaattttgtttcatatgaaaagggagacagcacagtgagcatttggcttgaagatgctacatctgtaaaatcaagacttgatattatggaaaaatacaagcttgcaggtgcagcttactggagattaggtcaggaaacagacagcatatgggatacaatttatccgtatttcaaataggatgttttcacaaactaatctaaataaggatgaaaaggataatcggaaatcgtttattaaaaagtgattttcgcaatgactatttatgagtggtaaggttaatgatttaaataaagacattagcaacaatgttgatttagaagaaagttatgattctaagaaagctaacaagtacatgaaagaagcaattaagcaggctaagaaagctgcttcaataggtgaagtgccaattggctgtgtaattgtttatcaggacaagataataggtcgtggttacaatcgaagaatggttgacaagaacacgttgtctcatgcagagcttaacgcaataaagaaagccagcaagaaacttgatgactggcgccttgatgattgcgaattgtatgtaactactgagccttgccaaatgtgtgcaggtgccatagttcaggcaagaattaaaaaagtctacataggttgtatgaatccaaaggcaggttgtgccggttctattatgaatcttcttcaggttgataaatttaaccatcaggtcgaaatcgaaaaaggtatacttgaagaagagtgcagtaatctgctgaaagatttttttagaaatttgagaaaaaagcagaaggattgaaaaatctttattgacaaagaaaattagtataaggtatactatatttctgaccgacagttgtcggtactaaatttgatataacatttccgcgcagccgggaagatagcggcgtcctgtacctgcaatccgctacagcaggggtgatggtcggcctcgggtttattttgtagggctgccctttataagtgatgttgacgtttgggtcttatgcaatggaatcctgtgaaccgtgtcaggtcaggaatgaagcagcactaagcagatcatttcatgtgacatgaggaagcctagaccgagttaactgtaaaggtaacgcttatggaatactcacaaagcagatcgcgcggattttataattaataaaaaggtgaaacacagaaagaattgtgtttcacctttttaaatgccaaattaccaaaatatattgcttgtaaccatttccagtttattatataataaactccaaaggtgtaaaagggcttacaatgcccttggaatccatagcagttacttttaggaaaggagatattatgtcttatacagcattatatagaaagtttcgaccttcaacatttgatcaggttaagggacaggaccacatagttcagacattaaagaatcagattaatgccaaccgtatcggacatgcctatcttttttgtggaacaagaggaactggtaaaacaagtgtggcaaagatttttgccaaggctgtcaactgtgagcatcccgttgatggaagcccttgtaatgaatgtgaaacatgtcgtggaataaccaatggaagtgccatgaatgttattgaaatcgatgcggcatccaataacggtgtggataacattagacagattcgagatgaaatacaatattcgccttcaagtggtaagtacacagtgtatatcatcgacgaggtacatatgctttccataggtgcttttaatgcattattaaagacacttgaagaaccgccggcatatgttatttttattttggctacaacagagccacataaaatacctataacaatattgtcacgttgtcagagatatgactttaagagaatatcaatagacacaattgcggcaagattgtccgaattaatggaaaaagaatcaattgaggttgaggacaaggccataagatacgttgcaaaagcagcagacggttcaatgcgtgatgccttaagtcttttagatcaatgcattgctttttatttgggacagaagttaacatatgacaatgtgcttgacgttcttggtgctgtagataatgaaatattcagcagacttacaagaagtgtaattgattcagatgtagcaacaagccttaatattctggatgaaataattatgcagggcagagagccgggacagtttgttaacgattttatatggtatttaagaaatcttatgttaattaagacatcagatgatgacgaaataatggaagtaattgatgcatcagcagaaagaatagaagctttgaaagaagaagcacagatggttaatgtagatgttattatgcgatacattagaattctttcagaattatcaggacaaatcaaatattcgtcacaaaaacgtgttttaatagagattgcattaataaagcttgcaaagccggcaatggaaagagacgtaagctcgcttaataacagaatcgctattttggaaaagaaaatagaagaaggaaactttacggttaatgtgggggcagctccacaggcggcaggcagttcaggtgcaaatccggaaccaaagcctaaaaaggtatttgaaaaggctataccggaagatgtgcagtatgttgtggataactggggttcagttagaagacacatatccaatccgtacaagactttcctgcaggatgcaagatttagcgtaaaaggggaaaacacacttttaatagtttttaatccgggagcaataggctacgaaggctgctcgaaaccggaagtaattgagatgcttaacactttgataagtgaagaaataaaaaagcaggttaaagttgaagtaactatgcttgaaaataatcagactttcagcgattactatcaggaagtcgtaagcaaaataaacatggacattgaagaggaggatttttaaaatggcaaagcgaggaggatttccgggaggaatgcctggaaacatgaataatataatgaaacaggctcagaagatgcagaagcagatggagcaggcacaggcagaattagaaagttcagaatatacagcaacatcaggtggtggagctgttgaagtgactatttcaggcacaaaagaaataacaaagattaaattagatcctgaagtagtagatcctgatgatatagaaatgttagaagatcttgttatggcggcagttaacgaagctatccgtaagatggatgaaatgtcaacacagaagatgtcgaagataacaggcgggttaggtggacttttctagaaagaggtaagcacagtggattactacagtggttatataacaaaactaatcgaagaattatcagggttgccgggaataggacctaaaacagcagggagacttgcttttcatattttggatatgccaaaagaacaggttgaaagtctggcaaattctatgatagacgcaaagaagaatgtaagatattgtaagtgttgttacactcttacagaccaggatatttgtccaatatgtagtagtaaggaaagggaccacaagaccattatggtagtggaaacaacaaaggatatggctgcatatgagaaaataggtgaatacaagggcgtttatcacattcttcacggagcaattaatcccatggcgggtattggccagaatgacattaagcttaaggaattgtttgagcgtttgaaggacgatgttaatgaagtaattattgcaactaattcaagcgtggagggcgaggctacagctatgtacattacaaaggtcataaagccactcggaataaaagttacaagaatagcaagtggtgttcccgtaggtggggacttagaatatgtggacaacgttactttgcttagggctcttcagggaagagttacagtttagaattgacaaaggaatgaggaagtcaaatggataaaagcgagtacaacttaaaaatagaagagttaaaagcagctatgcatgctcacgattttgaaaaggcagttgacgtggcagattcattggatatcaaaaaaatccgtgacaacaatctgttaagtcttattgccgacgcctatgaattaacaggcgataatgagcaggctaagaaaatattgcttatggcatatgagaatactaacacaggaagacagttagcatataggttatgccttatttccataaaattaaaagaacttgatgaggcaaacgaattttatcaggactttattgaaatggcaccaagagattcggcaagatttattttaaaatataaaatggcaaaagctaagaagaagccggtggaagaattaataaagattcttgaagattacgttaacattgacatggaagaaaagtgggcttatgaacttgcaaaattatatgatattgcaggcgagggcgagaaatgtgtcaatatgtgcgacgaaataagcttatggtttgcggaaggaaaatacgttgttaaggcaatggatttaaagaaaaaatatgaatctttaacatccacacagcaggacaactacaataaaaaatcagaaaataagtctaaagagcaggaagaaaagaaagcttcaactcaggaacttatggataaaataatggaaaaaacatctattaagtcaagaatagatgaagctgtaaaagaagccaacgaacgtaaggcggaatctaaaacaatagaagaagttacagacacagagaaaaatatagataagataaaagctgttggaaaagaagcggcagatacagaatcttttgattttccggaaattaatgaatctgcagtggaagaaatcaagccttatgatgatatagaaggtgcaacaattgatgttaacagcatgactcatccccaggaagttgaagaaataaaaattccgggaattagtgatgatcttaatgagctggaatcagattcaagtgataaagttgaagctgagaaggaagatgttgtagctaagactgacaaagagaagaaaagattgaagcttagaccttttagtgttaaacctaaaaagacagaaaatcctttaaaggaagataaaaaggtagaagcaccggttaatgcaaaggttacacttgaagaagataaagatttcaaattgattaacccggatgatgtgtctaaagttgaagaaccggttatagatgacttaggtgaagatacaacagaaccggttgatatggaatttgatgaagatatggatatggttatgaaatcagatgaaaagaaagaagacatattaaatgttgatgatgtagaagatatacttcatcagttgcaggcaagagggattcttaaagcagaaactgttaatagtgccgtaagcattattgagaatgtaagagagactaagaaagaatctaaagaagaaaagcctgatgaaaaagaagttagcactcttgacagatggcaggaggataatgttgaagtagaaaagcctttggaaaaagagcagacttcagttgaagacaatacttcagataatgagaaaaaagagcagacttcggttgaagacaatacttcagataatgaagaaaataaggcatcccaggttgagattcctgatttggaagaaatacctgatgaagtagaggatttgccggaagaacctgaaaaagaagaagttgaaaccacagagaatcaggatgcatctgaattggaagtaatagaaagtcaggaagaagaacctgaggttgatattgagaagatagcagaaagcatacctgatatagaagaaattcagttagcagaagaggctcagccggaagaaattccgtctgaacaggaagtagctgaaaatgttcagaaagaagcttctgaaacagcagaagatttaggcaaaacagcaatatttactatacctaaagccgacattgaaacaggtaataatacaggtgaggttgtagtagatgaggaacttcctaatattgatgaacctgaaatagatttagaaacaggtattcctgagccggatttgggtaaagatactaaaaatgcagaagaaagcacagaaaacgaaaaggcagagagtgtagatgctgagaaatcagaaagtactgaaaatgaagaagctgtacaggaagaaccggcacaggataattcaattaatttagatatacattcaactaaggacttaagtgccaaggttgaggtgatttcagggacagactgggagcaacctgagtatgaggaaaaacttgaagaggaagaagagcaattagaggtagcaaaggaggaagcagaagaaggcactcctgagcgcacaagtgaaggtgagttacttaacagaatattgaataagaacaatgaagaaattcctgaaccggaattagtagctacagaggaagaattaagtgtatttaagaacttctttaatgtagaaggtttggaagacaatattcaggaagtagttaaggaacttattgctggttatacacctaacggtaagtcaacagatggtaatgtggttattcttggcgaagaaaaaacaggaaaaacatcattagcagttgaaatcataaaattagtaaataagaaacgtggcagacgtaacagaagattggctaagattgatgctacagcacttaacaagagaggatttagaaattcacttaacaaattacttggaagtgatttgattgttgagaatgcagaaaagcttggtgcaatgattttaagtgaagttgtggacgtttcaggaatgtttactgacgatatgcttataatacttgaaggtgaaactgagccaatggaaaaaatgcttaaggactcaccacgcttatcaaaggtatttaaccacgttatccgtattaaacagtacgatataaaggaatgggttgaatacggaaaaagatatgctaaggacaagggatatgtaatggaagaactggcaagtcttgctttttacaaggctatcgatgattactttggtgaacacaagggaatcggaagagctgatgttgagaaacttgtagatacagccattgctaattctcataaacttggcagaaaattatcaggtttattctcatcaaataaaaatgatgatggattatatatattaatagaatcagactttattttttaacacaggaaaggatgtaaaaatggaaaatttacaacttgcaaaaattgcaaaccaggtacgtaaagacattgtaacaggtgtttacaatgcaaaatcaggtcatccgggtggatctctttcagcagcagatatgttaacatttttgtattttgaagagatgaatgtatcacctgaaaaggcaaaagattctaacagagacagatttgtattatcaaaaggtcatgttgcacctgcactttatagtgtattggcagaaaaaggatattttccaagagaagatatcaaaacattaagaaaacctacatcataccttcagggacaccctgatatgaagaaaataccgggaatcgatatgtcttcaggttcattaggacagggaatctcaacagcagttggtatggctatggcaggaaagatggacaatgccgattacagagtatatacaatggtaggcgacggtgaaagtgaagaaggtcaggtttgggaagcttcaatgtttgccggattcagaaagttagacaatcttgtagttatcgttgataacaacaatcttcagattgatggtgcaattgatgaagtatgttcaccatacccatttgacaagaagtttgaagcatttaatttccatgtaattaaaataaatggacatgattttgatgaaattagaagtgctttaaaagaagcaagagaaactaaaggtatgcctacagctattattatgaatactgtaaaaggtaagggagtttcatttatggagaatcaggtttcatggcatggttcagctccaaacgaagaacagtacaatatcgctatggaagaattagagaaagcaggtgaagcattatgtcagaagtaaagaaaatcgcaacaagagacagctacggagacgctttagttgaattaggaaaagaacatgacaatcttgttgttttagatgcagaccttgcagcagcaacaaagacaggaaagtttaaagcagctttccctgaaagatttattgattgtggtatagctgaatgtaacatggtaggtattgcagcaggtatgtcaacatgtggaaaagttccttttgcaagcacatttgctatgtttgcagcaggacgtgcatttgatcagttaagaaatacagtaggttacccacatcttaatgtaaagattggtgcaactcatgcaggtatttcagtaggtgaagacggtgcaactcatcagtgtaatgaagatattgcattaatgcgtacaatcccaggaatgacaattattaacccttgtgatgatattgaagccaagcaggctgtaaaggcagcttacgaaatggaaggacctgtttatttaagatttggtcgtcttgctacacctatcatcaacagtgaagattacaaatttgagatcggtaagggtgttaaattaaaagaaggaacagacgttactattgtagcaacaggtcttatggtagcagcatctttagaagcagctaagaatcttgaagcagacggaattaatgcagaagtaattaacattcacacaattaagcctttagatgaagacattattgttgaatcagctaagaaaacaggcaaggttattacagttgaagaacattcaattattggtggtttaggtagtgcagtatgtgattgcttaagtgctaaatatcctgttagcgtttcaaagattggtgttgaagatgtgtatggacattcaggtcctgcagtggaattattaaaagaatttggtcttgacgcagaaggaatttacaataaaattaaaaaaatcatggcatagtttttaattcttaaaagataacatattttaaaaacaagtgagttttgggcagaaaattcaccaaattgattaataactgaaatggaaaattagcgtagggttaatttttaaaagtttaaaattaataattttaataaccggttttaaattattaatgagaaaactaattatttaagttatgttaaaatcacagttgcttttttaaaaaatgatgttatactagccattgttaaacgaaatgcaagggagcagacgtaaaaagtcttgctctctttttcttttgttttaggttaaaaagttaagtaggagctaacggattagccaatgggtttaagaaattaaatcagacaaaagataagtttttcaatgaagaaagcaatccccttttaagtaaataaagttaagttcataaagttgtgacaacaaagttggagtgatttatgaagggacaatatttacaatgctttcttaagtaaaataataggataatggaaaagaatggaggaaggaactatgaacgcacaggaaattttacaggaagctacaaacagcagcttcgcaatttggttcttaattggtgccggtttagtattctttatgcaggctggtttcgcaatggttgaaacaggatttacaagagcaaagaatgcaggcaacattattatgaagaacctgatggacttttgtattggtacattaatgtacattattttaggatttggtttgatgatgtcagaagattacgtaatgggggtaattggtattccaaatcttgacatctttacaaattacaatagttttaactggtcacagttcgtatttcagttagtattttgtgccacagcagcaacaattgtttcaggggctatggcagaaagaacaaagttcagcgcttactgtatttactcaggagcaataagcctgatagtatatccgattgaagccggatgggtatggaacttaggaggcaacggttggttacagcagttacatttcgttgatttcgcaggttcagcagtaatccactcagttggtggtatggcagctttggtaggagcaataattgttggaccacgtattggaaagtatacaaagagatctaatggtaagataagatcaaatgccattgcaggtcactcaataacacttggggcacttggttgtttcatactttggtttggatggtatggattcaacggtgcagcagctactaatgtagatagcttagcatcaatctttatgaatacaacaatcgctcctgcaacagccacagtagtttgtatgttatttacttggattaaagatggaaaacctgatgttggtatgtgtttgaacgcttcacttgcaggtttggtaggtatcacagcaggttgtgcttcagttgatacaattggtgcattaataattggtgctgtatcaggtatcttggttgatgtagtggttgaagtacttgataagaagttccacattgatgaccctgttggtgccgttggtgttcactgggcaaacggtgtttggggaacaatcgctgttggtttatttgcaacaggcagaggcgatacagtacaggctttcgcagatggttcaacatatgcaggtttattctacggtggtggagcaaaacttttaggaattcagattttaggtattgtagcaattgatttatatgcagcagtaatgatgacaatagtattccagttaattaagcatacaataggacttagaacaacagcagaagaagaaatcattggtatggatatttcagaacatggtcttgcatcagcatatgcagacttccttccggcagcaccatcatatgcaggtgagagcgaaggctcagttgatttatctgatgtgaaaccagtagcacttacacttggagaaagagcagaaggcagatatacgaaagtatctattatctgtcctgaagaacgatttggagttcttcgtgatacaatgaacgccatcggagtaatgggtatgacagtttctcaggtaatgggttgtggtgctgaaaaaggaaagacaggtagatacagaggtgtatcaacaacaatgaatctttacagaaaggtacaggttgacattgtagtatcaacagttgatccgggacttgtagtagcagctgcaagaaaggcacttaacacagaacactatggcgatggtaagattttcgtaacaaatgtagaagatgttatgagagttcgtacaggagaagttggtgtggaagcattatcttacaagaatgaaagaaaataacagataattgataacagctatgaatgtagttggaaatacagatagaatttgagtttacagaactattagataacaatgatattttggaactctgttcttaaatatatattttacttaatctcattaaaagggccggtggaaaaccaccggctccttttagaatttaccccaatggtgcttcccccaaatcatccagtgtaatatttaaatcgatgattttttgattattttcaagaccgaatataataatgctgtctcttttgattttcggataaagtatgccattgtttgaaaggtgaagcaggcggttggcttcatccaaagtcagctgcattgcaagtgcaagggcaataactttgtcgcgggatggtgtttttgaaccatcaaagatttggtagccgtagtttttttggatgtttgaatcagtgattacctgagcttttgtcagacctttttcatctaaaagttgagttagatattcatgaaaacttatgttactaatgtttgaattattgtcggttaaataagaatttatgttattagagttttgtaaaattttaagaagctggtctgtagttttttgtgatttgtcattattaaaatttgaaaaattatttgaattcattataaatatcctttccccatattaaaaaatgtgtcgaataatgatattatatacataatactgttaaattaacagacttttatataagggaatattatagaaaatggactttaaggaaaattattattttgaaaaatacgaacaacttgcagttttggcggacacacaaaagtgcaagactattttgtcaagaaatacagatactaatgaaatagtggtgtttaaggtaatggacaaacacagtttggatgtgtaccacaggcttaaagatttggataatagcaacattgttgatgtaatggattgttttttacatgaagacaaatgtgtggctgttgaagagtttgttaatggaaaaagattatgtgatgttttgcagaaaaatattccagtggaagtaattgttgattacgtaaggcagatttgcaacggcttaaaagaagtccacaacaaaaatattgtacacagggatttgcaaccgaaaaatataattgtggacagacacaatcatattacaatcattgattttgatattgcaagaattagaaaagaagaagccgatagtgacacagaatttcttggaacggtgggctatgcatcacctgagcagtttggttttgcccagacagacaagcgaagcgacatttattccttgggcgtgcttattggcgatatggtcaagccttatgcgaaaaccgttagggaggtctcgggggaagaaattgtgtacaccggtaccggtcttacattagaagagcacaagatagttgaaagacttgtgaaaatgagtaggaagtgtactgagatagctcccgaaaaaagatataagtcaattgaagaaattgaaaaaaaattgaaatatattaaacactacaatcaggatattttagaaccggatgaattagaagaattaagctttagggggataatcagaaccgttccgggatttagaaaaaataatattttgcacaagataattgcaataataatgtatgtatctgtttttgcaacatacattgaaataggaacaagcgtaataaatgtcaaaaaaggctataaatggctatgtgttattttaagcgaaatgtgttggattattccatatatatatttgacaaacataggggatgttgtttatagaataagaaaaagaaaatttaagtacaaattttttgaatatttaaacagaatagggatagcattggtaatatggttggctattttaataattttgtcaattataactttaaaataaaagtatgccgccagcataacaaaacaaaagtggaaaagtgtagaataatgtaaaaagaaggaggttttatattatgaagacttggaaactggtatcaggaatactgtcaataattatgtttgtatttgtaacatttcagtcatgtgcagcaggcataagcaacagtatagaggacaatggagaagttggcggaagcgcaggaatcattgttgcaattatgttattggcaggtggaattgtatcaatagccacacgtaattcaaaaggcaaaggcggaaatatcgccgtaatcgtattatttggattgggcgcaatcatgggattcacaatggctggaagctacacagaccttataatctgggcagcttggtgtgcaatctgtgcagtattagcacttatctcaatgataaaaaagccaaaacagatagaagaaaactaataaaaactgctatttaaaaacaaatccgaggacaacggattaaattaaaagaacttataccaatgtaaaaaggggaatacctctcgttatatggataagttcttttttattgttcattttatgtagcgtgtagaatttttttgttggcaaacaataggcggcggagcaaaatgataaaagtaacgtgtttgccaacaaaaaaattctccacgcgaatcaaaaaaatgtactaaaaaaggaggcataatatggatatttttgatattgtaggtccgattatggttggcccttcaagttcccatacggcaggtgccgtaagaataggatatattggtggtaagttgttaggggagcctgttaagaaagctcagattttattgtatggttctttccttgctacaggtgaaggccacggaactaagaaggctatagttgcaggtttgcttggcatggagccggatgattaccgtatttccgacagcttcaatatagccaaggagaaagatatgaaaattgagtttggagaagctaaacttaatgaaggtcatcctaattcagcgttgttaagattagaaggaatcaatggcaacaaaatagaagttttggggcaatccataggtggatcaagaataaatattgctcaaattgatggtattgatactaatttttcaggggaatgtcctacccttattgttcataatatggatcagccggggcacgtgtcggaggttacttccatgcttgcccacaagtcggtaaacattgcgaccatgcagctatacaggtcggcaaaaggtggcaatgcggttatggtagttgaatgcgaccagcagattccaaaggaaggaatcgaatggttgaagcacgttgaaggaatactaaaggtaacttattttgcaggaatataaattaaggacggagagtttatgtcttattatcatacattaaaagagttagaagatttagttaatgaaaataaattagaagtgtggcaggttattgaacagtctgatatggaagaaaacggaaggactaaagagcagtcctacgaaaaaatgttaaatatgtatttggcaatgaaagaggctgacaaaaattataatggaaatttaaagtcagccagcaaaagagccggtggagatggagaaaaaattcacagatataatgtagctaacaaaaatatttgcggaaaatttattggaaatgttatggaaaaagcaattaagatgggcgagtcaaatgcctgtatgcgaagaattgttgcggcacctacggccggtgcctgtggagttttgcctgcggtacttattagttatcaggaagaatataatttaagtgatgatgaaatggttaaggcaatgtacgttgctgccggaattggcaaagttatagcagagaatgcttttattgctggagctgcaggaggctgtcaggctgaaataggttcagcaagtgcaatggcagccggagctttagcttttctccagaaaggaacagttaaacagattgtaaatgcaacagcactttcacttaaaaacatgttagggcttacttgtgacccggtaaagggattagtagaagttccatgtattaagagaaactcatatggtgctgttaatgcagtaacatctgctcaactggctatggcgggtatagaaagtgcaattacacctgatgatgtaattgacagtatgcgtcgcattggaaatagcatgccggcatgtttaaaagaaacaggaacaggtggacttgcagtaacagaatcagccaataaatatttggaaaaatagtatcataaataattaaacaagtaataattatgtaaattaattgataaatgtacattgatgtttattataaaattatatacaaaattttttgaaaagtagcattataaggtggtaagtggtattatattagatataactgcccaggcagaaatagcttagaactattaaggagggacaatgagagctagtggaattttattacctgtttcaagtttaccgggaaaatatggaataggatgtttttcaaaagaagcatatgattttgtggatgttttggaaaaagcaaatcaaaaatactggcagatattgcctatagggccaacaagctacggagattcaccatatcagtcattttcaacttttgcgggaaatccttattttattagtttggaaaaattaatagaagaagaattgcttacagaagaagaatgtaattctgttgattttggtgagaataatgaatatattgattatgaaaaattatataacggcagatttaatcttctaaaaaaggcttacaagagaagtaatccagaggatgaaggttttaagaagtttgtagaagagaacggattttggattgaagattatgccatgtttatgactataaaggcagagcataatggggaaagctttggattgtgggaagatgaaattagagtaagaaaaccagaagcaatggaaagatatagggaaaagtttaaggatgaaattcttttctataaatttattcagtttaagttttatgagcaatggtttaaattaaaggaatatgcaaatgataagggaataaaaattattggagatattccaatttatgttgcttatgacagtgcggatgtatgggcaaatcctgaattattccaaatggatgaagaggttaagcctatatctgttgcaggttgcccaccggatgctttttctgcagatggacagctttggggaaatcctgtttacaagtgggattatcataagcagacaggttatacatggtggattaggagaattgaaaatagcacaaagctttatgatgtaataagaatagatcatttcagaggctttgatgaatattatgcaattcctgccggttcaaagaatgctgtagttggtaaatgggaaaaaggtccgggaatggatttgtttgatgtcgtaaaagagaagcttggaaagattagcattattgcagaggatttaggttatataacagatagcgtacgacagcttgtaaaagacagcaatttcccgaatatgaaagtattagaatttgcttttgatgcaagagattcttatgaaccttgcgaataccttccttttacttactacaataattgtgttgtatatacgggaacacatgacaacgaaactttattaggttggttgaaacatataaatgattacacattaggatacataaaagattacataggtagagacatacctgttggtcaggaaatggtagatgaaataataagacttgctcattcatcagtggcagacttatgtatcattccacttcaggactacctaggacttggaaatgaagcaagaataaacacaccatcaaccttaggtgataactggaaatggcgtgttacgaaggataagttgacagacaaattagcagataagattagaaaatatacaaatgtgtatagaaggtaaaaaatggaggtacagtatgaagattacattaaagaaaattttaatttttccaatttatttatgttactatgttattaccgaatggattttggcgttaggaacaaaagatccttgggataaaatgtggaaatgggcagaaaagtaaatggttaaaaactaatgaaatgtataaaaaagcaagaatacaagtagcatttggcttatggcagaagcggaacctagtattcttgcttttattattggaattacatcctttatttcttattaactctccactccaatggatctttttcaggtcttgcaaatgcttcttcagttgatattccatcagaagcaccattagcctcagaaccgtcagtaatctgtgtgtcttcgttaactgacaatgtatcaagagaagtctttagcaatatagaagcttcatcttttgaaatgttcatagctttggcaagttcgtctaattcaggcacacgaccaagtttctcacttaaattcttagtaacttcgtcaagtctgttaagtttgtcagcaagatgctgcccaattctgtctgagttaatctgaacattaacagtattcttaattgcatcttcaattctacctgaaataaatgaatggaaatcgccaacagattctgtgtaatcagaaactgcaagcattaaaccaacattaccctcttgaattaagtctccaaagttaacgccttttccacgatgactttcagcaatttttgcaactaaagaaagattagcttcaacaatcttagatgaaacggaagtatcaccggctaaaagcttgtcaattaaatcagcctcttcatcttttgaaagattaggaagggcttccatttcttccatatacatcttaataaaagataattcttcttctgattcaacatggttagaaacagaagcagtttcagaaatagcttcatcggccgaagtttcaggagcgtcatcagccaaaggattattggctggtggagtaaatccctcaatctcaactttattaagggcaagatagtcgtaaataaactgatactggctatcatcatcaattaaatctttaaaatataattttacatcatccattgttacatggttagcattggcagcagcaaagtctaccaatgaagtaagagcttcattaaataataattttttatccattttacacctcgtctataataaataaatgatacataaaagccttgcaaaaatcaaggataatgggtaacatttaatatagtaaaaattatagcagaataattaggggattaaaatggaacaaatattaaaaaaaatatataaaagtagaattttcggacttataagcatactgttttttattgcagtgtgtatgggaataggagcttttgcagcctacgttaaacacgtttccaatccgacggagcaggcggttacatattttagagcttttatgcaacaggattatgacacaatgtacaatcttttggacaagaaagacggctactatattagcaaggacagatacaaggaaataatgcagaaaacaagagaatcaatgacaatagattcttacaagattaacgatcctagaaaagaagacggacaatatgtggtaacaattgaatgcacagatgatgagacggatagctctcagaatatgaatatttatttaaataagaagatgcatctgcctaagttaaagcctgactacaaggtagatattgaaaaaatgctagttaaaaatcttacaataaagattccacatggagacaagcttacaattgcagggattgaaattacagataaagacgcaaatattacaacagaaaataatattcaaatatataattttaaggctattttaaatggaaattataaaataacatgtgagaatgaatattgtgcaaaaaatacacttgcaaatgttataaaaaaagatatggaagtggatttgacaaagagttggtacacagcaaatgaccggtacacttcaaaaataacaaacagcgttacggattttattaataaatattatagtgccgcaagaaacagaagcaaaagcgataaaaaacttatggcatttatagatgacaaaaagcttcaaaaatccgtatcaaaaacagtagaagaaacaatgtcaggtctttattggtcggataagaagaacatagacaagtacaaggtatctgattttaaaattaaggatttgaatagtacaataaaatacgacagtaaaagtaaagattttcaggtaacatctacatacaactatgactacacatgtacaactgacattgcaacatatacaagttatgtgtataaatattcaggaagttgtaaggcaacattgaagattacgtacagcatagacaatggaaatcttaagattaagaatgttaaattaagtgaaaaacaaaaaagaaaataatttgaaagaaaaatcaaataaaaatttaaacaaaaaaattaaagacaaaataaaaagtgattcaaggaaataatggaggaaactatgtcaaaagaaatttggagaccgggaaatatgttatatccccttccatctgttttggttacggtggcagatgatgagggaaatgataatgtgttgacagttgcgtggacaggaacggtatgctcagacccggcaatggtttacgtttcagtaagaccttcaagatactcacatcatatgataaaagaaacaggggaatttgtaatcaatctgacaacagaagaattggcatatgccacagattattgtggagtaaagtcaggtaaggatgaggacaagtttaagaatgcatcattaacaaaagaacctgcaaaatatgttaaggcacctttgattaaggaaagtcctgtaaacattgaatgccaggtaacagatgttgttccatgtggcagtcacgatatgtttgtggcgaaagtactttgcgtacacgcggacaaaaaatatatggacgaaaatggaacatttagttttgaaaaggcaaagccgattgtatattctcacggctggtattatggtcttggtaaaaaaataggcaagtttggatattctgtaattaagaaaaaagcagcaaaaaagagatacagaaaaaacaaataaatattcaaaaatgtctaaagattagtttgacagataaagagaaattaatttgccaagcaagaatgaaaaataatttaatcaaaataactgtttaaggatggcaatatatgggaataatatttcatattgatgtaaattcagcttatttaagttggacagcagtaaagttgcttaaagaagcagcaaaagatgaaaagaaaatcgacatacgaaatattcctgccatcataggcggtgacagggaaaagcgacacggaatagttttggcaaaatccatctccgcaaaaaagtttggaatagttacaggtgagcctatagccaatgcgttgcaaaagtgccctaacatactgattgttccgccggagcacggttattacaatgaacaaagccataaactaatgaatttgcttagaacatttacacctgacattgagcaggtaagcgtggatgagtgctatatggatttttcgggaatacaaaacgagtatccatcgccattagcatgtgcgtacaaaataaaagacacagtaaaagagaaacttggcttcaccgtaaacgtaggaatatccgatgtgaaagttttggcaaaaatggcatcagattttactaagcctgacaaagttcatacattatatagaagagaaataaaagaaaaaatgtggcaactacctgttgaagaactctatatggcaggtaaatcaagtgtaaacacgttgcacaaacttggaatatacaatattggccaactggcaacaagccctgaatatattttggaggcgcacctgaaaaagcatggaaaaatactttgggaatacgccaatggaatagataaaagcgtggtaaataccaagcgtgaagaactaaaaggagtgggcaactccatcacattgccatatgaccttgataatatggaagaaatagaaaaaatcttacttcaactgtcagaaaaagtagccggtagacttcgaaaaggaaaacaaatggcaaaaacagtagctgtagaagtgaaatataacgacttcataaaagcatcaaggcagacaacacttgatagatgcacagactcaggcacagaaatataccagctctcaaaagaactttttagagaactttgggaaaaagatggaaacaaaagcgtgcgcctgcttggaatacgaactgccaacttagaagaacagggagccttagaacaaatgtccataatggacataatggcgcaaaccacaaacaaacaacaaaacgccacaaccaacatatccagagaaaaaatgaaaaaactggacaaggcactagatgccatcaaaaacaaatacggcgatgacaaaataaaaagagcaagcctgttagctgagcaaacagtagacatgaaaaacaaaaaatattatgaagaataacaaaaaacaaaagcaaaaaatttaagtaagattataaaataaaagatataaacagaaagaacaaacaatttggcaatggaagatggtagcaattttgccaacaaaaggagactgaaatgaaaaaaaacattgtattaataggtatgccgggagtaggaaaaagcacaataggagtaataattgcaaaaatactgggataccagtttatagatgctgaccttgtaattcaggagcagtacggcaaacttttgaaagaaatcatagctgagcgtggaacagatggctttgttcaggtagaaaatgacgtgaacaagtcattgaatcctgagaaggcagtaatttccacaggaggaagcgttgtttactgcacagaggcaatggaacatttatcagaaatagcaacaatagtttatttaaaattagacctatactctttagagagaagattaggaaatcttaagcagcgtggggtggttttaaaagaaggacagacattaaaggacctttatgatgaaagatgtcctttatatgaaaaatatgctgatattgtgattagcgaaaatcattgttctgttgaaaaaacagttgataaggttgtaacaaaattacgtcagagtggattttagaacaaattatataatttgctaaaacaaaaaatacatacggatattagctaaaagaatagaacatttatttttagggggataaaataatgtttattaataaaaaatcacataaaagcgctttcgtctgcatagcagtatttatggtgactatgattatgattttgactttttaccaattggcagttgaaatatatgcatatggatttattacaaaaaataatgactaccgggtgaaagagagtacagcaaaggttctaacattaaaagaaaatcataaagatattaacaagaaaaatataaatgttaatggtaaaataaaatctatcaacaataaagccataaatgcagaccaagaaatgttaacaacgtccatagttaacaaaaatgatacaaaaaatgttaataatttcgttttgaaaaaaccggtaaagggtggaattaccacatcaggttttggggatacaatttcaagaactgcaagtcataatggacacgattgggctgttaatacaggcacaaaggtaagagcggcagcagagggcgtggttgaattggcttattttagtgaaagttatggttataatattttgattaatcataataacgggttcaaaaccagatatgcccacctttcggaagtggaagtttcaaagggagaaaaagttgaacaaagtcaggtcatagcacttagcggttccacagggtttagcactggaccacatcttcactttgaagttgtaaaggatggaaaaagggttaatcctattgagtatgttagtaacaggtaacacattttgaaaattatcataatgtaataatatagtaaagcacaatttataaaaattgaccaaaaaaatcgctgaaatttatatatattgtgcttttattatgtttacaaagatagatattgtgctataattgtgtagatatacgaagataattattggtgggagagggcttaattgtgaccaatccctgtttgatataaaatatacatatataccgggagtaaagaatggaacgttttgtaataaaaggtggagtagcacttaatggcgaagttgaaataggcggagcaaagaatgctgcattaggattacttgctgcagcaataatgacagatgaagacgtgacaatagagaatttgcctgatgttagtgatattaatcagttgatagatgctattgcaaacattggagcaacagttaatagaatagatagacatacagtaacaattaacggaaaaacaattagaacacatgtagtagaatatgagcaaatgagaaagattagggcttcatattatctgcttggtgctcttttgggcaagtttaacaaggcagaggttgctcttccgggtggatgcgcaatcggtagcagacctattgacttgcatcttaagggatttagagctttgggagcagatgttattactgatcatggtatggttaatgctcaggcggaacgtttagttggaaaccatatcttttttgacacatcttctgttggagcaacaattaatgttatgcttgcagcagttagggcagaaggaaagacagtaattgagaatgcggctaaggaacctcatgtagtagatattgccaatatgcttaacagtatgggagctaatgtaagaggtgccggaactgacaagattagaattgaaggtgttcgtgaacttcacggaacagtatattcaactattcctgaccagattgaggcaggtacatttatgtgtgctgcagcagctacaggtggggaagttttgattaagaatgttattcctaaacatttagagtgtatttcagctaagcttattgaaatgggatgcacagttatagaatatgatgacgcagtacgcgttaaggcaggagatttcattagaagtgcaaagattaagactttgccttatccgggatttcctacagatatgcagccacagatggcagttgttcttacaatggccaacggtagcagtacagtaacagaaagtatttttgaaaacagatttaaatatgtagatgaattgacacgtatgggtgcaataatgaaggtagaaggcaatacagcatttattacaggtgttggaagtcttgcaggggcacaggttgcagcaccagaccttagagcaggagcagcacttgttattgcaggcatggcagctaacggatttacagtagtagatgacattgtttatatccagagaggttatgaaagattcgaagagaagctttcaggtcttggagcaattattgcaaaagtagattctgaaaaagaagagcgcaagtttaaattaaaggttggatgattgcttgattaaaaaaaatcaataaaactgattaaatttgtcactatacaaacaaaattgcgtatgttaatattagaccatcctaaaaataaaaaggctttgaaaaggaatagtagttgttaagtggttaacagagagctgtcggcaggtgtaagacagcagaagctatgcaatgaactcaccttggagctgccggctgaatggtttggatagtaagactgacgaaataatcttattatttaaagagtaggcttggacggattccaccgttaaagggagcggatgtcaaaggcatccttagagagcatgtataacatgaagcagagtggtaccgcgtaggtagagaatacgtccctgcatttcctaattggaagtgcagggtttttttcgttctgactcgcgagaaagttagcaagctaactatttattatattaagaacctaccaaatcttgacataaggaaactaaaaatatattatttaattgattgaaaaggagattttaagatgaattttggaaagtataaaagacagtattttatgccacctacaccaacatatgattgggtaaagaaagaatatatagataaagcacctatttggtgtagtgtagacttaagagacggaaatcaggcacttatagagccaatgagtttagatgaaaaattagagtttttccagatgttagttaagattggctttaaagagattgaagtaggtttccctgcagcatcagagacagaatataattttatgagagccttaattgaacgtgatatgattcctgacgatgttactgttcaggttttaacacaggcaagagaacatattattaagagaacttttgaagcagtaaaaggtgcaaagcacgcagtaattcatttatataattcaacatctgtagcacagcgtgaacaggtatttaaaaagagtaaagatgaaataaagaagattgctgttgacggagcagaattattacagaagcttgctaatgaagtagaaggaaacttttcatttgaatatagccctgaaagtttttcaggcacagaaatggattatgcattggaagtttgtaatgcagtgcttgacgtttggaaaccaacacaggataacaaggttattattaacttacctgcaacagttgaaaatgccatgccacatgtttttgcaactcagattgaatatatgcataagaatttaaaatatcgtgatgcggtaactatttcagttcatcctcacaatgacagaggttgtggtgttgcaactgcagaattaagtgttttggcaggagcagacagaattgaaggaacattatttggaaacggtgaaagaacaggtaatgtagatattgttacgttggctatgaacatgatttcacacggtgttgatccacatcttgatttcagcaatatgcctgaaatctgtgaaatgtatgagcgtgtaacgagaatgaaggttggaccacgtcagccatatgcaggggacttggtatttacagcgttctcaggttcacatcaggatgctatttcaaagggaatggcatgcagaacagaaagtaatgacgaaacatggacagttccttatttgccaattgatcctgtagatgtgggaagaacatatgattcagacgttatcagaattaacagccagtcaggaaaaggtggcgtaagctacatcttgaaacagagttatggattagcattaccggagaaaatgagagaagaagtcggatattccgtaaaggatgtttcagataaggaacataaggaattatcaccggcatgggtatatcagatttttgaagacaaatatattaatgataacagcatatttagtgtgtctgaaacacattatgttcagaagaatggaattgttgcagaagtaacaattgcacagaatgaaggaacaagagttgttaagagcacaggtaacggtagacttgatgcggtaagtaatgcatttaaacagtattttgatattagttatgaattatcagtatatgaagagcattcattatcaagaggttcatcatctaaggctgtttcttatgtgggaataagctgtaatggtaagatgtattggggtgttggtatcgatgaagatataataaagtcatctatttatgcacttacagttgctgttaaccaattggttgcagcatcaggtgaaaaaaagtttcaggatgaaagattaactgagattttgaattatatcaatactaattatcttacagtaacattagatgagttagaagaacagttccatctttcaaagccttatttgtcaaaatatataaaggaaaaatccggaaaaactttcggtgaattagttaagaatgttcgtatgaagaaagcaagaactttattaaagggtggcaatatgacagttgaaactattgctgaaaaggttggatatcaaaatgtggaacattttacaagattatttaaaaagaaatatggaatgacacctgttcaattccgtaatgaagataaataatcggtgtaatgttattgatgatataccatcgtatatctgtgtttaaagtgtattgagagcgatgtgttatcgtataaaaatattttaaagaatattttgaattttaatgtaattatatattaaatgtgataaaatggtgtcagggtaataaaacggacaccattttttcaatttaaggaggataaaaagatgaaaacaatgaaaacaaaaatagtagctattatgcttgttttagcattagcattaacagggtgtgtcacacagaagtcaacagtagttattaacagcgatggaagtgctaagatgactacaaatatcaaagttgataaacaggcagctattcaggcttacattcagatgatgaagtcacagggacagactgtatcagaagctgaagtaacagctttgattacattaatgctaccaaaattaaaagatgaaggtatagatgtaaaaactgttactgagaatggaaaagattattatgtaattgactattcacagaatattaaacagggtgatttacagaaagaatttggtgtagagggatttgatacatatgttactatagatacattctatatgaacggtgacataatgaaattattagatgcagaagatgtggacatttttgctgcatacaaggaaatgggagttgaacttaaggaagaagatattcagacaagcataacagtacagttccctaatgctatcgtaagcactaacggagctaaggatgcttcaaatccaaacgcagtaacatttagtattcctttaacaggaaagattaatatgtttgctacaactaaggctggtgttacagaagattcagttaaggctacaattaagaaacttaacacagtaaaagctacaaagattaaatctttaaaggctaacaaagttaagaagaatgctaagaaagctacagttacattaaagttcaagaaagtaaaaggcattaagaaatatgaagttgaatattcattaaagaagaactttaagaagagcaaagtaaaaactgcaaagaagactacatacacaattaagaaccttaagaaaggtaaaaagtactatgtaagagttagagctacaaagactaactatgcaggaaatgctatttatagtaaatgggttaaaaagtcagttaaaactaagaaataaactgtttttataaattttgttttattacgtaaggaaccacgccggaaggtgtggttcttttacgatacttttacgatatggtaatattatctattgacatatatattgtttaatgttataactgtcaagaaaatattatttctcttattaagagttggcggagatacaaggatctatgatgccacggcaacccccgattatgatggaaggtgcccaccggagcaatgatacattgatcaataagaggatttgaataccttgatttcaagtccactgtaaaacagtggacttaatttttgcttgtagttaacaatagattattcataatttttacgagtttaaataattagttcgtaaattgcaaatgcgaaagcttattttcagagaggagaaaaaatggagaaaagattatttacttcagaatcagtaacagaaggacatccggataaaatctgtgatcagatttcagatgcgattttagatgaacttatgagacaggatccaatgagccgtgtagcttgtgaaacagctattacaacaggtcttgtacttgtaatgggtgaaattacaacaaagggatatgttgatattcagaaagttgtaagggaaacaattagagagattggttatgacagagctaaatatggttttgactgcgatacatgcggtgttattacagctcttgatgaacagtcagcagatattgctttaggtgttgataaggcattagaagcaaaagaaaataaaatgacagatgaagaaatcgatgctataggtgcaggcgaccagggtatgatgtttggttatgcaactaacgaaacagaagaatatatgccttaccctatttcattggctcataagcttgcaagaaagcttacagaagttagaaagaatggtacattaaaatatttaagaccagatggaaagagccaggtaacagtagaatatgatgaaaatggcaagccttcaagacttgatgctgttgttctttcaacacagcatgatcctgaagtatcacaggaacagattcatgaagatattaagaagtatgtatttgacactgtattgccacaggatatgattgacgaaaatactaagttcttcgttaacccaacaggacgtttcgtaatcggtggacctcacggagacagcggtcttacaggacgtaagattattgttgatacttatggtggatatgctcgtcacggcggtggagctttctcaggaaaagactgtacaaaggttgaccgttcagcagcttatgcagcaagatatgttgcaaagaatatagtagcagccggtttagctgacaagtgtgaaatccagttatcatatgcaatcggtgttgcacatccaacatcagtaatggtagacacatttggaacaggaaaacttaacgatgaaaaattagtagaaatcattcgtgaaaactttgaccttagacctgcaggaatcatcaaaatgttagaccttagaagaccaatctacaagcagacagcagcttatggccactttggaagaaacgacatcgatgtaccttgggaaaagacagacaaagtagaaatgctaaaaaaatatatgtagcttacagcgtagaaaagtcttactgcacctgtgcttgcacaaaggtgcagaaaagactttgagacgcgccccgaacatgagcaaaaaagcgaagcgaagcagagcgatatgcgaatgtacgggaaggattgtgtgagtgcgaagcacgtagcaatccggtaagctacagaatattaaatagtagaaaagtcttactgcacctgtgcttgcacaaaggtgcagaaaagactttgagacgcgccccgaacatgagcaaaaaagcgaagcgaagcagagcgatatgcgaatgtacgggaaggattgtgtgagtgcgaagcacgtagcaatccggtaagctacagaatattatagcgtggaaaacagcttggattaccttaatgtaaaggcagtccaagctgtttttgcttgggaatattataagatttgaattgaattaatttctacaccacaccattacactttcctaataagcttcaacagatatggtatttcactttcgaagttcacagcatagttaactgcctctgggtcattgtaagtgttgtttatacaggcttttgtaaagtcagcggcaatttttaaagaatcctgaatattgtaatcattcattaacgctccggtaaaggtgctggcaaaaacgtcgccggtgccgtgggatttcatttggactttgggagtgtagtattcaaaaaactcttttgtttctgaatcgtatcccataaagccgaatttgtggtcagcagattcaacccctgtaataacaatttttttagaaccaagtttggcaaggcttagaagcaaatctttaatacattcattagaagcattttctcccggatatggcataccggtcataaaagcagcttctgaaatattaggaagaataacgtctgcatacttgcaaagctttgccatttttaaaggaaaatctttatcgaaacctgaatagagtttgccattgtctgccattgcaggatcgacgattatatatttgcaggtatttccaaaagttttaaaataatctttcacaagagtgatttgtttttcacttccaagatagcctgtgtaaatagcatcaaaggagaaaccttctttttgccaatgcttcttaataggttccatatcgtcagttaaatcacgaaatgtaaaatcgttaaacatagtatgtgttgacaaaatggacgtaggtaatatggatgtttcaatgcccattgccgaaataataggcagggcaacggtaagtgaacatttacctatacatgaaatatcctgtatgcttaaaacacgtttcatagataatctccgttcgtttacatttttgttataatcaagtataattccttatgtggtatcatacaatcgatattttaccacaaaaatataataccagaaagattaggtttatttatgcttacttatgactttggaaaaagagaaaaaacatctttatatgaatatttgtacaagtgtataaaagaagatattttatcaggaaaaattaaagccaatgaaaagcttccgtcaaaacgtgaaatggcaaaaaatcacgacattagtgtaataacagtagaaaatgcctacgctcagcttatagtggaaggctacatatacactaaggagaagaagggatattttgccagtgatattggaagtcaatacattgagcagaagcccaaagtcaaatatgagaagaaaaaagaaaagaagaaatggcttgtggactttaattcaaaccatataatgtatgatagttttccttttgcaacatggtcaagaataatgaggcagacacttttagacaaagaaaattctttcctttctgttcctgaaaaaaacggtgtaatggaattaagggaggcaatagccgatcatcttcagcattttaggggaatgaatgttaatcctgataacataatagtaggtgcaggaacagagtatttatacagcattattgtgcaacttcttggcagagataaagttatagcagtggaggatccgggatataagaagataggcaatgtatacgaaagtaatggcgtaaagtgcctccacattaaaatagatcaaagaggcatacaacttaatgaactggtggaaagcaaggcagatgcagtgcatatttcaccatctcatcaatttccgacagggagagttatgcctatttcaagaagaactcatttgcttaagtgggcaataaataataagaaatacattatagaagatgactacgacagtgaatttaggttttcaggcaaaccaattccaccaatagcaggaatggagggaaaacgtgtaatttatatgaatacattttcaaaaacactggcaccgtcaattagaattgcatatatggttttgcctgatgaattaatggacaagtttaatacgaaattaggtttttattccaatactgtgtcaggatttgagcagtacacactggctaattttataagcaagggttactacgaaagacacataaaccgaatgcgtaattattatagagattatagaaataaaataataagaactatacagaatcaccctatttacagcaaggtttcaatagaagaggaaaactcaggtctgcattttattttgaatattaataaaaaaatagacgacgaacagtttaagaaggaattgcagcaaaacaatattaacatatcaggtgtgtcagactattgttacaataatttggatgagtttaaacacaaatttataataaactattcggctgtgtcagaggaaaatttaaagaaagctttggatgtaatgaatgaggcattatcagagtaatgaagcgttaaataatagatatgttaatgtagttaataaggcattattaaaagtgtgacattggagaagaaatatgagcaaatataatggtaatagagaatttaaaatcaatattccgggaagcgtaaagcttataatagatgttttggaaaataatggatatgaggcgtttgccgtaggtggttgtgtaagagataccattttggacagagagcctcaggactgggatataacaacatcagctcttccggaacaggtaaaggaactttttaacagaactttggacacaggaatacaacatggaacagttacagtaatgattaagcatgtgggctatgaggttacaacttatagaatagatggggaatataatgacagcagacatcctgaatcagtggagtttacatctaatcttatagaggaccttaaacgcagagattttacaataaatgccatggcgtacaatgaaagagaaggccttgtggatgcttttgatggaattaatgatataaataacaagattataagatgtgtgggagagccggaggaaagatttggtgaagatgcccttagaattttgagagcagtaagattttctgcccagttaggttttgacatagatgaaaaaacaatggaggcaattaagaaacttgccccaacacttgaaaatatcagtgcggaaagaattaaaacagaacttgaaaagcttataatctcaaagaatccatgtaagcttattacagcatataacgcaggtattacaaaagtgatacttcctgaatttgacgctatgatggaatgtgaacagaatacaccataccatatgtataacgtaggtgagcacacaataaaagtaatggaaaacgtgtcggcagacaagcttatgcgttggactgcattgttccacgatgtggcaaaaccattagtgaaaacaacagatgctaatggtagaaatcattttaagggacacgcattggagggaagcaggttggcaccgcagataatgcgcagattaaagatggacaacaaaaccataaaaacagcttcacgtcttatagaatgccatgatgacagacctgcatctaagggctttaatcctgaggcaataagacgaagtgtccataaaataggcaaggatatttatcataattatcttgaattagtatatgctgattttatgggcaaaagcaagtatggaaaagacgaaggctacgatgcctatgtttatgtatgcaagcagtatgaatatataatggaaaacaatatttgtacaagtacaaaggaacttgccataacaggtaaggatttaatagccttaggttgtcctttaggagaaaaaatcggcagagcattggatgaattgcttgaaatagtattgaaagaacctgaaaaaaatacaaaagataaactgtatgtggaagcagaaaagataataaaatcactgtagttctaaacttgagcaccttttcatattttagaatacaagcatgacttgactaaataatttatgggagggtgtgtatgaatgaaagggcacttacggtttttgaacaatatgaattagatattacggaaacgtttaaaatcagaggaaattatggatgtaacacacctgacggaaaatacattttgcaggaatatgataacagcaacgataaaatggtatcaatgaagtctctttataatcatttggaaagcagtggcataaagacagactacgtaattccaaataaggaagaccggtatgtttcagtaagtgaggacggttacacctatattctaaagaaatggtttgaaagtcaggagtgtaacataaatgaggaaaagcatatagtaatgggagctgcaaatcttggaaggtttcatactttgtgccaaaacagccaaagatttatggaggagactaaaggttttcatcccggcaaaaatatgcttgtgatttatgaaaagcacaataaagaaataataaacataagaaattacataaaaaagagaaaaaacaaaaactattttgaactggcattaaaagaaatgttggtggaatattatagtcaggcagatgaagccttaaaggctttaaggcaaacaggttatgggaaaatgtacaacaacgcactagagcataagaatcttaatcatggcagttacaatcatcacaatatagttttacttaacggaaaaattgcaatgattaatatgtcaaaaataaactatgcaccggctattcaggatgtttatgattatttgagaaaagtaatggaaaaaaacaactggaacatagaccttggcagaaaagttttggctgaatatgaatcagaaaaaattataactcaggaagagcacaatattttaaaaataatgttttcttacccggaaaaattttggaaaattattaattattattttaattctaacaaggcgtggtactctgaaaagaatgaggaaaaattgaaacagcttcaaaatcaggaagaaatacgaaaaaaattcatagaaaatatgtgaaaattctatataaaaacattttttgtagtttcctttctttttactttgtattataatgggttagaattgaaaatagttcttggaggtacgaaatggattacaaggagttatatgaactgtggcttacaaatccttattttgatgaggacacaagaaaagaacttgaagccattaaagatgataacaaagagattgaagacagattttataaagatttagagtttggtacagccggacttcgtggagttatcggagcaggtactaacagaatgaacatttatacagttagaagagcaacacaggggcttgctaactatattattaaaatgaatggtcaggataagggggttgctatcgcgtttgactcaagacatatgtctcctgaatttgctgatgaagcagctttatgtcttaatgctaacggaattaaggcatacgtgtttgattcacttagacctacacctgaactttctttcgcagttcgtgaattaaagtgtatcgcaggtattaacgtaacagcaagtcataaccctgctgaatataatggatacaaagtatactgggaagatggtgctcagattacaccacctcacgatgttaacattacggacgcagttcttgcaattacagattatgctgatgcaaagacaatggataaggacgaagctgttaaggctggtctttatgttcagattggaaaagacgttgatgacaaatatattgcagcattaaagaaacaggttaaacaccaggatgcaattgatgctgtacagaaagatattaagattgtttacacaccacttcatggtacaggaaacatccctgttagaagagtgttaaaagaattaggttttgagaatgtttatgttgtaaaggaacaggaacttcctgatggggatttcccaacagtaagttatcctaaccctgaatcggaagaagcttttgaacttgctgtgaaattaggcaatgaaatcggagctgatattcttcttgcaacagaccctgatgcagacagacttggagtttatgtaagaggaaaagaacctggtacatatcatgttttaacaggaaatatgtcaggatgccttcttgctgaatatgaaatcagccagatgaaggaagccggaacattacctgaagacggtgcgttaattaagactatcgttacaactaaccttgctaacgatattgcaaaatattacaatgttaaccttattgaagttcttacaggatttaaatatattggagaacagattttaggattcgaaacaacaggtaagggtcattattgtttcggttttgaagaaagttatggttgtcttattggaacacatgcaagagataaggatgctgttgttgcaacaatggctctttgtgaagctgttgcatattacaagactaaaggtatgtcactttgggataagatgacagaaatgtatgaaagatacggatattggttagacggagttcaggctattacgcttaagggtaaggaaggaatcgaaaagattcagaatacaattgagaagttaagacagcaggttcctacagaaatcaatggttacaaagttctttcagcaagagattacaagcttaacacgattaagaatatggaaacaggtgaagttacagaaacaggacttccaaagtcaaacgttctttattatgacttagaaggtggagcttgggtttgtgtacgtccttcaggaacagaaccaaaacttaaattctactacggagttaagggtacagatgctaaggatgcagaagttaaagaaaaagaattaggtcagtatatgattaatcttgtaaattcaatgttataaaataaaagataaaataagaataaaatacaaacaccataatatatttaaataaagatatattatggtgttttttatgcaaaaaaatagattattaacaggggcacttatattatttctaatgataatagtttcctcctgtggaatagaaaaaataagcagaaaaaagataaaagacatagattttaccgttgtggcagaaattgaaatgcctttagaggtaaagcaaattgtggaaaaaagaaaggaacagccttttaaggttacatattctgataatcaatatacatatattatcattggatatggaagacaaaatcatcagggctacagcattaaggtcaacaacctgtatgaaacaaaaaacggcatatatataaaaacagaatttcagggaccaaaggagtattccaattctgagaatgtaacatatccatatatagtagtgaaaatcgagcagacggacaaaagcgttattttcagtgaataacaacagatagtggcgtatataagattattaaaaaagtatgatttttatagcatgataatataagcaaattaggattaattaaaagggggagtttaaatgagattagaaaagaaaaacattcatatgaacaaaattgtaaaaagagaaacagttattttttttgttagcagagaggaacgaattatggatgctgacaatgagattgagaacataatcaatcagaaagaaatagttacaacagatagcgttgttacaagagaaaatcagattacggtaaacggaacaattaactacaatattctgtattatccaaagaactcggaaatggtttgtggcgaggaaaaggaaataaattttgaagaaaatataaagttaatgggaataaattcagaagacaatgctaatgtagcaatggaagttttgtcttcatcaataaagcctgttgatgggaaaaactacatatacaggattcagttgaaagcatacattatagttgaaaaaatcgaggatttagatattgcaactgcaatagataccgattctcaagaagaaaattatgaaaataattttgcaaaagagaattcaggaaaaaacaatgttgaaaatataatgacgaagaaaagaaatattgacagccttgctattatggcagacaaaacggatactttcagggtaagtgagcagattgcggttccacacggcaaacctccaattgggacaattgtgtggagcgatattagaataaaaaatcaaaatattaagacaatggaaggcagtataattataaacggacagcttagtatttttattatttatatacctgaaatggaaaatatgcctgagcagtggctggagcagactattgattttaacggtcagcttgaaatgagcgaggcaacggaagatgcggtatcttatattgaattgtggcttaataatgtaaacgtacagccggaaattaatcaggataatgaaatgagaaacctgtccgtaagtgctttgcttaaattaaatgtaaaactgtacaaggaaacaagtattaatgttattgaggatgtttataagccgggggctaaccttgtgcctgttatggagccgaaatcttaccagaaacttcttgtaaagaatgcttcaagaacaaaagaagtggtaaaaatgaaaatcgacaaaacaaaaggtcagctattgcaaatctgcaacagtcaggcggaaataaaaatcgaaaatattcttgtaagagataatagtttgaaagcaattggaaaaattaaaacttgtataatttatatttcttctgatgacagacatccaatatgctgccagtgcagagaatctaattttgaacacggaatagatgcggaaggcattgaagtaaatgatgaatattttcttaattggaaagtggagcaggttaacgccaatatgcttaatgctgatgaagtggaaataaaggctgtaatagctttggaagccattgttttcaaaaaggtggagcaaaactttgtaacggaaattaatcaggaaccggttgatatggaggctttaaataatgcacctgttttaaaaggatacattgttcaaaaaggagatactctttggaagctggcaaaggaaaattacacaacaatcgaaaaaataatgacagttaataatctggaaaatgaaacaatcaaaaaaggcgacagattattgattataaaatcttgtcaggcataatgaaaaaaagtatactagggggagagtatatatagtaaattatgtataaaaaaacatatagtctgattatagatgataaaaagataatgaatccatcggaggaatacaatggagaaaatagaattaaaggcgtacggtaagattaaccttggtcttgatgtaataagaaaaagaccggacggttatcatgaccttgatatgataatgcagatggttgatgtgtacgatgacatagtaattacaaaaaataaaacgggaaagatagaagtaaagactgatacggcagttttgtctaatggcaaggataatcttgcatatatggcggcaaaaatgttaatggatgagtttaaaattaaagacggtgttaatatatatattaacaagcgtattccaattgccgggggaatggcagggggaagctcagactgtgcaacaacattaatgggaattaaccagctttttgaacttggtctttcaaaagaagaattaatggaaagaggagtaaaacttggagcagatgttccttattgtgttttaggtggaacagccatagcaagaggcattggagaggttttaacaccacttcctgcaccggctgactgtcacgtaattatagcaaaaccacctgtttcagtttcaacagcatatgtttatggacatataaaacctttggaaataactaaaagaccggatattgaagccatggcacagtctattaaagatggtgatttgaagaaaatggcgtctttaatttacaatgttatggaagatgtaacagtaggagaatatccaattataagtgagattaaacaggtgatgcttgataatggagcacttaactcaataatgagtggaagtggtcctacagtttttggattatttgatgataaggaaaaggcacagcagtgtgttaagactttggaggagaaaggtcttacacagcagctataccttacaaaattccataatgaatagagcttatgacaagcaggttattaattttgacataggttattgaaaaatttcaaatatttaaatttgaaattatattttgttacggtgtgatactgggtatcagacagtgaatcatgtaattttttcttggaattgtcaggtaggacgcccgttgaaacgtcaacaaaacatagtggaggatataggacacaccaccagttgtgtccttttccattgccgattttaatggtgtatgaagtataggttcccttaggaaaaatcacgtcaccatatgtttttacgggaaaatcgctgaaaccgaaagttgaacttacagtgtaatcatatccattatcagctatggcttttgtggcgattgattttattgttttgtcattattaagaataaagttttttgcttcatcaacggttttaaaatcgccggttttttcatatatgtagttaacaacagattccttgacacgcattttcagagcctggtcacttacagagtcactgttggcaagtatatgaaaacgaatggcactgtgagacagtaccgaaacagttgatttggtttcaagattcagaaaaatgttccaggttaaaatcccggtggcaaatatggcaataaccatacaaaaagatatttgttttatatatttcatggtaatctccttttttaagcttgttttcataggagattattgacaataaaggcataagttatacaaacatattgaattattttcagataaaaggtaaaataaaacgaataaataagtaggtgtaaaggtatgaatgataaaaatgcagcaattggagtatttgattcaggtgttggtggattaacagtggcacgtgagataataagacagcttccggaagagagcattacatattttggtgatacggctagagttccatacggtagcaagtctaaggatacgattatacgttactccagacagattattagatttttgaaaacaaagaacgtaaaggcaattgtggttgcgtgtaacacggcaagtgcttttgcccttgatacaatagagaaagaaatagacattccaatcatcggtgttgtaaaaccgggagcaaagtcggcagttgaaagtacaaagaacaaacgtattggaattattggaacagaagggacaataaaaagtgagttgtatacacagtatatccacagcattgatcctgaaattacggtggtgggcaaggcatgtccattgtttgttccgttggtggaagaaggaatgcttcacgattccgtaactgacgaggtggcttcaagatatttggaaagtatgaaagaagagaatattgacagtcttattcttggctgtacacattatccgcttttaagaagcacagttggaaagattatgggacctgaagttaatcttgttaatccggcatatgaaacggcaataagtcttgatggacttttaagacagaatggcataagagcagacaaagatgcaaatccggaatatgaattttatgtcagcgatgcagaagagaagtttaaagaatttgccaattcaataatgcctcttcacattgaaaagattaatcagattaatatcgaagagtattaaacagaatggagcagaaatgaataataatgtattgattaaaatctccggtcttcagatggtagatgacacaggtgataacgtagaatcaatgtctgccggaaagtattatttaaaaaaggacaaacattatgttctttatgaagatatggatgacgaaaatgatgaaataacaaagaatacaataaagtttaatagtgaaacagtagaagtcacaagaaaaggtcttgtaacgggcaagcttgtttttaaaaagggcaaaaacaaccagtccctgtacagcacaccttttggcgacttgctgatggaagtttatacgaaagatatacttcttgaggaaaaggaagacaacattgacttaaagatagactatgaactttatgccaataacagcaaagtttcagacagcataataaatataaatatccgtgaaacggtataggagttgaggagttgcattaagatgcggctccttgttatttggtgctgttgttaaaataaatagagagtacatcaaacgatgtactctctagctttacgcagatattactttctgccaaatctcttctttttcttaggtggttcataaatcggaccacggattctcttaaatgaagtaatgtaaagaccacttactgtagctttaatgtcctgcttaggaagaatctgttcgtaaaccttagggtcagcaataagattcataactctaggacctgcctttactttaacaataggaacctttgatattcttgcatattttggagactgttccaaaacaatacttggaagaccggcttccttaagttttaatttctttttatcaattacaaaagcattgattgtctgagcgttagcttccatagttttctgctgttcagcctgtttcttttcagcattacgtccaaagaaataaagaccgataagagcagcaacaaggactactaaaatcacaatcaaaacaatgctccaagtagcaagtgctaatactggtgtgtttgtaatcattgtgtacctccatattaaattatcataatcttgtgatattttatcatttaataagtaattttacaatagctgttaaagctggttacttaatttttttacctgttcataggcttttcccggtaaaagcttctgttcagcacggtccatgtctgttgtgtaaataggtttaccaaaggaaacaataaccttacctgatttaataaaaggaaaatgattttccaaaatatcgttagttccggtaatgcctacaggaactacaggagctttggacttagttgctattttgaaaccgccatccttaaattcacccattttccctgtttttgaacgtgtaccctcaggaaaaagaaaaacggaaataccggatttaatcatatcagcagctgaaagtacagctttaagtccgttccttggatcttttctatcaagaaaaatacagttaacaaaacgcattatccaacttaaaaaaggaactttttcaagttcttttttcgcaatatatcctgtaggactaatcattaaaggatatgttactacaatatcaaagaaactgatgtggttggcaacaaaaagacatgcctgattaggaatgttctcttttccgttaacttctaatttgacaccacttaaaaatgaaacacattttagaccaaattgtacaaatttaagtgaagaacggtttcgaaggtccatattaaaatgttgaataatccattcaactagcataaccggcagcgaaactataaaaaatattataagaaatactgcaactaacaaaagtcttatcatataaatttaccatccttaatataataatgtatgggacaagcactacatatgtagatatgatttgaaaatacaaacataaatatgtatatttgaactttttcccacagatatatatgttatcataaaacaaacaataattgaactgattgtttgaaaaagcatggcatataagtataaagaataatagagagataatctgagaaaataatttatgaatgtcagggagataatctgagaaaataatttatgagtgacagagatataatctgtgaaaacataatcttgaatgaaaagttggaattggtaaaagtgtacagttattttgcaaaataattgtaaaaagtgttaaaataacggataaaaatgtttttatttattgaatatactatatgttcgtgctatactcagcatatgtagcgagtaggattcgcaagtaaagaggaggaataataatgaagagtttaaagaaaatagcagcagttgtagctacacttgctttaacagtaggaatgacagctaactgttttgcagcaagctggcagagttactttggtgtaaatgaagcttggtttgaaggtgcagaaggaaaattaagttcacagtcagcaacaggttggacagcagatatgaagacaatcggttggggaggatgctggggcgctcaggttaagcagtcagttaaagttaaaaaaggtgaagaatacacaatcaaatacacattatcatcatctaagtgtgataaatgggtattcgttaagattgctgataagaaagaaaactttgcttatggtaagtgggttaaaattaaaaaaggtaaatcagtatcagtaaacgaaacattcaaggctacagcagattcagatacacttacatttggtatcggtggtgaatttggtgatagaaagggtattgataaagatgcaacaaagagatattcatatgcatcaggcggagctgcttcattaaacgatggagatcctacatattcaacaacagtcaagtgtacaggattctcatttgaaggaaagtcagcagcaagcacaggaacaaatagcacagacacaaacacaaatacaaacacaaatacaacaggttctacaggaacaactaacaataatacaacaagcacaacagtagcaactggtgatttctcaccaatggcatgtggtgcagcagcaatcttagcaggagttgcattagtagtatttgcaagaaaaagagaagcataaaatataaaagcttatttagaaagccgcattcagaaatgaatgtggcttttgttatgtcaggaaaaatttaaacgattttatgaatcactgaaaataatttttaaaaaagaaatgaaaaatcgtttttgtattgattatataaagaaaaatcaaaaatttaagagtacaaaaaatgggacttaaaaacgattttaaaggcacaatatacggtataataggcgaaacgaaaacaaaatatagttattgtgaataacttaacaaatccccgttgtgtaaattagtcaaaaaatgagcaagttatataaggggacaatttataaaatgtgaaaaatacacaagaaaaagaaatgaaaaatcgtttttaattgttgatttgtacatattgttgtgctaaaataagttttaaggaaatcactatgtgaattctaatgtaggtgaaatgattttatcaaaaggtaaggaggaaaaatatgatgaaaaaatttggccgtaaagcattagctttatcattaacagccgttcttggagcatcaatggtgcttacaggatgtggcaaatcaaagagcgaagacaagaagggtgaagacacaacagcaaagattggtcttacaacaggtttggcttctgacacaacagcagatatttctattatgacttggtcaggagatagcaaatattatgaagatatcggaagtatggatttatcaactgataagcttacatcacagaatgtggctcaggtttattcagtagcaaaacagtttaaaaaactatatcctaatataaagattaatctttgggcaaagacaggagatcctgatcagccgggtacaccaaagtgggaacaggaaatgacatcatttaaggctaagtatggtaaataccctgatatctgggcatcaactagcgtaacaaatgatattaagaaaggtcttgcagcagacttatcagtattcaaggatgatgaaacatacaaggcatacaataaaaaccttatgagtaaccttaactactacggtttccagggtggattaccatcattctcaatcccttggggtatttgggtaaacaaagctttagcagaaagcaagaacattaacgttcctgatcctgactggacaattgatgaatatacaagattcttcacaaagtcagacaacacaagcttctggggtgacaagagcacacctgttaatatcattaacatgggaacaacaacaattaataagcagattaaagaaaaaggtacagttgatcttgacaacgatgaagttaagtcattgttaagctacattccaaaatgggctgcttcaacaatcgacgttgctgaaggtgcaggaacactttcaaaagatattaagattgaaagcaagacttactcatggtattacttctgtaacaacagatgtttaacaaacattacagatccttggtacttaacagcaggtgctgatgaatcagctaaggaaagcgaatcatacattgattcaaaagattgggatatttatccattcccatcaacagattactgtggaaatacaatcaaggtagttatggatccaatttgtattcacaactatgcagctgatgacggaaacaaagaatggagcgatgatgaaaaagcaaaacttaaagctacatatacattcgctacatactggacagcaagtacagaagctaagcaggctatcttcgatcagaagtggactgacaacggcgctgaaaaatcagcagcaggagattcattccctgtagtaactggcgatacatacaataagcagatggatatctggaacaaccttccggcacataagacatacaaagataaagaaggctggaaagaaatcttaaaactttgggaaaacaatgaatcatgggattacattgacaagtgctggacaagtaagattactgaaaagggtgaaacgacagatgttctttatgaatggaacaatatgtggaaagaagaagttgcaggtgcttggatgactgataaggactggggagacaaagttaaagcaagattatcagattggaacacaacaatcaacaaacgtatcgaaacagctacaaaacagttacaggataagttagttgaaaactacaacttcgataagtcaaaattcacatctgacaacaaataagattgaaaatgactgattaaatcaaataataattgcggaactgcaaaaagcagttccgcttttataacaagtagaaaggacaacaatgaaaaagaagattatcgcaattgtaattggaatactatgtgtcattgttgcagctataggtcttttccagtttgcattcaaaacaaaagcaacttatgtaaaagatgcagatagtgataagtttaataaagcatatgatttattggcaaatgcatatcttgaggatggcgaagaagctgacgtatattatacagactttataaaaaagaatactgaagccggagaaggggagcataaggctacgttaactaacggagtggattcggttaagtattatgaagaaaacaacaatgaagacaaccaactaccagaggacgtaaaaacatactctgataaaatgattgaattagaatatcagaaatcagctaactataaagtaaatgtagaaaaagcaggattatatacattaaatgtagattatatttctgttggtgattcgctttcagattatactgttagcgcaaaagttaatggaaaacatcagtattcagaaactaatactatagcattaccaattcattggacagatgttgaccaggacaaatatatcggaagtgatgatcagaaagaatttccaaaagacagctatggagatgaaatggctcctagccagtcaagaattcaaaaatgggttaatacaaatatttacaataatacttacgtatcaagcaaaccacttactttctatttaaaagaaggtgaaaacacaatttcacttgaaaatgtatcttcaggaggattggctttaggcaagctgacagtaaaggcagcgacggatgatacaatttcatatgaagaatatgctgcacagcatagtgatgcagaattagtaacagacaaggaagaagcattacagattgatgctgtttattattcagaaaagaattctacagatgcaatatatggcacaaaggtcacaacagcacttacaagattcaacatagatacagaaaaactaaatactttgcactggagtgcagcaggtaatgaagttacatatacattcaaagtaaagaagtcaggaaattacaacttagctttccactataataatggaaagaaagaattcgatacttttgaaacaattaagattgacggccaggttccatttaaggaaatgtataattataagtttaatccggtttcatcaggatatgctaatgaaacacttaaggattcaaatggaaacaactacaatttctattttgaagaaggaactcacacaatcacaatcaagcaggaaaatgaaccaattatggaagcatatagatatgcattacttttacaggaacatatcacaaacttccagttggaaatcacaaagattacaggtagcgatgtagatactgaaagaaactggaagatgacaaaatacattcctgaaattccgaaatatttaaatgcttatgaaacagtaattcagcatatcagatatttacttcaggattattcagaaggtggaaacagtggtgcagttttagcttacttagatgaagcagaacagtttatcaagactatgaagaagtatccggatgacattgctcttcatacagcagacttaacaggtgcagagaactcaatcctcgtttcattaagcaacttcacaacagaagtaacatcaaatgattttacacttgatagaatttatgtgtacggagacaagagtgaattagaaagtcctaatgcatcatgggcaagctcattatggacgtcaattagaactttaactaatacatttacatcttcaaaatactcaacagatgtatctgacaaagataaggatacaattactatctgggttaacagagctattactcacgtagatttattacagaagatagctgatacagaatttgttccttattataaagaaaaaacaggaaaagatattaaagttcaggtagcaacaatgcctgatgtaaacaagttaacattggcaattgcggcagatgaaacaccggacattgctttaggacttgcttcatatgtaccatttgatttgtcaagccgtggtgctttatatgatctatcacagtttgatgatttctggacagtagcaagaagattcccgacaggatcatttgtttcatatgtatataatgaaggaatgtacgcaattcctgaaacaacagactttaatgcagttgtttacagaacagatatctttgatcagttaggacttaaatgcccttcaacatggaatgaattgatagacattcttccaactctccagagatatggtaagaacttctatcataatatttcagcaggtgtttcaggatacaaatggttctaccagacatcaccaatgatgcttcagaataatggagaactttatacacaggatgaaaatggtcttgtaacaacaggtattgattcaaagaacgcagttaagggacttcagcttttaggagatttgtttacaaaatactctcttgatacatcagtacagaacttctttaactcatttagatactcaacattgccaattggtattgtaggtatggaagattatacattaattaagaatggtgctcaggaattggacggtaagtggaagcttgccgaatatcttggaacagaacaggaagatggaacaattaacagaaagtttgttgccaacggaacaggtggagttatctttaagaattctgaaaagaaggaagcttcatgggaattccttaaatggtggacaagcaaagatgttcagacagaatacacatacacattacgttcaacatatggtaagacatatttctggttatcagccaatatggcagctcttcacaacaatccaatggatgaagctgacaaacaggttgtattaaagcagattaatcaggtaactgatgtaacaagaactcctggtcagtacttacttgaaagaacaatttctaatatttggacatcgatggtattcgacggtacatcagcacaggtagcagttgatgaggcaaagaacgatgttaacaaagaaattgtaagaaagatgaaagaattaggattttacgatgaaaatggaaaacttataaaagatttcaaacttcgtggatatgattggattaaacagaatcaggataatgcaaaagcagataaaggagaggaggtaacacagagtggaagcaactaaagacattgcaacaaaaccggctaagccggcaaagataaagagcaataaaaagtttacagaaactgaaggttttcatgcttttgttctgttccttccttacggattattgttttttacatttatcttattacctattattattgcaatcggattatcatttacatattttgatgtaattaatactccaacttttgcaggacttaacaactacatcactttgattacaggcgatgaggtatttatgaaatatgtattacctaacactgtgctttacgctatcgtagtcggtgttggtggatacgcattatcattccttatggcatggattcttgctcaggtaacacctagagcaagaacactatatgcgttagcaatgtacacaccttcaatggtaggtcagttaatgattcaggttatttggaagacaattttctcaggtgaccagacaggtttggcaaacgcatatttacagaaactgggattaataaatcagcctattcagtggttgatatcatctgattactttatgcagattatgatttttatatcgttgtggtcatcaatgggtattggtttcttatcaatgctttcaggtattatgaacatcgaccaggaattatacgaagcagcttatgtggatggtattaaaaatagagcccaggaaattatttatattacagttccttcaatgaagccacagatgttgttcggtgcggttatgtctattgtaaacgcatttaacatgggttggattggtgtaacattggcaggagcaaaccctacaccggattatgcaggtcagttaattgctaaccacattgatgattatgcctacgttagatacgaaatgggatatgcatcagcggtatcagttgcattgctttgcttagtttggatttgtagtaaagtagcaaacaagttatttacagaaaaagatgaatattagaaaggaggatacataaatggcaaattttcaaggtaacagaattaacccaacaagattttcaagcggccagattaagtttcatattatagcatttccgctttctatatttatgatccttccggtagtattccttattggaaacgcttttaaaccacttggtgagttgtttaaatttccaccaactatttttgcacacaacccaacattggacaactttaagaatcttatgaacttagcaggttctacaggtattccaatgtcaagatacttcttgaactcaatgatagttactgtgcttacagtagttcttaacttattgattacaattatggcagcttatgttttctcaaagaagaaattcaagattaaaggtgctttatgggaaatcaaccagatggctcttatgttcgtagccacagcggtttcaatcccaagatacttaattatagtaaaaattggtgcatacaatacatggtttgcacatatccttccacttattgccatgcctgtaggtttattcctggttaagcagttcgtagacggaataccggatgcccttattgaagcagcggtagttgacggagcaggagatgcaacaatcttaagaaagattatcatcccattaacaaaaccggctcttgcaacatcagtcgttttaacattccagcagatatggcagaacgtggaaacatcaaacaactatataacaaacgaagcattaagaacattgacatattatgtaaactctattggcacaaacaatgcagtggcagcatcaggtatggttgcggcagccaacttgattatgtttatacctaacctgattattttcatctgcatgcagtcaaaggttatgaacacaatggcaagttcaggtatcaagtaaggagaagggcacatgaaaaaattattgaaaaaatcattagtgctgttcctggcactgatatttgtagtgatgtctgttcttcctgtagcagcttctcaggcaacaagttattcatatacacttgatgacgaaggggagttagttagaacacaggatgcttacttaccagacagaactataacaaacctcggattatccgatccggaagatatgattatagatgatgaaaataatgcatatatcgttgacacaggtaatgcaagagttctcgtttataatttggatgatgaaaaagtagtaactcagattgataaagatactgttggctcaaaagattttgaaggctttaactcacctaagggaatttttcttacaaaaagtggtgaagtttatatagctgatacaggagctaagacagtattcagattcaagaaagttaacgaaacaaaatatgaatttgtaagacgttatgacagaccaacagcaccaatcttcgcagatacaaactacgaaccaagtaaggtagcagttgatagtggtaacaatctttacatagtttcagaaggtgtttacgcaggtattattcagcttgctaactcaggtgaatttttaggatatttcgcatcaaataaatctaaacttacaccacagcaggttttccttaaaattatttatacaaaggaacaggagaaaaactcaactttgttaaatactttaccatcaacattctcaaacgtttttgttgatgcagaaggaacagcttattcaacatgtatgggtaagggaagggaccttttaaagaaacatagtacaaatggaacaaacttatttaaaaatgttattgcttcatcggatgcatttacagatgtaatagcagattcaaatggaattatttatgcatctgactcaaagggatatatatatgtatatacaagagacggagagttgattttctgccttggtgaagaggcaggtaacaatgacgtgtcaggtttgttctcatcacttacaacaattgctgttgataacaatggaaacatttggacagcagatggtaagaagggatttatccagtcgtttacaccaacagaatacgcaacaacaatttataaagcattacaggaatatgaaaacggtgattacacagatgctcttaaagattggaattacgtattaagattaaaccagatgtcagttttggcacataacggtgttgcaaaagcttattataacgatgaagaatatgataaggcaatggaacattttgaaattgccggaaacagaagcggttattcaaatgctttctgggaagttagaaataaaggcatccagaaggaccttggagcagtattaacagttgtaattatcttaattgttttgagtatagttattaaacttgttgataagaagaaagttttaagaactaagagaaaacagtttggaactaaactaaaagaacttcctgtaattggagaaatcggttatgcatttaagtgtgctaaacatccaattgacagatattatgatataagagttggaaagaacggatcaatgattgcagcaacaattatttatgtagcattctttgcagtatatatgatttatcagacaggaaaaggatttatttatcagtatacaagcgttgaagatatggatatgggagccgtagtagttggtttctttgctatcttaattctcttcatcgtatgtaacttccttgttacatcaattacagatggtgacggaacattaaagcaggtatatatgattcctgcatatggtattatgccattaatgatttgcatgattgttacaacaattatgtcatacgaattaacatataacgaatcatttatcttgacagttattatgatgatcggtggtatttggagtatcgcagtaatatttgaaggactttcaacagttcatgactatgactttaaacagacagtagtcagccttattattacagcagtatttatgttaattgcggctatagttgttcttgtagtaattattatgtgggaacagttatacgacttcttaatcacagtaggaaaggagataataagaaatgttacaggcagctaaaaagaataaatttaaagcaacagcaatcattgtatgtctcttatgtgtcctttcactttgtgtagcagttggcgctgcattcattaacactaacagagatacaagacctgtacctgatgttgcaaaatcttcattaaagtattcaaatgcttacgaagaattatgcacaataggagattacaaatatcttttctatgaagacagagatatcttagcaatcgaaaatacaaaaacaggatatgtttggaaaacaggcgtagacgttcctttcttaaatgaggcatgggaagcaagagatattattacagatgctaaggaaagcggtgataatacagaacttaaagactatgctaaagaaaagaatatgacaatagcagaagtaaaaaaaatggcaaactgtgttgattcatcatttaacagtagccagtatacagcttttgccaattctcttgtaacagttgaatattttgaaggctcaggagattcaatgacaacacagagagcatcatcagcaccagaaaagaagagccagggcgaatcacagcttactaagggaagcagtgaaaacgaatgggttttggattgtaagtttaacattgatgatgaagaattaggcgttaaagttcatatgactttaggcgaaaatggaaaggttaactttaaagttccttatgaagaaattacaggttgtattagcaagattaaatgtatcgaaattgctcctttcttaggaacaagcggtggtattcttaaatactatgataaagatgcagatgattttgttaagacagaagtgaaagaacttacacctggttatgttttagttccggacggaagcggaagcttaatcagatttaatgaaaacaagacaaagtttagtgaatacaatagtaaggtttatggaacagatccatcaacagaatctaactactattcatcattagatgatgttgtaccacttaagaatccaacaatgccggtattcggtatttcacatggtgatggtacacaggcagcatttgtagcttatgcagatcagggtgatgagtatatgtcaattaatgcagctcctgcatcaacaactgatggagaaattgcttacacatatgcatatgcatcattccagtacaacgctgaatacttccaggttataaaccaggcaggtgattcatatcgtaaagtacaggataaacctaataagtttgatattgacttaacatatcagtttttagagggtgacggcagtgatggttacaaagctgattacacaggtatggctaaggcatacagacagcatttaattgatgaaggaattttaactgaaaagtcagttgatgaaaagaacattcctattagaattgacttccttatgtcagattctaagaagggggtattctcgacacaggaagttgaagttacttcagcatcagatgttaagaatattttaaatcagcttaataaagatggtattgaaaatattaacacaggacttataggatggcagagaggtggagaaacattatcaaaacctaacagcactaagttctcaagttcagttggaaagaagaatgaatttaagagtttaatgtcagaattcgctaaaaagggaattgatatttcattttcaagagagttctcatcaataaacgaaacaatggttaattattatggaactgcagcaaagcatattaactcacagtatctctcagtagataagtcagaagttcttccaaagaacgttcctgttacagaatacggatatgcaacacccgctaagacagcacagtggattacagatttgtatgaagatttaggagacttaagcggttcatttacaattgacggagcatcaaacattcttttaagccattataagagtgatgacaataagacaacagttcagaatactgtaaaactttatcaggatgctatttcaaagattcagaagaacggaacaaagacaaaccttgtaaatcctaacaagtacttatggaaatatacagaccgttacttacagtcacctgtaggaacatcacagtatgtatatgaaacagatacagttcctttcttacagatggtacttaatggaacaatggaagtttatgcaccatatgctaacttctcattctatgcacagacagatatgttaagaatgattgattacaacatttcaccatcatttgtcttaacacagaaaccatcatacttattaggttcaacaacttcatcagattactattcaacagagtttggacagtatgaggaattagtaaatactatttacaatacagttaatacaccattgtcacaggttattaattataactgggatagcagaacagtttatagctgggatggaaaagaattaacttcagcatcaaaagatgctaatggtaatgaaacagatggtggtataattgcaaaccagtattcaaaggatggagatgtgaagacaattattataaactatacatctgatgaaattcaggttaatggtacaagcgttgcagcaaacagcgcagcagtagtagaaggaggtgttaagtaatggctgaaaatacaaaagtaacttcagaagaagttaaagaagaaaaagtagaaacagcaaaaacttccaatactacaaagaaaaaggaaacaaaagcacctaaaaagaaaaaaatgagaacttatcagcagagacagaatagatcaggttacatgtttatggcaccttggattttaggtttttgtgcttttacattgttcccgttcgtatttacaatttatttaagctttacatctgtagcttcaactaactggggttacaagattgagtttataggtttaagcaattacattaatgcatttgttggtaaccaggaattcttacctgcattactttcatacattaagatgattataccttacacatttatagtagtagttttatcattcattattgcttacttactttgcaagattaatgtaggtaaaggaattttaagaactatctacttcctgccggttattatcatgtcaggtcctgtaatgtcacagttattaactgtacagaatgcaggagatcaggcagcagaaaaaattgcggcagtaacacagcagactaacgcttattcaaatattttcataatgcagattattgacagttactcacctgcattagcaaatggacttgcaggaatatttgatcagctttcaattatactttggtttacaggtatcccaattgtattatttatcaatggtttacaaaagattaacccaagtatttatgaagcagcaaagattgattcagccaatgcatggcagattatgtggaagataacaattccaatgattaagcaggttggattaattatcacagtatttacagtaattcagttaggtatgtatgattcaattaaccctgtatacaagttaatcgaagaaaagacaggtgaaacaagttcaggacttggtttcgcagctacatacgcatggatttacagcctgttagctcttgtaatgataggaattgtattcctcatattcagggatagaaaacctaaggacattaaggcaagacagaagcaggaaaagaaattaaagaagctggaaaagcagcagaagaagagattagcttcacaggcaagacatcagaagaaggaggcaaagttatatggcaaataaagatagcagtgcaaagaaaattgatttgtcagcagtaaagaaaatcaactttgccaaattaaagagattaaaggcagtaaatattattgcaaaagcagcaatttactttttacttatctgtattggattcgtattcttacagccaatatttgagatgatttcaaaggcaattatgacttctaaagacttaattgatccttctgtaacatggattgcaaagcatgctacacttagtaactttaaaaacgcaataaaaactcttgaaatgcctggctcattgtttaactcaatctggttttcagcattgttggcattagctcagacagcagtatcacttacaacaggttttgcattatcaagatactcatttaagggacgtaatttctggtacataatgttaatcttagcatttattttaccaataccacttcttacaatcccaagaattatggtatttacggaaattgaatctattgtaggatttaaggttattggaacaattattccacagttcctaatgtcattattaggacagggaacatattcaacaatgttaattttgattgcgtttaacttctttaatatgatacctaagtcattagatgaagcagccatgattgacggtgccggttcatttagagttttctatcatattgcagttagattatcaatttcaacaatacttgttgtattcctgttttcattcgtatttaactggaatgaaacatatacaacaaacacaatgcttggtgatgcattaactcttgtacctgcaaaacttgcattattcgataatggttcaacaggggctacaggtaacgtagtaaacgaagcaaaccgaatggcagcaacacttatttcaattgctccattgttggcattgtatatggtagtacagaaacagttcattcagggtattgaaaatacaggtattaccggtgaataaaaatattaggaacctgcaatgcaggttccaatatataaagaacgtgatgtttattaaaaaggaggaaacaatgaaaggatttaagaaattagtttcagcttttcttgttgtggctatggttgttactcttgtaactattacaccaagtacagatgcaaatgcggctgttacaatttactcaggaaagaagattactttaactattggtaaatctgaaaagatttacttaaagcagaaaggtgctaagtttaaaacaagcaacaaaaaagttgcaactgttaacaggaaaggtgttgtaaaagcaaaaggcattggtacatgtaaaatcaaaatcacagtaggaagcagttcaaagaattctaaagttacagtagtacctaaaaatgtaacaattaaagcagctactttatcaggaacaacagcaaaggttacttggaaaaaggtaaaaggcgtaaaaggatactatgtatacaaatcaacaaacgctaacagcggatttaagaaagtagcaacagttaagggtgcaaagaagacttcagcaacaattaagaatcttgcatcaggaacaacatatttcaaagttaaggcttttggaaaatcaggaaagaaaacaattacttcaaagaaatattcaaaggctgtatcagttaaggtttggaaattagtatggtctgatgaatttaatggttcatcacttgacatgaataactggacttatgagacaggtacaggcgatggcggttggggtaatcaggaatggcagacttacacagcaggagataacgctaaagtagaaaacggtaatcttgttatcattccaagaatggaatggaagaatggtaacaacgctccatctaaggtaacttcaacaagaattattacaaagaataagaaaacatttaagtatggtaagatggaaatcagagctaaagcagcaggcggacagggaacatggtcagcaggctggatgttaggcgatggaacaggtgaccagagaggttggccatatgatggcgaaatcgacattatggaagctatgtcaggtggagtcccacagactatccattgcgaaagattcaacaaccagtcatggtcacatggtaataaaaactatgctacaggtttaacacaggctaagagtgctgaggcatatcatacttatggaattatctggacagacaaatatattcagtttacagttgacggagtaaacaagggattatatgatccatcaatgtacgacgcaagcatttatgatcagtgttgggcatttgatcatccattcttctttattttaaactgtgcagtaggcggaaatgctgcaggtgaggtttcaacagatggatggacaaacaagggaactgtaaacggagttacaacatgggaagattactactatgttgattatgtaagagtttaccagtagaaatctaataagaaggatagaaaaaatcaggcaggtcatcctgttgggtgacctgcctaaaaacactaaatgcttgaaacgtttagcaggaatttgaaggaaaattaaagtaaaaataaaatttaaacaaaattgaaaaaaaggggttaagcaactagggaggaacattgtatggttacaattaaagatgttgcacgagaagcaggtgtagcaatttcaacagtatcaaatgtatttaacaatggtgacattgttagtgaagaaacaaagcagaaagttttagaagctgttgaaaaactgcattatatacctaacatgaatgccaaattattaaaatctaatagaaaaaatactataggactttttgtaacaagtttacagggtgatttctataacgtattaacacaggcgattcatttacagtgtaaattaaataattatatgcttaatatttacgtaagcaatgataattcaccggatgaaatttatagaatgattattgcatcaggtgtagcaggagccattatttatcatgaagatttgacaggtgattatgtaaaaagaatcgcaacagtcaatattccaatggtatttattgacagagacagtaaagacaaaaacatttcaggtgtattagttgatgataagcttggggcaacaatggcagttgaccatttaatcaaacttggtcataagcgaatcggatatattcacggaaatgaaacaggagatgataagcaccgtttccagggatataaggaaatgatggaaaaaaataatcttccaattgatgaagacataattttaagaggatattacgaagaagcattagcatatagtgaaatgcgttcaatgttatcaagtggaatcaaacttcctgatgctatgttttgtgccaatgatgaaatggcatggggatgtattcaggcattacaggacgttggaattaaggttcctgaagatgtaagtgttatcggatatgatgatagtactttaagtgcgtattatggagttccacttacaacagttcacagtccaattgtcgaaatgggtagtgcaagtgcaaatgagttattcagattgttaaacagtgagggagacaaaagtggcacagtaactaagttgtcaccaacaatggtttacagaagctcatgtggaaagcataaggaacgcaaataataataaatattaataataaaaaaggttaaaattattcagttgggaacgcagttgtacaactaaaggaggaatataatggaaagttatagacttgaaggacagacttttgttatagatgattatgacagaaagccggctttttccagttttttaccaggtcttgcaggagttaagggaattccactttggacattctacactaacagaggtcagggaatgaacagttttggtattgacaataagggtaatgccattatggaatttaattcagctaacacagcatttgaaaatactcaggtaaaaggttttagaacattcttaaaaattgacggagaatattatgagccatttttcacttatgaaaaagaagcaaaacgtcagatgagaatgaataagaacagttttaagataattgaaacaaacgaaaagtatggaatagaagttacagttaattactatgttttaccaaatgaaagcataggagcacttgtaagacaggtatctgtaaagaacatcggagacagtgctaaagaagttcaggtaattgacggccttccaaaaattattacatatggtatcgctaacggcgagtttaaagaaatgtcaaacttatttaagagttgggcagatattagaaatcttgaaaacaaggttccatattatacacttagagcatcaacaaaggattcagcagaagtatctgatgttgagggcggatattactatttaacagtaagagacggaaagttacaggatgtaatctatgatgtagatacagtatttggatatgatttatcattaatgacacctgttaactttattgatggttcaattgaaggtgttctttctaaagaacagtgctttgctaacaaggttccatgtggatttactccatttaaggaagttgttgaaccaggcaaggaattagcttttgacacaatgatgggctttgcaggttcaacagaacagattaatgcaaaacttgatacattctgtggaaaggattaccttgcaaataaatttgtagaagcagaagaattggtagacagttttacatctgatgttaagacacatacagcagcaggaaagtttgatcaatacattgaacagtgttacttagataacttcttaagaggtggttatccatacgtacttaacaaagatggaaacaagtctattatacatttatttagccgtaaacacggtgatcctgaaagagattacaacttcttctcaattgccgctgaatattactcacagggtaatggtaacttccgtgatgtttcacagaatagaagaaatgacgtattctttaataaggacgttggagaatttaatgttaaaacattctttagcttaattcaggctgacggatacaatccattagaggttcgtccaagtcttttcaatataaaagaaggaaaagaagatgaagttaaggcatatgtagctgatagcatttcaggtgatgctacagcaattcagaacattgttgcaggtaaatttacaccgggacagatttctaatactattgcaaaacttcagttagaattaaaagtagatgatggtgactttatcgcaaacattcttaatgattgcgaccagaacattgaagcaggttttgctgaaggctactggagtgaccactgggattacaacatggatttagtagataactacttatctattttcccagacaaattagatgaattagtatttaaggataatacatacaagttctatgatagcgtagcttatgttgttcctagatcagaaaaatatgtaatcaacaagaagggtgctgttcgtcagtatggtatggaagttgaagatgaagctaaacttgcaagaccaggatttaacaagtgggcgactaactggttaaagactcctgatgaaaagatttataacacaactcttgcagttaaaatgattacattggcacttagcaaattcgcacagttagatgtggatggtatgggtgttgaaatggaaggtggaaagccgggatggaatgatgccatgaacggacttcctggattatttggttcaggtacacctgaaacatttgaattaaagagattaatcaagtttattactgataactttaatggtagcgaaacagttgttatgcctgctgaaattgcaaaatacttagatgatgttaaggcagttttagacaagtacaacaacggacaggtttcagactttgaatactgggatgaagttgctactatcagagaaaactacagagaaagcgttaagttatacttaagcggtgaagaaacagaagtttcaaaagactatatcaatgaagtattcagcgcttttgcagctaagattgataagggtatcgaaaaggcagttgaaatgggaaatggccttgttccaacatactttacacatgaagcagttgatttcgaacctgtagttgatgaaaatggaaatcctgtaatgagccattatggattacagaaagcagttgtaaaagaatttaagacagttgctcttccatatttccttgaaggacctgcaagaatgatgggaaatgtaaatgaagaaacagctagagaaatgtacaacaatgttaagaagacaggtctttatgatgaaaaattagcaatgtacaaaacatcagcatctattgaaggatgttcaatggaagcaggacgttgtagagcatttacacctggatggcaggaaagagaaaacgtattccttcatatggaatataagtacattctctcaatgattagagcaggaatttgccctgaattctacgatacaattacaagagcacttattccattccttgatccaaatatgtatggaagaagtacacttgaaaattcgtcatttatagcttcaagcgtaaatccaaatccagacattcatggtagaggatttgttgcaagactttcaggttcaacaacagaaatgctttcaatctggattgaaatgtttatggggggaaaagtatttacatatgaagatggcaagcttgttcttaactttacaccaaagctttcaaactggttatttgatgaaggaaaggtaacattcagattactttcatcttgtgacattacttatgtaaatgaaacaggcaagaatacatttggcgacgacgcagcagttgtagacagagttgaaattaatggagaaacagtttcaacagaaaacaagattgttggagaaatggccgaagcagttagagatggtaaaataaataatattacagtttattttaaataaaaattgcaactttaaaggaaacttttaaaaacagtttcaagaaaagccccggctactatgtagtcagggcttttcttctgaaaataaaatacctgaaacgtttcaattccttattgtaactgaatatattatctgctattattgtattaaagcagaggtttaacttaaatttagtaaaaggaaagttaggagaattaaatgagtgaattaaagtacttagataagaggggaacatttacattagacaatccggatcttacaagttatatgtattttccattggctaatgaagcaggaatgatgagtgctattacacctgacttaggtggagacattaagctggaccagaatacatttttattggaaccggttagcagtgaaaacttacataataacaagtcaacaagaaatttttgggtttatgttgatggaaaaggtgcctggtcagccacaggacgttctgctaagcagcaggctaagctttttgatgatgacaaggaacaggtaaaacttacagcaggtattatgtggcataaggttgaaagacagaccgatgaaatgggattaaaagcagaattaactacttttgtaccatatacacaggacaaggttgagctaacaaaagtaacaatcacaaatactgctgatacaacacagaagattacatcaacagttgcaattccaatgtatgcccgttctgcatcaaatattagagatcacagacatgtaacatctttacttcacagaacatttactattaaagacggtatcatgatttatccaacattaacatttgatgaaagaggtcataataagaacactgttttttatggcgcacttgcaaaggaaatggttaatggaaaaatggaatcaccggttagcttttgtcctgtaacagaggagtttattggtgagggtggaaattttgaaaacccatattatgttgcaaagaataagccacttccatatacagagggacaggaagtagacggttacgaaacagttgcagctatccgttttaataattgtgaattaaagccgggagaatcaagaagctatgttatagctttagaatatggtacttctaaggaagaacttgaaagcattggaagtaaatatattgatgtagattcattttataaatatttagaagaaacaaagaattactggcaggataagattaacgtaagttataattcagcagacaagaattttgataactggatgcattgggttaacttccagccaatgcttagaagaatttatggttgctcattccttccacaccatgattatggaaaaggtggaagaggctggagagacctttggcaggattgtcttgcacttcttattatggaaccaaagcaggttagacagatgcttattgataactttggcggagtaagatttgacggaacaaatgccacaattataggttctaagcagggagaatttattgctgacagaaataacattacaagagtatggatggaccacggtgcttggccatatcttacaacagaattgtatatgcagcagacaggtgatgttgaatttttagttgaagaaaactcgtattttaaagatccgcaagtttgccgtggcgaagaaaaagatatgatttggaacgacgaacagggcaacaaacagcttgcagaaaataatgaagtatatgcaggaacagttcttgaacatatgttaattcagcatttgacagcattctatgatgttggtgaacataatcatataagacttcgtggtgctgactggaatgacggacttgacatggcagctaagcgtggcgaaagtgttgcatttacagctttgtatggcggaaaccttaagaatcttgcaaaagacattaaggcttatgcagaaaagacaggcaatgaaacagtacttcttgcaaaagaattacttatattattaaatgtagacaaaacagtatttgacagaatagatgaaaagaaacaggtacttgacgcatattgcgaaacagtaaaacatacaatcagtggtgaaaaagttaacgtaagatgtgatgaactttgcagtattcttgacagtatgggtgactggattggagaacatatcagaactactgaatggacaactgacaaagatggacatggttggtttaacggttactatgataatagtgggaatgctgttgagggagatttccctacaggtatcagaatgatgttgacaggtcaggtatttacagtaatggctgacgtggcaacagacgaacaggttgtagcaattgcaaaatcagcggacaagtatctttatgatgaagccattggcggatacagattaaatacagattttaaggaagtaaaaacagaccttggaagattatttggttttgcttttggccacaaggagaacggagcagtgttctcacatatggcaactatgtatgctaactcactttatcatagaggttatgcaaaagaaggatataaggttataaacagcttatttaaacattgcgataactattcaaagagtggtatttatccgggaatccctgaatatgtaagtcagagaggccgtggaatgtaccattatcttacaggtgcggcaagctggatgcttcttacagttcttaatgaaatgtacggtgtaaaaggtgaatatggtgcccttaaattaaaaccacagcttttaaaagaacagtttgaaaatggtaaagcttcagcaacatgtatgtttaacggtaaaaacattacggttacatacaaaaatgacaaggcgcttgatgcaggacagtatagcgttaaggaaatctatattgacggtaataaatatggcgattgtgatactgtattaaaagaggatgtaatgaagttaaacgatactgtaaatatagtagctatacttgattaacaaatgtctgggggaggttttctcccttagattataaaattaagttttgcaaacaaaagaaagaggtaaaatatgtttgaatggggaagggcaatatgttactcaggatataggcagggacaaagtccccaaaatgctacatatccaacttatgaacagattaaagaagatttgacattgttaaatgaattaggtttcaaatatttaagaatgtatgatcctataagttatgcagaggaaacatgtaaagttataagagactgtggatttaacatgcaattaatgttaggacctggattaatatcagaagttaacaatccgggatgtccatggaatcagacaagttattctgatgaggaattaaaagaacgtgctaaacgtaatgacagaaatattgatgaattaatcagaatagcaaatgagaacagcgatgtaattaatgcagtttcagttggaaatgaaaacacacctgattggggtgaaaataatgtacctgttgaaagacttataagttttgcaaaaaaactcagaaaagaaacaggtaaacaggtaaccttcaatgaaggggtttatgaatgggaacatctaaaagagcttgcagatgaactggacattattagcattcattcatatccattgtggaatggaaatacagtggaagaagctttggaagtaaataagacatggtacaaaaaagttaaggaatggtatcctggcaagcctatagtattctcagaagtaggttgggctactgattgtgctgattttaagcagatgaaagaggggcaggctaatgaggaaaaccagaagagatattatgaagaattctgggaatggagtgacagggaacagattatttcttatatgtttgaagcttttgacgagccttggaaaggtggaaatagacctaatgaagcagaaaaacattggggaatattcaacgaagacagaactcctaaactggtaattaaaaagtaaaataagtaataaaaatatttttatgaagaaagagctttaaataggctcttttttcttttatatatagaaaaataataaaaacggtttttaaaataaacaatggttaaatagtgtcaaaaatggtaaataagtaaaaaaaaataaagaaaattgtggaaaatatatatattttgagattgaaaatgtagcatatataaaaggaatgttataaaaaaggaacaagtcacatatatagcttgtcaaaaatgcacaaataaaaacacttttaaacgtttcagattattgaatcgcataagagattgtgataaaatgcaattattgttttaaagaagagaaatctttaaacaaaagtaagaaactaaaaggggaaaggagactttaatatgagtaaaagtttcaagaaactagtggctattgtaagtgctattgcaatggttatcgcaggtattacagttcagccacagacagcaaatgcagcagaagccttagagtggtcagaattaactgacggattaggaaaagcgacaattaaaaatacttccacagaagaagtacgcggagcagaatacaaaggcttcgagacagatcgttcatggggtggagatagcaaatggcaaggacaagccaaagttaatgatgtaacagttgaagcaggacaggcatataaggtatcattagatgtaagttctacaccagctaaaaaaattttagtccagacactttcaggtggagaatatgttgaaaaggaatacgatacaacagtaggacatattgagcagacatttgcagcaaataatgataaggtaaatattgttgttgcttttggttcatttagtgatgatgaagttggaaaatatgatgtttcaatttcaaactttaaattagagaaaacagaaaagtcagaagaacagattgaaaaggaaagagttgaagctttattaactggtgatgaaaacattgccaaaggaaagacagcattttcaaattctgtgaaggaaaaagattaccagccagaagaagcttttgatggaaatttaggttcaagatatgcagcaacatcatatgagagtggcgtgacacttggagtagatttgggtaagacatataaagtttcaagtgttgctttcaagtgggaaaatgcatatgcaacagaatataacattcaggtttcaaaagatggtaaagcatatgacacagtaaaaactatgacagcagataaagcagaaacaatagaagtgccattagatgaagcagttgaagcaagatatgtaagaattgaatgcgttaagaatgctcttaattatggatattctctttgggaaatgggtgtatatggaacagaagtagctgaagttgaaacaactacaaatacaccagttgtagaacctggaacaggtgaaacaacaacaccggctaagcaggacgaaacaacaacaccagctaagcaggacgaaacaacaacaccagctcctgtagcaccaacagtacctgtagcagcagaaaaagattggtcagcagaagactttattagctcatcagatgctacatacaatgatacatataaagcaatcaaggatggagcaattaatgaaatcgttaatattcagccagctgatgatacattaggattatatgtatcattcgcagatgctgattttggaacaataacagtaaatggaaaaacagcagatattaaagttgctggagccggaatttggttcaagttatcaaactttacagatatgtacagtgatgttgtaattacaaatggagctggaacagttaaggctacattatatgtatacaacaagaacggtgttgataattctaagaaagatgatgaaacaacaacagcagcacctgcacagaatgaaacaacaacagcagcacctgcacagaatgaaacaacaacagcagcacctgtacagaatgaaacaacaacagcagcaccttcacagaatgaaacaacaacagcacctgcacagaatgaaacaacaacagcagcacctgcacagaatgaaacaacaacagcagcacctgcacagaaggaaacaacaacaacagcagcacctgcacagaaggaaacaacaacagttgcaccaacaactaaggctattagtacaacagcagctccagcaacagttaagaagacaacagttaagaaaacaacggttaaggcaacagctaaaaagttatcttctaacaaggttaaactttcagttaagaaagtagcaggagcaagcaaatacgctgtacagatttcaacaacaaagaacttcaagaaagttgttgctaagaagacatctaagaaggcagtatttacagttaaatctaagaaacttaaaggtaagaagaaactctatgtaagagttaaagtttacaagaaagttaacggaaagacagttgcaagccagtggtcaaaggcaactaagattagattaaaaaaataagattacagaaggtaatcataattaagtaaacagaggctatggattagtactagtaagaggtactattccgtggcttctttttttgttaataaaaattctatatattaaaaattacaaaaagacaaaacaatacagaaaaatcgaatttgttacaatagtgatttttgtataaacaacaataaaaatgaatattcatattaactaataaaaacaattttactaattttatcttattagggcaaagttaacaaaacaacagtaaaaatataactttaaaatcagattttaatgttaaatttgtataatgaattaggcattttgctgaaaagaaactaaaactttttttaacattgagataaaaaaaaggcaatttataatattaagtataatattagggaatggaggaatattatgctaaaaaatatgaaaaaagcattgtctttaactttggttacggctatggtagtcaccatatgtcctcaaggacaacttgtaaacatatcagcggctgataatacaccatattgcatatcagaaggtagacctgtatatgtaagttcaggtaagaatgaagactatgcagtagatggtgacacatctacaagatgggaaagtgattacaagaacaaaatagaatggatgtatgtggacttgggagcaaaagcagaccttgaccatgtttatctgaaatgggaagcagcttatgctaagtcatatcagattcagttttctaacgatgaagagaattggacaacagtttacacaaagggtaacggttcaggttcagaagaaactcctgaagaaacagttaatccgggagctatggcaatcagtgttggaagcaagaaaaaaaatgacaatggtacagtaagttccggcttttcatggaatgcggtatcaggagcagttacttacaagattttcgttgaaaacaacggtcaggaagaagtagcaacagcacctgatggatttacttttgataaggattcaagacttgatcttaataatgaagttaaattattagagggtactcacaagtatattgtaagagcatacaactcaaagggtgaagttattacaagtggtgaggttacagtttcaggagattatacagttcaggaaacgacaaaagccccaacaggagaaacaacacctgtagtggatgaaaaggaacagacaatagatttaacaaaagttattacaaataaagaagacagacaggcaagatatataagaatccttatgacagaaaaagcattgcctgcatatggatattcattgtttgaattccaggtttatggtacaaacggagtggttgaaagacctgtggattatggagtaaaccttgcacttaacaaaccggttaagtcaagaagcaacactgttaagtcaggagatacaactaaggaagtaaacacccgtgatgaatggtggatgtatgacagtgatggaaatcttagagaggatgcatataacaatgtaaaacctgaaaacgcagtagatggaaatacaaaatcagcatttacatcatatcagggtgatgaccagtggatttatgtagaccttcagaaagaatacacaatcggcagagttgttgttaactttaacagcgatgctgcaaagatgtatgacattcaggtttcaaatgatgcaaagacatggaaaaccgttcacagaaatcttagaggatacgctaatatgattgatgatgttaccatgtatcaaaagaatgtcagatatgtaagaatcttaggctatactaaggttgaaagcggtagtggtgtaggaattaacgaattaagtgtttatgaatacagagaaggcgatagtaaggaaaacgaaacaatcgctccacttccaacaagacaggttattaacaacaagaatggtaaaggttcatatgtttcaggtgaaatgtataaggaaaagaacaagttaccaacatttgttaatgaagaaactataaagacaccaatcgattctaacagctggtggtcatcagcaatggttcagacatttagtaacttactttgttcaacaccattaaaggctaagttctcaactaagggacttggagttttgcttgcaacagcaggatgggttggaacaagaaaggaaactgaccttggaacagaccagtctactgaaacaggaattgacttctatgtattacctgaaaaatacaactctaaaaagggttatgacagagtagaaagctatggtgattactcagtacagttaggtttaatggacaacagtggaatgcagatgaagtcaactgtagttaagggttcaccttacattttcagtgagttctgtgataacacaacatttttcattaactcatcatcaattacagaattttttgatggcaatggaaatagtattttagctaaagaaggggacacaattacaacagaccacattggttttaagtcaatggatgatgaaaatactaaggctaaaaacgatggttcttattattgtatgaacgtacctgaaggaacaacatttaaggtaatggttgcaggttcaagatataacgttaaggtgacattcccttcaaagaatgaaaattatatgtcacttgcagctatgacaaagaaaggtgacattgaccggtattataaacatggttacgcatttgtaacaaacacacacgttggctacacatttgatcaggctaacaataaggttgtaacaacatatacagctacaactaagactatgagaaagggattctcaaatgaaacaatgcattgtttattcccacatcagtggaaatattcatcagatgcagataacccggatgcaacatattactcaattcgtggtgacatgaaatctatctgggctaatgaatacaagacaacacagcagttctcaggtttacttccaacatttacaaagcctgacagcagcatgtttaatacaactgaaatggttgaataccttaaccaggtagtagcatctaagattaacacagcgcctgttgctgatgcttactgggaaggtaagaatgttcacccacttgcaatcagcgctcttatggctgaccagttaggtgaaacagaaattagagaaaaattattaaagaaattaaagagcattatgattgactggttcacatatgacggtgaagatgatgactgttacttaatctacaataaggattggggaactctttattatcctgaaagttcatttggtgccaacgcagcaatctgcgaccaccactttacatatggatactttatgtttggtgcagcagtacttgctacatacgacaagcagttctacaacgattacaaagatatgattgaacttcttgtaagggattacgcagaccctaaggaaccagaggatgacggagacatgttctgcaagttcagggcatttgaccagtattcaggacactcatgggcaggcggatatgcagacagcgattcaggtaacaaccaggaatcagcttcagaagcattgttcagctgggtaggtatgtatctctggggtgaagtatcacagaatagcacttacattgatgccggagcttacggcttcacaacagaaatggaagcgattgagcagtactggttcgactatgatgaaactaactggttaggtgatcatcctgacagagtagcagatcaggcttatgattatccgttccagggaacaggtcagatttatggcgcttcaatgggatatggaacatattttggtggacagcctgtttatgtatatggtatccagtggttacctatttctgaataccttacaaactatggtatgaatcaggaaaaatgtgccaagatatatcagggattagtagatgatactaattatgcaataaacatagaaaagaaattatttgatcaggatttggcaaacggagttagtgcagatgattcatggcacaatccggacaagtatgtaacacctgataacggatggcagcatattacatggccattcctttcacagactaatgcacagagtgcatatgacaagtttaaagctaacgtaacaaatgtacaggttgaagatagagctaatacattatggtttatttcagcaatggatcagttaggctacagaacaaatgactacatggtaacaggcaacattacaggttctgtatatcgtaaggatacaaacggcaagacagtatacacagcagaagtttggaatgctacagacaagacacagacagtagcaattaaagataagtttggaaaacagattggtaaagctaacattggtgcaaaggcatttgtaagctttaacattgacacagaaaaacagtttgaattaactcagacagcaacacctacagttaaggctaaagctttagcaacaggaaaagttacagaagatgtagcaggaaaagtaacatttgatgatacacagttagttgaattatcatgctcagatgcagatgctaagatttactacacaacagatggtacaattccaacaacagaatcaaaagaatacacaggaaagattttgatttcaagcaacactacattaaaggcagttgcagttaaggatggatatcttgattcagcatattcagcaacagtatttgaaattgccggagatacagtaagcagtagtgataatttaggacttaagaagaaagcaacagcatcttcatcaaagggtgcaaatacagccgatatgactttggatggtacaacagacacaagatggcaggctgataatgaagcagatgatgaatggattcaggtggatcttggttcagtacaggcagttaacgcagttacaattaactgggaagcagcttatgcggcaaaatacgaaattcaggtatctacagacggaaaagaatggacaacagttgctaaggaaaatggtatggttggagaaatcacatcaagttttgcggcaacaaaggcaagatacgtaaagatgcagggtgtttcaagaggaactcagtatggttactcaatttatgaaatacaggtatttggtgcagtacaggctaaggcaccaacaattacacctgtaagtggaaattataagggaacacagacagtaacaatgtcaacagcagtaaagggtgctgaaattaagtacacaattgatggagcaactccaacagaagattcagctacttatgaaggaccaattacagtagacaaatcagtaacaattaaggctgtaacatatagaaagggaatgttattatcagatcctgttcagtcagatattattattgaaggaacaatttcattaaataagacagaagcaacagtagcaattggaaacaagttacagctttcagcaataacagaccagtcagttacatttagcagtgataatgtaggtgttgccaaggtagatgctaacggtttagttgaaggtgtttcaaagggaacagctacaattacagcaaaagctgcaaacggacagaaagcaacatgtaagattacagtaacagatcctgtacatattacatcaattgaaattgctccacagaatcttgaaattaagaataagaattcagaaacattgaagcttacaattaatccaagcaacacaacagatgacacaacagttacatggacatcaaaggatgaaaagattgcaacagttaatgatgcaggaacagtaacagctaagtcagagggaacaacaactattacagctaagataggtaagtttgaggcaacatgtgaagtgacagttttacctataactgtagaagaaatggttgcagacggacaatttaacattggattaggtaagaatgttgtagcacttcctaataagcaggatggtgaaggcggtagcgaaagcgatcttacagatggtaactttgaaggcaaacatattgctacagcatttgccacaacaggaacaagttatacaattgatttaggagatgcttatgacagcgcaactattgataagttagttgtaaaatacaaagaaaacaatggaggagatactcctgttaacggttacgaaatccagtactcaactaacggagttgattttgaaacagttaaaaaagtaacaggagattctgtaaaggatgcctgcgaaaacaagaattgtgtagatactcaggatatgacaggagtaacaggcgcagcaagatacattagattctattatcctgaagcatacacatggggtgttcaggtaagagaaattgcagcattaagtacagacaagaatgctaagaaggcagaattacagtactgtgatgatcctgcagaagtaacagtaaaatctgataagtattgccagattacatatacaattaaagccggtgaaaatcaggatgattacaagtatatggtatacttaaacaacaaccttgtaggtgacagagtaactgcaggaacatatacaattgataacttagatgcaggaacatatacagttaaggtagtttcatattacaacaagttaacatctaagggcatctcaaaggaagttaaagtagatgacggttcattaaaggattacattaacactgtaagaaatatttcaaagggagcaaagataacagttgacaaggtatacgaaggtgaaggaaaccaggatgtatcatcattaacagatggtatcgtatcagataacaacggtgtttgtgttcacacagaacatggagcacagacggcaacaatcaatatggaccttggagagaattatccaatttctaatattgaagaatttttaatagcatttaaggcagacaatacatatgctaagatttatacagttgagttctcagcggatggacagaacttccaggaaatggttaacgttaaggatgctaaatacaaaacagttatggaaaacaaaattgaccagtcagcatataattacgatacagtaagatatgtaagagttaaacttaatgacggttcttataactggggatatcagatttcagaagtagcaattatgggatcagatgtttacatgcctgttgaacctgaaggattagttgtagaaagcccaacttataatactgttacagtaacatggacaggggcagacaacggtcagacatattgggtatatatcgatggtaaggttaaggatatgaacttagctacagccggaacatatatatacaacaatattgatgccggaacacatattgttaaggtaacatcaagattaaatggaattgaatcaaagggtgtaacaaaagaagttgtagtagctaatcagccaacaacaacacctacaccaccaacaacagcaaagcctgcaccaacaacacaggtgcctacaacagctaagccaagtgaaacaactacaaaggctggtgttaagccggatgaaacaactacaaagacaaacgtaaaaccaggcgaaacaacagtcaagacagagcctgtagctaatgagactacaacagtactcaacaatggtggcaacgaagacaaggctaatgtaaaacttggaaaaactaaagtgacaaaggcaacaaagaagaagagaacaactaaagcaaagatttcattaaagaaggttgcaggtgccaagggctatgaagtaagagtttcaacaactaagaagtttaaggcgaagaagactattacaaaggtattcaaacgtaataagcttacatttaagaaacttaagaagaacaagaagtactatgtacaggcaagagcattcacagtaatcaatggaaacaagaagtatggtccatggagtgctaagaagaaaatgaaacttacaaagtaaaatgtaaaattattataaaagaaaaaggctatccactaatgtgaggtgaccccaaaagttagactttttacgagacgacttcggtcgtctcgtttttcttttatgcagtaaggagatggagcctgtatggaacaggactcatccatcttaacttttcttttattcgtttttgcttcgacctagccataaaaataccggcctccaatcgttagatttttaggtctaactttttggggtcggtacaatttatagctatcaggtatgcttttaatttaatttattctccgaggaaatttttcacatttctaatatgtttcagcccttctttgcgaccaatgtcatatagagcctgcagtttttcaggatctctttcggtgcgcccgattgtaacaggattctcaggtctgataatgtagacaagtcctttgcgttcaagttcttttaggtcatctaatgttttgttgtacataatatggcggacttccaagtcgtgtacaagattaggatatttcttgcccaactttaatctgattaacggaagcattgaatttttcttttttctgtagccgtcatgctgggtaagaatgacaacatttttctcgtagcccatttccataaacttgtgaattggaattgaatctgaaattccaccgtcaagcattttaaaaccgtcgatttctacaatatttgaaaccattggcattgaagcagaagccctaaaccatttaatgtccgttgcatcgccgttaggacaaagatgataaataggttttccggtttcaacatctgtagttacaacgtagaaatccattggattcttctgataagtttccacgtcaaaaatatcaaggcggttaggaatctgattataacaaaaatcagcaccgtaaatatcgccggtcttaattaaagagcgaagcccaacatatctgggatcacgacaatatttggtattgtatcgtattgttctgccaatctgttttgacttaagattgcaaccaaaggcagccccggcagaaacgccaatggcaccgtcaacagtaatatcattttccataaatatatcaagtactccggcagtatacattccacgcatggcaccgccttccaaaattaatccttttttcatataaataccaatcctttttaaaaaaaattttataatgtgaaacaaccgaacttttattacaggggttgttacgtgcttcacgttttttacactataacaaattatacagcgaatttgttaattttgtatcaataaaataagttttattttcaaaaaaattaagaccggtcataatcataaaaaagaaattaaagaacaaaaaatatgaaaaaaaactattttattttcaatatttgtttgacatctctacgcaattatggtataaatatccttgtgcaaaattgcagataggggtgtagttcatcggtagaataagagtctccaaaactccagaggtgggttcgattcctaccacccctgttattaaaaagcctttgtttaaagggattcctttaaacaagggtttttttgtcgtataagaaatgtaagccaccggctaagccggtggtattggataatttaaaaataataagttgtgtgctattggagagttttgggaagattgttaatttctgtctcaaatatatttttttcccccacataaatagaaatatcaaaagaaacaaattcgtcctgttgattatattctttactttctacatactgaacagcagactttttctttatggacaaataattggcatatttgtcttcaactattcgtgccataaatcttttttttgtatgcatgacttttatgttataatatttttctaaaatgtaaaacatagattctttttctaaatcatatttttcgatttcgggaatatcagaagcccggtaatatccatcaacaaaaacaataggatcatcgtttctgtatcttaatcgttgaattctaattaattcatctccaacgttaaattctgatttctcagcaatgtagtcattgcaaataaatttctcaatagaaataagttccgtcttgggttcaaaaccatacattttcatttcatcattaaaactaataatttccttaaaaaatacattctctttactttgttggttaacaaatgttccgcggctcttgtaacggacaatgtacccttcactcattaattcataaaatgcctgtcttgtaacggttcttgacagattaaaatggttacatatttcatgttctgttggaagtttatctcctggttttaggataccattttgaattgcctcttttattgattctttcaattgtgaatatagaggaaccagagagtacttgttaattgtaatataatccataataaaaatctcctttagtaaatagagctatgactatatatgctcttaataaaatattagcaaaaaaaggttgacatttcaataaaaatattataatataacattgtcattacaaagttacaaaataagaaaggagaaataataaatgtacgagtacgatgtaagtaaatctaatatgtggagagaagttcatgaacaaccggaaataataagacatgtaattgatgtgaatctgcctataatagaaaatatatgtaaagaggtagataataggaacatcagtaaggttcttttagtaggaagaggttcaagtgagcatgcattattagtgggaaaatatgcgtttgagatttataccgataaattaacatcgatggcttacccttcaataataacattgttggatggaaaattagatttgtcagatgttttgacaatcggagtatctcaatgtggtgaggcaaaggacgtttatactgtactggaaaaatgccagaatcagggaggcattgcagtatcagtaaccaatgaacacgaatgtcttatgagaaatgtgggaaattattatattaattgtgaatgcggaaaagagacaagtttcacggcagctaagtcgtatatgtctcaaatggtaataacactattatttgcagcagtgctttcacacgatgaaaaagtgttggaacagataaaaaaagcaccggatattatagaacaaagtttgtgtaagaatatagaagaacaggtaaagaaaagcgttcctttgtttagaaatgttcaggatattttattactgggaagaggatttagttatgcagttgctaatgaaactgaacttaaaataatggaagcaagttatacaaacgcaaaggcatattcatcctgtgattatccacatggaccaatagcaactacaaacagatttatacctgtaatattctttttgactgacgaaaaaacaaatgatagtacaataaaacttgttgagaaaataaaaaaggatttttctgttagtacattagttgttacaaataatgaaaaatatattacaatggctaacgaagcggttcttttgccgaaagaagcggaaggcgttgcaggagtgttcggaatggttgtgttttcacaattatttgcatgtctcttatctttggcaaggggatataatccggatgaacctattggcttatcaaaaactacagtaactttttaaattaataataataaggaggtgtaattatgagtgttacattgttacagggactgattctggcactgattgtatttgcatttgcgtgggatgccagatgggaatgcttctttgtattccatcctattatcgtctgttttgtgacagggcttgtattgggagattggaaacttggtttggaagccggagcaatagcagaattgtcctatttaggacttacaacagtaggtggaacagtaccacctaatgcattgattgcaggacttatgacagttgttttggcttataagagcggagtatcggcagaaacagctttaggacttagtttaccattcgcattgcttatgcagtggatcgttatcgcgtgtcagtcattgttctcaggatttaacgtaaaggtagagcaggcaataaaacaaaatgacattaaaaaatttaagttttatgtgttcctacctgaaattattttaacatcactttatgcagtagttgcattcttaagcacatatgcattacagaatgtattatcaaagtttgttaattcattccctgaattcgtttcacacggatttgaaatagcaggaggacttttaccgggacttggacttgcactattgttaaaggtaatggtgaaaaaagaaaatgttccatatctgattatcggatttttaattatgagcattatgaaacctgacaatgttttaccagtagctttatttgcaattgcattagtactgattgattttatgagagacaaagaggcaaaaacaacatcagtagtaacaggaggtgaagatgatggcgaaggaatataatgagacaacaaataaacttaccaataaagatttaaaaaatttgggtttaaggtcgatgttctaccagacaggatttacctttgaaaaaatgcagggtaatagtttcggctggagcatacttccaggattagagaaaatacatggaaaagatagtgaagaagtaagcaaggcgttggatgagtacggtgttgactttataaatacggaacaacatgccgcatcttttctgatgggattagttctatcaatggaagaaaatagagctgatagaaaattaataaaaaatatgaaaaccggtctttttggatcttttgcaggtatcggtgatgcaatattttggtttacattattacctattagcggaagtatagcagcctcattgtgtaaacagcattcaatattaggaccgatattcttcctggcattttggattttaatggcagtttcaagagtatttttcctaaaagccggatacaaactgggaagtggagcaatatctaaattaacagaaaatgccaaagcattaactaaaggtgcaggtattcttggtgtaatggtagttggagcaatgattccaagttatgtaacttttgagttcccggaaaaattaaaattgtttggtactgttggagtacaatcaatcttcgattcagttatccctaatttgcttccagcattgtttgttggtatactatattatatcttcaaaaagaagaaggtaagcatagtagtactaattttagcaataatagcatttgcaatattaatgtcattattaggatggttataggaggaaatgtggtatgtcggatataaacattgtttttacaagagttgataatcgtttggtgcatggacaggttggaaatgtctgggttacggcaagtggtgcaaatttaattttagttgttgatgatgaaacatgtaatgatgagttatcaaaatcattaatgaaaatgactgcagatgccgtaggagttcagattagatttttctcaataaaaaagaccattgagattattggaaaggctgctccttcacaaaagatatttattgtcgcaaaaactccacaggtgattgaacagttagttgatggcggagttcctattaaacattgcaatataggaaacatgcataaatcagaaggtaagcatatacttcatgaagtccatgtttacgttgatgatcaggatgaggcgtgtctgaaacggctgaaagaaaaaggagtagatgtgtatatccagataactccaaatgacagaaaatacaagatataaattaaagggttcaaaatattgtattaatggtattttggacctttacaaaatcatttgaaactgtaaaaaatatattacatatagtagattatgtaatgataatgaccgttaacccggggtttgcaggtcaatcatatttagaatatattgacgaaaaaatagaggaatttattcaaaataggaaaaaatatcattatgaaatagttgtggatggtggaatttctgaagagaaaataaaaaaattgaatcaaaaaggtgtaaaaggttttattcttggaacatcttcgctttttggaaagggtgactacgttcacacaattaagaaattaagagttttataaataattaataggcaggatatataaatggtaggaattattataacaggacatagcaatttcgctacgggaattgccagtgcagtgaaactggttgcaggacaacagaaaaatctggaagcagtagatttcccggatacttattcaacagaagagttgaagacaaagttaacagaggctttagacaaattagaagaatgtaaaaatattatattttttactgatattgtaggtggctcgccatttaaaatttcagcagaacttgctgctacgagtagtaaaaatattaaaataataagtggtactaatttaggaatgctgattgaaaatgttatgatgcgtgatatggacataaattttgatgagttagttgaaactgccatatctacaggaaaacaacaggttcttaaatttgaaatgtgtagggaaacggagacagaccagcaaggaatttaggaggtggaaatgaaagcagttttctttgatgtggatggaacgctaattgattgcgtagagaaaaaaataccggcttcttctattaaagcaatagaggaattgagaaaaaacgggtataaggttgcactggctacaggaagagatattaacagtatacgtggtataaaggatttagatatatctgtttttgatgcatatgttttgaataacggtgctgcgatatatgacaacacgttgcgatgcataaaggattttccctttttgagagaagatgtagaaaaaatattagagtattgtaataacaagaatatgtctttgatatttgatacagttgagggtccttatctggctactgaaattaccgattgtctggttgaggggaaaaaatattataaggaagaaatcccaccatatatagaatggaaaggtgaggagattgtgaaaattaatatattcgctcctatgggttacgatttttctgaactggaaaaagatatttcagcgcgaattgtgccatgtcctacagtttgctatgatgttatggcaaagggaatatctaaacaaacaggcattcgtgaattgatgaaatactatggatttaatgaaaatgattatatggcatttggagatcaggagaatgacttggaaatgcttgaaaatgcaaaaataggaatagcagttaaagatatagatggttctgaaaaattgcaacatatggcagattatgtatgtgatgcaccaaggaaagatggaatatatactttcttaaaaaacaatggttatatttaaaaaagttaattaatttataaaatccggaaattataacagtataagtttagtttccggatttttagagtcgagggtgcggacattttcttggactatctaagtgaccaatccaagtctatgtctgtactctataggactcaaatatcctaatgatttttttattcttttttcattataccaataaagatattcatttaaaataccaataaattctgagatgtttaccccagaccaatctgcattatagaacatctcatttttaattcttccaaataagccctcacaggcagaattatcatgtgaacagcctttcttctttcataatcctacgaataactttttctgagacaattatattttcacgcttaagtagggcgtgaattcgtctgtaaccatatcgacctttattctctgtaaataatttaatgactctaacacgtaaaagtgtatatttatcttctttttgtagggattgttcctgataataataactgctttttgataattgtaatttctgtaataataatggcagtgagtatctgtttttcaagagaatgttacatatttcagctgtttcaaactagatttcttctaatttgcaccacaacatatttaaatatctattattgttgtggtagagggctagataaattgcggatattcatagcgttttgctttagaatttgtataaatatgaaaaaaactatttttattttcaatatttgtttgacatctctaggtaattatggtatgaacatccttatgcaaaattgcagataggggtgtagttcatcggtagaataagagtctccaaaactccagaggtggattcgattcctaccacccctgctagaagagttgtagtgttaatgatttataatcattaaggtgcagctcttttttttgtgcaataaaaatttttgaaaattttctaaatataataagaaagacttccccatagcatccgttatgtggaagtcttgattttttgttatttaagattgctaaaccattttttacaatagtcagcaaatgttttttctataggcgataatattttatcctttggccaggaaagatacaaatagttaaactctgcattttttaatttaataacctttatgtttgaatcaggatgaatcatgtaatatttatatggcatgattgaaatacctgcgttttgagaaaccttgtaggtagttgcaaagtcttcatgagttttaaaaacataattaggtgtaaaaccggcagccttacatattgtgtcagtaacaactcttaccggaatagtatcatatagtcccacaaatggttcatcctttatcattgaaagctcaatctcattatatttacttaaaggattatctttggagactaaaagcacaaactcgtcctttaataacaattcataattaaaatctttcatatcgcaaataggcagcataaaagtaaagtcatatggaggattatcagagtgaagaacttcttctacagtagcataaacaaaatgagcattaggataggctgacataaaatcagcagataaatgtgagataaagaaatcaccatcctgaatataaagcttaatatcttcaacattagtattggcaaaatatgccgtgcattcatctacagtgttaagaatggaagaaaccttctgataaacatattccccgttttcatttaaaaaaatctttcgaccgtttctgtcaaaaagtagaacacctaattcatcttcaagtttcttaattgcgtagctaatagacggttgaggaaccatgttcttcttagctgccttagaaaaattctctaattcggcagcatccttaaagtattttaattgaagtaattccatacaaacctccgaatgttattattctagaatatcttataattttaatctatatgaaaataaaaagcaacttttaggggaaaaaatctaatagacacttttaggggaaaagtctaattgaagaaaacaaaaataaaattttgaaaaatgtaaaaaaatattcatattaacatcatacaattattttagtataatctttgtataaagctgtaaataaaaaaacagcaaagatactgtgaaaattaataacaaaataatcagatttaaaaatagtagcaaatataacaggagatgaaatatgagaaacaacaagcgagtggttcttatggtagaggatgacaaaaaacttagagaagttttaacaaagtttttgtcaagaaacgattatgaagttttggcggcagaaaacggaaaagtagggcttgaacttttttatgaaaatagcaagaatttagatattgtacttcttgacggaatgcttcccgacatagacggtgtggatgttttgaaagaaataagggaacattcgcaggtgccggttattatgttgacagcaagggaatcagaagaagaccagcttaacggattaaataacggtgcggacaattatataacaaagccatttcttatgaaggttttacttgtacatatggataagttgattcagagaaatagcaatgaagacacggacgtaattgaaaaaggcgcgcttaaattagaaaagcagtttagaaaagcatatattaatggcgagtttgtagatacaactcctaaggaatttgatttgcttgtatatatgtgcgaaaacgaaaaagtggttttgaagcgtgaaaatatattggatgcagtttggggctttgattacgacggcgatatgcgaactgtagacacacttgtaaagcagttaagaaaaaagatgacggacaagtatccttacatcacgtcagtttacggtgttggttacagatttgaggtaaaataaatgaagactaagttaagaacaacctatcttgtaacggtattattctttttgtttgttacagtgggaagcatgattttgttctataatatgttttcggaagagttcattatttcaaataataaagacactatggacaatctttttgaaacaatacaggaaatgaatctggctcagcttacaaaagaagaaaaaaacgttctgaaggattacacagacaaaggtggctttgttactattatggatggtgaaaaaataatttatcaatccaaattatatagtaagagaagaagagaaggtcgcgtggattatgatttgcatgagtatacatataatgcgcaggctcaggtgaatgttgaaagaacagtgatcaagttaaaaggaaaaatagaccaaaacgtaaaaacttattacgtttatatggatacaagattaaagtcgctggagaatagcataaatcttataagcaaatttatgcttgtggaaatgattataattttgatgcttggtattcctttttcattttatatggcacagaggacagttaagcctattgaaaaactgggaaaactggcaaagaaaatggaaaataatgagccaattaattttgaagaatatgatttccctaacaatgaaataggaaatctgtcagatcagatgaaaagtatgtatcttaagatttccagtaaccttaacgaattaaataattataactatttgttgaaaactcagaataaagagttaatagagtttgatgaaagacgtaagaagtttattggggcggcaactcacgaattgaaaacgccacttgccattatctctacacagcttgaaatgatgaatatggataatgacgaggcaatgagtgagtattacgagtcaataatggaagagatacagaagatgtccaacctgattcgagaaatgcttaattcatcatttgagggggatattattttaagtggtccgatgaaagttgacagtctttcagaacttttggacggaatgaaggacaaatacatgggactattttggtcaaagaaagctaattgcagatttgatatagaagacaatatttatattaatatgaataatgagcagattgaacaggccataaacaattatataattaatgcttacgagcacattccggaaaaaggtacagcagttgtcacattaaaaagtgtagacgataaagcagttatttctgttttcaataatggccacaacataaaagaggaggagctaagcaagatttgggaaggcttctaccagactgacgagagggtaaaagaatcaaacgttggacttggcctctatattgtaagaaacattgtaaagaaccacaacggagtatgttatgccaagaatcatcacaatggcgttgagtttgtaatggagtttaaccgcacagacaaatattaaaaagatttaactttatcataaacaaaacttaacatttcttaattagtataaaagtgtaaaggaaaagcattatcagaaggaaagaaatttaaaatccaaaatggattatgcagcatgaaaattcataattggaagtctttaattgggaatctctaattggtaatttccaataaggaatttctaattggaaatacagattttagttgaaaaaactgaatgaagataatgcgatacacataggatttaataaagaagtgggagtgatgaatatgacagggataatcggctcaggaatgatagtcacaataaatgtgcttataagtcttgtgattggaggatgcttagcaataaagttgattgaaaaatagaatactagaagttaaaatatgggcagttccttggcgggactgccttttttgtagggatacttgaagtttgttttttgtacaaagtcgcatgggaggagtgtctatgtctcgggtgggtgtatagtattaattttacgtacaaagtggtttggggaggtgtctatgactcggggggcggtatgatatttattttttgtacaaagttgtttggggagatgtccacaccccggaggaggatactattaatttttcgtataaagtcgtctagtgtagtgtccacaccccgaggttcagtataatttgtaattacatcattgattacgtgtcgtataacttttctttctgctgacacgtaattttttacaatattaaagtgaatttttgggcaattacgtgtcatataagatttccttctgctgacacgtaatttttcacaatattaaagtgaatttttgggcaattacgtgtcgtataagatttccttctgctgacacgtaatttttcacaaaatcgtagtgaatttgtgggtgattacttgtcacacagcattttctttcagtgacacgtaattggaagcggtaagacaagcttagcttcaataaattacttgtgacacaacgttttcgctttacgacacgtaattggcagcgatagaacaagcttagcttcaataaattacgtgtgggacagcgtttcggttttacgacacgtaattggctgcgataaatatataagaaatcataacaatttccttaatgtattagttttgttattgcattaacttgctatctcttcttttttaaaaagtataattgcgtagccggaaaatatataaagtaaagtatacataaatatgttatgctataaatataagacaaggtacggaaaaatttatttttgttggcatattttggcgagtttattcgttatatttaatagaagggcttaactaacccaaatgagcgtggataaaaaaacaaagagaggagtaaagagtataagaaactgattgattggtgttgatacaagtgttttgtatctgatgagaggaggaaaaccaatgaaaaagataattgcaattatattggtaataactatgttagcctgtaattctgttaatgcagcatcttttgtacaggacaagaaagtggagttaaacaatgaacatatgaaggactacaataattcatctgttaaatggagatttgatgaaaagagcagtgttcttagttttagcggttgtgaaaaattagaaaaggtagatgtagggcagataaaaaatcaggttaggtatattgttttggcagatgatattaaggaaatatcatcaggatcattatcaggatattttaatctaagtaaggtaacaatattgggagatgttgtggctactggaaatgcgttttacttagacactccaagaacactggagttggcaggaagatgtgaaaatttgggagagatgattagcagcgacatggccccatttccgaaaatagttttaattaataacaacaaatactatgaagaaaaagacagaatgttgttaacaaaagatgggaaagaattagtgctattttatggtggagaatctttgaaggtgcctgacactgtggaaaaaatagactcttatgcctgctatcagctaggaaatttgagtgatgtgaaactgaatggcaagctgaaagaaatcggcgactatgctttctatcacacaggaattagtacattaaagttaaaaaacaatattcaaataattggagaacaggcttttgctggtaacaatattaaaacagttaagtttaataagaaaataaaactaattggtaaatattgttttgatgacaatcttttaagaaaagtatatttacgtagcaatccccgaatagaagagggagcttttccaaaagatgcggttatacagtattcaaaaaaggtaaagaacagggggagcgtggcagagcttgaatatagggtaaaaacaaaaaagctatacgttgtagcgaataaaataaaaaaggctagcggttatcagattgtggttacacaaaaaagcaataaactgaagaaaaaattcaatactcaaaaaggagaattgaataaaaagttaaaacttaatttaaagtaccaagttaaggaaggcgtaataaaagtaaacagcaagaacagtatttatgtaaaggtaagaccatattttggaaagaagaacaataaaaaatacggtaagtggagcatgaaatacaaagttccggtttatctatagcacagaagagaggtgattaatatgaagaagagatttacttttttaatcttactagttgttagcattattatgagtacaatggtaatatatgcagacacatcaaccgactatgatgagtctgtatatgcaaaacacaaacctatactaaaaatagacgaatcttcttttccaaatgaaatggttaggcgtgctgttttaaaaaggtatgatatgaatagagatggatatttatctcaatacgaaatggaagatccaacatcattttctgttgatgctgcggatatacaggaaacagatggatataaatatggaaggcaggtttaccaagatgaaaaatatagagttatagactttaaaggaatagaggtgtttaagaatgtaagtcatatacattttgcatgtgcattggtaaacggagaaagaggctatgtaaaaaactttaagtatttatcaaccttaaaaattgattctattggaataacatttagtgacagaaactataatttgaatcagttaaagggattaaagtatataagctttgtagcgtgtgaaaatttcaacttgaaatttgataaaaaatctaaagttgaaagtattcgtttattagatagtaaaggaaaagtagatgtttcaaatttgaaaactttaaaaacatttagctcttatgaaactatattcaaaaaaataaaatttggaaagaatgccaaactaaaaaaactgagtatagatggaagtgcttattgcataaataaaaagataagaaaattggatatttcaaaaatgaaaaatcttagatatctttatttgcaaagctgtacgaaactaaaagaaattaaaatgtctaagaaaaataataagaaacttaaaaaaatagaaatatacggttgtggtaagtttaaaaaatcaagtttagataaaacacaaatttctaaaaaaaccaaagtaagggttttaacttggtaaataaaattaaaaacattcaaggagctgtgtctttagtggttgacaaaccattggagtgcagctccttaactattattcctaaaaatgtatgattttgttttataagcacaaactattttagagaatccaagtatgtaaattcataacttaaaaatcgtaaaataaagcgacttgaatgagaaaatgtataaataaagtactagtgactaaaaatgtaacttgcatataatttttagatgaattattatattagcataattagttaaaaatatacaaaaagtaataaaaaacaataaaaaatcggacagaatgcacaattttgtatagggaaggaggttagtatgataaaggagacggttgatgcggttaggttagcagagcttgaaggggccaaggttataagcactgcgaaagttaacgggcaggatatgaagaatcagattaagattcagggggctgaatatcgaactgaaaggttaaaggaagccaaggaaaaagcagaaaaggaaatggcagagacagttgcaaaatgcgaaaagtacaatgatgagcaacagaaagagattgacttaaaggttatgcaattgaagaacaaatcatatgagaaaatggatggcacggtgaaagccatagtagagtatttattttaggattacagagcaggtcacaatctatgtaatcctaaggtagaggggaacatttaaatcattttaaggcataacccgtcatttaaatgacagaatggagaatttatggcagttttgaagatgtgcaaaataaatatatgcgcaatgaagaaagaccgaaaaaagattttggaacttttgcaattaaagggctgtctggaagttcatgaggaagtgaaagaggataaggtgtttgaaaaagtgaacacggcaacccagatttcactttacgagagacaggtggcgttaacggacaatgcattagaaattcttgaagcttatattcctgaagaaaagtccatgctttcaagccttgaaggaaagaaagttattagttcggacgattattacgaaatagtaaataagcgaaatgaaattaacgggcttgttaatgacataatcgagcagaagaaaagtatagatgaaaaagagtcaggaaagcagaaatgcttagacgaaatacaggcattgcaaccgtggcttgaacttgatgtcccaatgaattttcagggaaccaaaaacaccggatttatggtgggtgttatttcaggttcatatacggaacaggatttgataagaaaaatagaaagcttaaaagaatttccaaaatcactgtatatgcagatagtttcggcggacaaatatcagacttatgtaaccgtatcttatatgaaacatgatttggagcaggttgaaaaagccttaaggcaactggattttagcaaaccgcctattatggttcatcacataccaacagcttcggttacaaaacgagaggatagaattaaagaatataatctggacattgaaaatataaaagctcaaatggaaagagaagcagattacagatttgagtttaagaaaataagagattattacaaaaccagagcggacaagtacaaggtggtaggaaagcttttacagtccaaacatactttttttgttacaggttatatgcctgagaaacaggttgaggcattaaaagaagaactggaaaccaagtttaatgtggcaattgacgtggaacagccaacggaaaaagagaacgttccggtgctgttaactaacggaaaagttcagggagcagttgaaggtgttgtaacatcatttggttttcctaacaaaatggaaattgatccaacggcaataacagcattcttctattatttcttatttggaataatgctgtcagacgcagcttacggatttttaatgtttattggatgttttatagttttaaaaaaattcccgaacatggaagaaacaatggcgaaaacacttagaatgtttatgtattgtggcatttcaacattattatggggaatacttttcggagggtatttcggagatgcaataacagttatcggaaaaacatttttcagagtaaacataggaataccggcactgtggtttgaacctattaaacagccaatgaaaatgcttatatattgcttatgtttcggtattgttcatttatttaccggacttggaattaagggatatatgatgctaaagcaaaaagatgtaatgtcatttgtatgcgatgttgttctttggtatgtatttttgattggattaatattaatgcttattccaacaagtatatttgcctcattggcaggaagcacaatagtcttcccggcgtggcttagtatgctatcaaagataatgacaataggtggcatggttggaatacttcttatggcaggaagaagagcaaaaaatcctgtgaagcgattattgcttggagcctacagcctgtatgacacaacaagctggctaagtgatttgctatcatattcaagattacttgcccttggacttgcaacaggagtaatagcccaggtaattaacacaatggcagcaatgatgggaaaatcaatagtgggagtaattttctttatagtggtttttctaatcggacacacattcaatatggcaataaaccttttgggagcctacgttcataccaacagactacagtttgttgaattctttggaaaattttatgaaggtggcggaagagagtttaaaccatttaaggcggatacaaaatatgtaaaagtaaaggagaattaattatgactttaggaacatttttcgataatttaggtttattttatgcattgcttggagcagcacttgcagtacttatggcaggcgcaggttcagcaataggtgtaggtattgcaggacaggctgcatcaggagtaatgacggaagatccatcaaaatttgcaaaagtacttattatgcagttacttccgggcacacagggcttatatggacttcttattggattcattacattatcaaaaatcggaatcattggtagtggagcagttgcagtaacatcatcacagggattacagatattggcagcatgccttccaatggcaatagttggtttaatctcaggtaagtatcagggaaaaacatcagcagccagtattggaattgtagcaaaaagaccagaacaattcgcaaaagcaatgttgttcccggcaatggtagaaacatatgcaattttagctcttttgatatcattcttatcagtaaacggtattgcactataattttctttcacatccctgtggtaggatgaaatctttatcgaaggcacgctcccgctaccttcagctcgtagcggtactaagaagccgtgacagctttcgctgccccaccttctaaggaccgacggcttcagagtaccttcttctaaaattttcatcccccacaggggcgaaagtaattagagtgaataatactgaaagaaaaaataggtaatggaaattacacgttttcaaccattgcagtgagaaaagattatgtgagaattattgttgtggttaatgacgtgcaaaagaaaggaggggctgcatgagtggtttggataacattgtagaggagattagaaatcagtctaagcaggaagcaaatgaaattctgaaagaagcagatgttttttgcaaggactatatgaataaaattaaaaaagacgtagaagtagaagttgtttcgattgagaagaaggctttggctgaccgcaagctttatgaggagaagacggtttcaggtatggagtttttggaacgtaattctattcttagggctaagcagcaggttattgaacaggctattgataaggctagggagagtatagcaggtcttaatgatgaagaatattttaacgttttggagaagcttttaaggaagaatgttcagcagggcaagggaaagatttgtttttctaagaaggatttggacaggattcctaatggttttgaagatagagtaaaagagattgtggcagagaatcagggagagcttgtaattgataagaagccggctaatattaaggacggttttgtattagtttatggagagattgaagagaattgtactttgaaggctttgtttgattctaatattgacagagtaaaagatattgccaataagcagttgtttggatagggggtaatgccatggagcaggaatatatttatggtgttgccagaatcagagcgcttgaaggtagtttgtttacagatgaaaccattaatcagttggttcagtgcaaggattatgacgaggctatggatttcttaagaaccaagggctgggggaacggaaacccggaccagagtttggaggaaatgcttgaacaggagcgaaggagaacgtggaaggttctggatgaattaattgaagacaaggaacaatgtgagattctcaccattgccaacgagtaccataatcttaaggcggcaattaagcaggtttgtactgaacttgaaactgaaaatgtgttttatgaagatacagaaacagacacggaattcttgaaaaattgtataaggcagggcaattacaatctgcttcctaaaggcatggagcaggcggcaaaggatgcaacaacagttcttatgcagactggcgatggacagttgtgcgatgtgattattgacagggcaacactggaggcaattaagcaggcaggtcaggaagcaactaatgaaatgattaaaaaatacgcagatgacctggttaccatatcagacattaaaatagcagtaagatgtgcagctacaaataaggacacatcttttgtttcaaaagcacttgtaagttgtgacggagtaagcgttacggaattgattatagcttgcaaggacggcttggatggagtttgttcttatcttgaaaagataggctatagtcaggcagttagtgctttaaaaatatcaaaatcagtttttgaatgctggtgtgacaataagattgtggaagatataaagtcacagaaatatgactctttttcaataggaccgattattgcttatgttattgcaagagagaatgaaattaaaacagtaaaaattattctttcgggcaaaattaatggttttgacaatgagtttataaaagaaagggtaagggtaatgtatgcataaagtagcagttataggtgattatgacagtatatatggctttagcgcactgggacttgatacatttccggttaccgacgtaacagaggcagcacatttgctaagaaaaatagctgcaggtgaatatgccattatatacattacagaaatgttagcaaaacagctttcagcagagatagaaaaatacagagagcagatggttcctgcaattatccttattccgggtgtaaaaggaaacacgggagacggagtaaaaggagttaaggattgtgtagagcaggctattggttcggatattgtatttgggaaggaataagacatggagtatagcaagggtgtaattaagaaagtagcaggacctcttgtaatagcagagggaatgcgtgatgccaatatgtttgacgtggttagggttagcgacaagcatcttattggtgaaattatagaaatgcatgaagatagagcatcaattcaggtttatgaggagacagccggacttggaccgggagagcctgttgtatcaacgggagcgcctatgtcagtagaacttggaccgggtcttatcggtagtatttatgacggaattcaaagaccacttgatgatattatgaaggtatcgggcaatcttttaaagagaggtgtttccgtaccttctttgaaaagagagttaaaatgggagtttgttccaacagcttcagttggggatattgttgaaccgggagatgttattggaacagttaaggagacagcagccgttactcagaagataatggttccatatggaattaagggtgaaattacaagcattaaaggcggaacatatgacgttactgaaactgttgccacagttaagacagaagatggtgaaaaggaattaactttaatgcagaaatggcctgttagaaaaggcagaccttataaagagaaaaaagctccttataagcctttggttacaggacaaagagttatcgatactttgtttccaattgccagaggtggcgttgcagcagttccgggacctttcggaagtggaaaaacggttattcagcatcagcttgcaaaatgggctgaggcagatattgtagtatacattggttgtggtgagcgtggaaatgaaatgacagacgttcttaatgagtttccggaattaaaggatccaaaaacaggacagtcattaatggaaagaacagttcttatagccaacacatctgacatgcctgttgcagcaagagaagcttcaatttatacaggaattacaatagcagaatattttagagacatggggtactcagtagctttaatggcagattcaacatcccgttgggcagaggcattgcgagagatgtcaggtcgtttggaggaaatgcccggtgaagaaggttatccggcataccttggaagccgtcttgcacagttttatgaacgtgccggggatgttgttacacttggaaaagaaggcagggaaggagctttgtcagttatcggtgctgtatctcctccaggtggtgatatttcagaacctgtatctcaggcaacacttcgtattgtaaaagtattctggggacttgattctaatcttgcatacaagagacatttccctgcaattaactggcttacaagttattcactttatgtagacagaattggtggatggtttgaagaaaatgttaataaagattggttaaagcttcgacaggagttaatgaaattattgcaggaagaagcagagcttgatgaaatcgtaaaaatggtaggcatggatgctttgtctgcacctgacagattaaagatggaagcaagccgttcaataagagaagattatttgcatcagaactctttccatgaagttgatacctatacatcacttagaaagcagtatatgatgatggaattggtacttggtttctataataagtcaatggaagcccttaaacagggagcaagcgttgataagcttattaagatgcctgtacgtgaagcaatcggacgttttaaatatacacacgaagaccggcttgatgaagcattcaatgaaataatggacaagcttgccgaagaggtggcaaatacactggaaaaggaggacttctaatatgccaaaggaatatagaacaattcaggaagtagcaggaccacttatgatggttagaaatgtggaaaatgttacttacgatgaattaggtgaaatagaacttgcaaacggtgaagtaagaagatgtaaagttcttgaagttaatggaagtaatgctctggttcagctatttgaagactctacaggtattaatttgtctaacagcaaagtacgttttcttggaagaagcatggaacttggagtttcgccggatatgcttggaagagtttttgacggcttgggaaatccaatagatggaggtcctgacattcttccggaggaaagacgagatattaacggtgtggcgatgaatccggcagcgagaaattatccttctgaatttatccagacaggaatttcagcaattgacggacttaacactcttgtaagaggacaaaaactaccaatcttttcagcttcaggtttgccacatgccaaccttgcagcccagattgcaaaacaggcaaaggttattggaactgacgaaccttttgcagttgtttttgcggcagttggtattacttttgaagaatcaaacttttttatcaatagttttaaggaaacaggggcaattgacagaacggtattgtttatcaatcttgccaatgatccggcggtagaacgtattgcaacgcctagaatggcacttactgcagcagaatatcttgccttcgaaaaaggaatgcacgtacttgtaattataactgatattacaaactacgcagacgcattaagagaagtttctgcagcaagaaaggaagttccgggcagacgtggttatccgggatatatgtatactgaccttgcaacaatgtatgagcgtgcaggtcgtcagcgtggcaaagacggtagtattacaatgattccgattcttacaatgcctgaagatgacaagactcatcctatccctgaccttacaggttatattacagagggacagattatcttaagccgtgacctttacagaaaaggaattacaccaccaatagatgtacttccatctctttcaagacttaaggacaaaggtattggcgaaggaaaaacaagagctgaccacagtaacgtaatgaatcagcttttctcagcctacgcaagaggcaaggaagccaaagaacttatgacaattcttggtgaggctgcactgtcagacattgatcttatttatgctaagtttgcagacgagtttgagaaggaatatgtttcacagggctatgacgcaaaccgttccattgaggaaacgatggatattggctggaaacttttgtcaatgcttcctaagtcggagttaaagagaattgatgataagttccttgaaaaatattataagcagcaggattagaattaatattggttgtattgattttttagatagtttttagaaatgagggaaaattatggcaggaacaagagtaaatccaacccgaatggaattaacgaaacagaagaaaaagctgctttctgctactagaggtcacaagcttttaaaggataaaagagatgagctggtaagacagtttatggatcttataaaagaaaatatggaattaagacttaaagttgaaaaaggcataaaaaatgccaacatggagtttgccattgcaagggcaggaatgagcgaacaggttttgaacactgcacttatggcatcaaagaaaagcctgaatattaatcaaggtgttaagaatgtaatgagcgttgacatacctactttttcaactaatgacgaaataagtggaaatgacatatactcttatggctatgcttttacagcaggagatttggatgacgcagtatactctttaagtactgtttttgaagatatgcttaaactggcagaggtagaaaaatcttgccagcttatggcaactgaaattgaaaaaacaagaagaagagtaaatgccttagaacatgtaataattcctgaagcaatggaaaacataaagtatataacaatgaagttggatgaaaatgagcgtagtacacagattcgtctaatgaaggttaaagatatgatggttcagcaggcagtggaagagagacgagtgcaggatggattataataaattgactaaaaacaaaaattgacatattacgattaaaactttataactaagttaatccatatggaaatttaaatgttaggaaggtgtaggtatgaaaattttattttatgatacaaagaaatatgacaaggaatcttttgataaggttttgccaaagtatgaggacattgaaattgaatacgttgatagtgatatttccgtaagaaacgcagtgtatgccaaaggctttgaggctgtatgtggttttgtaagttcagatttcagtgctaaggttatagatgttttggcagacaatggtgtaaagattattcttttaagatgtgccggttttaataatgttgacattaaaagagctaaggaaagaggagttttagttatgagagttccgggatactcaccggaggcagtggcagaacacgctatggctcttgcccttgcaagtaacagacacattcataagggatacatcaaggttagagaaaacaactttagccttgtgggtcttacaggacttaatttctttaagaaaacagcaggaataatcggcaccggaaaaatcggcgctgcaatgtgcaggatttgcaaaggttttggaatgagagttattgcctatgacatatatcagaatccagacttggatttcgtagaatatgtcgaccttgatacattgttagcagaaagtgatttaatttcacttcattgtccgctaacagatgattcttatcatatgataaattcagaaacaataaataagatgaaagacaatgtagttcttgtaaacacatcaagaggtgcattaattgatacagaagacttgattaagggaatacgtcagcacaaattccacagcgtaggtcttgatgtttacgaggaagaaacagctaacgtattcgaaaaccgtgaagacgatataatggaaacatccattacatcaagacttctatcattcccaaatgtaatcgtaacatcccatcaggcattcttaacagaagaagccttggaggcaatcagctatacaacacttgaaaatgcccaaagctatattgaaggacatgtaatcaggcagaatttagtattgccacaaaaataggggaaaagactgaagaaaaaaaggacactttaaaaatcaagtgccctagtgtataaaccagttagaaagtgaatcggatataactccgatttgccctcagtgaattaaaaacaaataaaaataccataaaaactatacaatttgtttataaatccttgaaaatccaccactttattgtataatagtgtcaatagcagaaaataaaaacgttttcggataattcaataagaatattgaattattgacaataacacatttaaatcaggaaaatatgaattgaaaaggagattttgtatgagaaaggtattagcttttgcagtggtagctacagctacattaggtattggttttgcaggaactacagttaaagcagcagaaccagcacagaatattgatatttcaaagatgaaagttaactggagtgatgaatttaatggaacagaacttaacagtgaccattggactccggagattggaaatggaaactggggctggggaaacaatgagaaagaatactatagagcaaacaacatatctgtatcagatggaacaatgaagattaaagcccagacagaaaaagttggtagttacaattggacatctggaagaatcaaaagtgcaggaaaggttaacattggatatggatatgttgaagcaagaataaagattccttcatcacagggaatttggccggcattctggatgcttggaactaacggaaagacttggcctgcatgtggtgagattgatattatggaagctttcaacacaagatcagatatccagagcacaatccattatccaaaatggaatggagcagatcagtatgtttacactaaccgtaatataagtaataagacagaatggcatacatatggatgttacagagatggaagcatatgtgcattctacatagatggtgaacttttaaaaaaatacggaacatggacaaataagtttgtaagcataactgatttcgcagaaacatattcaacagcagatttaacaacaggaaactatgcaggacagcgtagcgtattaaatgatgattactatcttttgtttaatgtggcatgtggcggaaacttagcacagggtaaccctccaacaaacagtgattggagtgctacaatggaagttgactatgtaagatactacgtaccaaaaacagcagacgaacttgcacaggacaaaaaaaatgaagttaacaaaaaagacgacgacaagaacacaacaattgtcacagcgcctgcaagagcaaaaatcaaaactcttaaaaatgtaaagaagagaaaaatgcagattaaacttgctaaagtaagtggtgcaaaaggctaccagattcgttactgcgataacaagaaattccagggctatagtgttaagaacattaagaagacaaaagttacaattaagaagcttgacaaaaaagaaacctattgggttaaggcaagagcttacaaagtagtaaacggttcaaagaaatacggcgcatggtcaaaagttaaaaaagtaaaaatcaaaaaataaaaaatagcaataacaaaaataattgaataaatagtggaatgagagatgtttctggttagtgaaacactatcggaaacgaaagagaatctaaaaaagcatactttggggtaaaatacctccgaagtatgcttttgtgcgttgtggtgattcactaaagagaaactcagtttacagaaaattcacagaatatccttttttatccatttattaatgggtgttcttttttctaaaaatatgttaaaatggaatttgtgaaattgtatatcaaaacgaaatgaaaaatataatttgggagataacaatggaagaaaaaaacaacaaagaaaaaatcgctgaagaaagcgtacagagtaatgaaaatactgtagtagaagaagcaaacaataaagaattagaaataaataaagaagaaactacagtagagcaggaaagtgcagaagcagaaaagattgtagaaacttccgaacagaaagaggcagcagagtcaacaaaagagtttgcaacacaggaagattcagaacagaagcaaactgcaaaaaagaaagattcaaagagtgaagaatctgaaccggaagaaaaagaaaatggcagatacaaggttattgccaagttagagccaaatctttggacatatggaagccctgttttgtttgaaaaaggaactcttgagagagaccaggtaagtaacattaacagactttcacttatatttacaaatatctatgaagagaaggagataagagatctctacattacaatctatgcagatgacggtgaaggcaatgttgaacagattaaccacagctatcttgcaatgggacaggaataccttgcatcaaaaggcaaggctgcaaagattacaataaagaatgagaatgcagtcaagtttatcataaagatagacaaggtagtttttgtagacggttcagtttggactaagaaagacgctgtacttgaaagcgcaggagagatggaagacgtagaagtttttgcacaggcaaagactaaagactacgaagacaactacatctcaggaatggaagaagtacagaaagacgattctgcaagcattggaaatggaattgaaattcttaaacgaattgcgtggtacaagaatagcaaggaattaataaagacagcacataagaaatacgatattgccgtaaagaatgaagaaagaaaacaggcaagcgaaaacagacgtgctaacagacagaaagatgtaaaaaagaaatatatgacagctttggtagcagttggtgtaattattgcaattgtagccatagtcacagtagcgttctttattccaaacaagaaatacaagaatgcagaaaaattgcttaagaaccagaagtacacacaggcagtaacagagtttaaggaccttggaggatttagaaagagcaaggagttcttggcagaagcatattacaacattggtttacaggcacttaatgaaaaagatgaagacaaggcttcagactattttaagaagagtaacgatgctgacaagagctcagaatatggcaagcaggcaggtgctttccttgattattacgcagcaacagatgtgttagacaagaaagattacgacaaggcacagcagttatttacatcaagtgcccaggcagcatctgattttaatttaattaataaggcaagtgcaggaatggcacaggtttcatatattaaggcagattacagcacagcatggcagacaatcaagaacgtatatgcaaaggacaacaagactttccaggcacagtatgcggaatatggttatgcctacgcaaaacagttaattgacaaaggctcaattaaagagggaatggaagtttactcaaaagtagaaaaactttcaaagtcagcaaacttaagcgaaagtgtttataatcaggcagttaagcttggtgaggctggaaagattcaggaaagcttgaatcttttgaatcagattaaaggcaactacgcaaaagcaaaaacactttacgattcaatgaactcattccataagaaagtgtcattatggttaggaacctggaagcatagaggaactgtaaatggtgagaaaacaacttactatatcactttctcagaagtgttgtataagggcgaaccatgcatcaaaattaaggatatgaacaacaagtcattaggttatgatgtggaaatcagtagcaagaaccatataacacagattgaagttggaaaatatatgattcacttcaagcttaagaataatcacaatcagaaattaacatacacacttcttgaaggaaagaagatgttaagagagcttaagtacgaaggtgtaacatacaagacaaaatacaaaaagaaataataacaaattggcagaattaaaaagtacaacagtacattaattctgcctttgaactatatgtagtccctaaacgtttttatcggaaagatttaagaggttatatatgaaaaaaataatatcaataattatggcattggcaatgctggtgactcccgtaaatataactagtgtaaaagctgaccaaatttataatatagaaaaaagtagtcaaagtcagattacagaaaataaaatagaaaagcttataagcagtcaaaaagctgatataagaaccggaacggtaaaaatcgagaacaaaaaacttgaatcgataagtcttccgagagccaattatggaacaataaatcaggcagcaaccacattgaaaaaggctatgttggcgcaccaaaacatgctttatgtttttgtaaagtcaaagagttctgcagcagaccaaatttactacgatatagaagataaggtagtaagtgtaacagacaaccctattgagggagactatatgttttgggatattagtagcagagatgtttcgtacagagcgcaaaaagaaaacggatattatatgtaccagttcctaataaaaataaaatattttacaacattagaacagagaaatcaggtggacgataaagtaaatcaaatcatagaagagctaggctttacatcagaaacgactgattatgagaaggtaaaagcagtttacgattatgtgtgtaaacatgttacatatgctcaaagtcttgacgatgaaatagtttttacagcatattcagcattatataatggagaagcggtttgtcagggatatgcccaacttatctatagaatattgaaacaacttggaatatccgtaagagtaattcccgggtatggaaaagacaaaacagtgcgtcacggttggaacatagtaaagcttggagattattattataatctggatgcaacatgggattcacagctttcacaggcaggaatcagatatagatacttcttaaagggcgacaatttcaaagatcatacaagagatgaccaatacaaaaattcagatttttatagaaattatccaatggcggcatcagattacatctcagatggacaaaatgaacaatctgagaaaactaaaaacagtttttttgaaaataaaaaaacaaagattaaaaatatttcaaaaaacaaaataaagctgaaaaaaatcaaaggtgcaaccggatataagatacaatacagcacaaataagaagtttaaaaagaaagtaagaacaattaagacaaagaaaacaacctacaaaataaagaaactaaaaaagggaaaaacctactatatacgctataaagcgtacaaaaatagctcagaaggacaggttagtacagactggtcaaagacaaaaaaaataaaattgaaaaaataaaaacaataaagaggactaagaaataataaagaagtcctcttttttttacataaaaacaaaaatcaataaaaacatttcaaatactagtaaaaatgcacaaaataaaaacaattttaccccttataatgtttgaaaatgcacaaaaaaggtgctaaactgtcactagtacatttattcgggcttttgaagataaatcgtaattatattcaaaagggaagggagataaaaagaaatgaaaagaatgaaaaaagtactatctattgtattatcgcttgcaatgattttgacttcaattacagtatacaatacgaaaacaacaaaagcggaggatgacaatgaacaagcatttagtgacttcgaagttgctgtcaacgaaaagcagacaattactgcaaaatggagccataaggtaggttacaaagattatgtttatatctatagtaaagacgaagcagaaactataaatgagagtacagattttaaaaaacaagattctcatgatgctataagtactaataatgactggaattggaaccagagtgctgatggcgtaaatgctgatgctgataacatttatagaagcaaagactcatcaatagaaacacaaaaaggtggagaatgggttctagttgttctaagaagaaaaaaagacgataatagtctggttgcttttcataaatcagatgtcataaaaacaattgagtctgtgattacaaataagaaattcaatttaagatcaactggtatagattatacaaaacctgttgcaaatgctggtcctacatttatatgggatgctgtttctggagcagaaaaatatattattgaatatattgatgaagaaacaaaaaaaataatagcaacatatgagtacacaaataaacaatttactcattataaatacttttcagatattaagggaacaaaagccggagaaacatatacagtaaaggtttccgcaaaagactctgaaggaagtactatccattatgaaaatggagatacctatgaaataaaaggtgttgctaaatattacgaagcaccggcagttgaagatccagataagacagaaaagaatgtagaacagacaggttatactaatgctgaagacatcaaagattggaaaaagttagacggaaggacaagtgatggttcaacggcttggatttcgcaggcggtatatgattcaatggctgcgtatgaatgtaatggtctacttccagcaggagatccagttggtggaaagcagaaatataatatttcaagtaatctgaaggcagtggatgtatttgcttttgttgctaaggacggtcggccaacagctgttgttattaacggaacacgttatttaaatgcaacagcaaacactttagtttatgtaggaaatgactgtatttacataaatcaatcattattaactataccagaaggacagaacactgctgattatataatcacaccagaaggatcaaatggaacaccaacatttgtattgcaattaagaaaagacgagagatttacagtgtcaattaatggtaatgaaactgaaaaagttgaaacaaacaagacatatactttaccaactgaagaaaatgtagagtattactataataatggaaaaatttataaacctggaacagaagtagaaataacagaagatatagattttgttacaataaataatatttcagttaactttacaaatggtgctgcaatcagaattgatgacaatcaggctggtggaattagatttaaagccgatgttgatgtaacatgtggtgttgaaagtgaaaaagaaaatattattaatgctgttcagacaggtattcttcttacaacacaggataagttagataaagcaaataatgctgaattaaacattgataatattgagacaataggaaaagttttaaacattgaaaataaaggatggtttaatgatgaagtaggttcttattgcgcatcattggtgaatatagttgaagctaactatccgagaacttttgtagctagagcatacataaaggttacatcaaatgacggagttgattatgtatattctcaggataatggtgatgaatattcaaaatcagtaattagaaccattaaaggaattgcaaatagcatttttaaagataaaacagaatttaatggttatagtgatgatgaaaagtctttaattaagaaatttgcaggtattattgatacagctgaataggaggatattatgaagagagaatatataaaaccagaaatggacttaattaaattacgtaaagttgatattattacagctagtggtgattacgacgatacaagttttatggattataataccattattaatggattgaatgatggtaaatattctaaattccattaataattaataaagttttaaagaccaaaaaatcccaggcgaaaatcgtctgggattttttatataaatttctaattattactgatttaatccatttaacataatatcttctgaccaaccgtcatcgccgaacactgcctgacctgtgcttgttgttattatgttattaaaattccttcctgtattgcgtcagaattaatagcttcattgttatctgatgtaatagtagctttatatcttaaacctgtttcaacagttatcaatctaatagatacgccgttcgttatttctaaatcaagtttatttacagatgtaaatgccatatttccttcaagtttaacggatgctccagctttatacatttttccttcacagtagtaaccgtatgttgcagtttttggaagaactacaacattgttttctactgttgctaaattcccaatagtgaaagaaggcttttatacacgccagttttctttttatagttttaggtttgaattgggagtgaaggtttgacatgtaattttcaagggtgtcaattgatgtggatttttcaagactattattagtgaaaagactaaattgttttaaatcgatgctatatgctttaagtgtttttgaatccaatcttttttgaaattggcagtggtttaagtattctttgattgtgttttgtaatgtgttcatttgaattctcctttttctttaaaatatagataaaattgtaatacaaagacgaaaaaagtattaattttgtgtaaagtctgatataatgaaaacaccaagattgagcggaatttaaacggggattatgttgagggaacgagagaaaatagatataaaagcttaacagatttacagtttttggaagttcattttgagtacgaaactgaaatgattatgtaattaaaacagtgaaaagtgtttgttataatgaaaaaaatagggaatggttcgttaatgaaaaaagaaagttaaaaaataagagaaaaggagaaaatgtaatagaagtattcttaaaagtagtgaaagctgtttgatgaatgttggctggattgataatatagaggtcaaaaacaagaatacactgttttgtgatgaatgtgttgaagatatgaaagagtatgtagcaaagtgttataaaaataagtaaattggaggaatgaagatgaaaaaagcaaaagttaaatttattattatgttaacaatgatgatattgagcttaggtataacttttaaggtaatggcattgcaatcacctaatttaatgttatcaggaagtgagaatgttataaccgataacaatgcaattttgcacgcaactctttataatgcacaggcagagggaataaatgttaaggcatttaaatggactatatataaaggtaagattagtaacaatgttgtagtgaaaagcgttgaaaaagttaatacagcagctggtaataagattgagattgaatgcaatgtcaataaggatatgggaataaagctggagcctaatactgaatattggtacgagattgttacaatagcggataaggatttgaatatgcaattgtttagccagtcacattattttacaactttggcagaaggtcagggacctaaagaaagtactagcgttgcagaaacatcaactgttcagataacaactcctcaggaaactagtacaacaaaaatcaaggcaagtaagattacttcagttaaggttaagaaagctaagggaacaagtaagaagtcagtattaattaagtttaaaaaagttaatgtagcaaagaaatacaaacttcaatatgctaataataagaagtttaaaaaggctaagactaaggttgttaagaataatacatacttaattaaaaagcttaagtcaggcaaggcatactatttgagagtacgtgttaatggtgcggatgacaattggagtaaatggtctaatgttaaacgtgttttcataaagaagtagtaaaaaccaaggctcaccatatactataccaacatattgtgcaagcgaggcgattttatgaagattaaacaggcggcaagttatcaggatcaggttagaattttaaaatctaaagggcttattattgaagataagaatgattgtatgcagtttttgaagcatactaattattatagattttctgcttattgtgagtctttcagatatgagggcaagggcaggttcattgagggaactacttttgaccagattagaaatgtgtatatgtttgaccagaagcttagagcgtggctttttgaggtagttgaggagattgagtttgctttgcgtacacagatttcctatcaccacggtactaagtatggtccggacggatatcttgatccaaataatttcagcaggtatcacgatggcaggaattttcaacaccatcttagaactattttgcgtgagaataaggactcacctgttgtaaaacatcataatgataaatacgatggcaagtatcctttgtgggttattattgagtttttttctatgggtatgctttcaaggttttttaaggatatgtacaatgaggataagaatattattgctaatctttattctactacgggagcctgtctggagaattggattcagtgtgtgacaactattagaaacagatgtgcccattattccaggttttatgattgggagtttgcggattatccggtttttaccgagaaggctttgccaagggagaataccaaggtttggggacatttgcttgtgctgagaaatatgtatcctaatgaatatgagtggaatactgaattagttccacgattagaggatataattaatagatataaggacaatattaagtttgagcacttaggattgccacaaaattggaatgaatggttgataaaatgatgcgactaatttgcagtggcagtgtaaattagttgcaaattaaataggtggtgttattttggatttattcgtggtataatgtgaaacgaatggatatcataaggaggtagcattatggacgataaggaaaagatgatagatgatattgttgccatgcttgacaatagtgttaagaaaggcgacggacatattaacgttgttatagatgaaaatcagaaggattcaaaggaagttacaagaggttgtgcagattgttctgttaaccccatggcctgtagtgttccaactatagaacttccgggcgatgaagattttgaaagatagaagccgaaagaggttttgtgattaatcaggtattgatttttgcattacttgtttaattgaatagttgagcactacaattaaggagctgtcgcactatgcttatagggtggcagcccttgtttttctgtgaaattattttgaaaaagattattttttgaaaatattgtttgtaagttacagctattgttactagaaaatgaattttcataaaaataggaaatttaggaactctaataatatggaatttttgattagtatttaggttgtttttttacaacataattaaaaataaaatgatatttaacgaaagttgagggagattaagtggataagaagagaacagttttacattttatcttgcaatacattgggattaccattgcttcaattatgtatgcaatggcgttggcatggttccttaatcctaatcagttggcaccgggaggcgtgtcaggtattgccattgttttgaaggagatttttccatttttgccgggaatcggtgcacttattttgatttttaatattccaattcttcttcttggagtttggaagtttggcgtgaagtttactatttcaactatttatacggttgttttttcgtctattgtcattgacttgattccaagcattacaggcattaaggccattactatggatcctatgcttgcagcggttatcggtggtgctttgcatggcattgccattggtattttgtttagacttgaaactacaacaggcggaactgacgttattattaaaattatcagacagacgaaacctcatcttaaaacaggtcagctttatattattttggatcttgtaattcttgcagcgtctgctgtggcgtttagaaatatcgaggttgctctttatgcgggaattactatttatattacttcagcggttatggataaggcgttgtacaacggtgaccagcagactatggtttatattgtaagtgctaagcgtaaaattattgcagacagaatgcttcaggaacttgatcttggggtgactatgcttcaggcagttggcgcttataagaataacgaaactgaggttattatgtgcgttatgagaaaagcaactttggttaaggttagaaatctgttgaaggaagttgatccggatgcatttatgattgttagcacagctaatgaagttttcggtgaaggatttaagaaccagtacgaaactgagatttaagtaaagaatttagaaaaattatgaaattaaaaaaatggaattaatataaattgaatttgattgaaatataaatcaagtgttttgaacatttttatacaaaattagcgctggtttagtttacaaatgaatatacttgttttaaaataaaaatgtttatgatgtaaagttattaaggtacctaaatggattgaataaaagacgggagaaattatggcaacattaaaagacgtaaagagaattgtaattaaggtaggaacatcaacattgactcatcatacgggaaagagcaatatcagacagattaagaagctggttgcagttatttcagatattgttaattcaggtgttgaagtggcacttgttacttcaggtgctattggagttggtgttggtaagttgggacttcgcgatagaccgactaatacggcaggcaagcaggcagcggcaactatcggtcagtgcgagttaatgtttatgtatgacaagatgtttgcagaatttggtcacacagttggacagtttcttataactaagagagacgttgataatgacgagtgcagagagaatcttataaacgcgtttgagaaaacttttgaatacggagcaattccgattattaatgaaaatgatgcagtggcagttgaggaaattgtttttggtgacaacgacagtctttcagccattgttgcaaaattaattaaggctgatgcgttgttgattcttacagatattgacggactttatgataaggatccacataaggatgaagatgccagaattattcctgttgttgaagaaataacagagcatttgtttgaaattgcaggtggtaagggctcaaaatttggaaccggaggaatgattacaaagcttcaggcagcacagattgctacagaagttggaattcctacaattgttatgaatggtggagattctgataatatctatagagtgttggagggacatcaggtaggaacattttttactgcaaagtagatagaatataataggtattcatacaatgaaaaaatataataatgcatatataattacaaaggactgaaaaaggagggcatatgttagaaagattaggtataaatgccaaagaagctgaaaaaacattaatggttgcttcaagtgaaaagaagaatcaggctttaaagaagattgcagaaggtcttattgaaaatacagataagattattgaagctaacaaggttgatttggaaaatggtgaaaaaaacggaatggcaaagtccatgcttgaccgtcttaaattagataaagaaagaatcgaaggaatggctaagggagttcttgatgtggcaactcttcctgaacctgtaggaagaattctttcagccacagaaagacctaatggtcttagaatagaaaaagtgtctactccaattggagttattgcagttatttttgaggcaagaccgaatgttacttctgacgcagcagccctttgtctgaaatcaggaaatactgttattttgagaggtggcaaggaagcaattaattctaacaaaacaattgccaaagtaatgcgccaggctgtgaaagaagcaggaatgccggaagatgtaatacagttagttgaagatacatcaagggaaagtgctaacgaattaatgaagatgaatgagtatgttgatgtgcttattccacgaggcggtgccggattaattcaggcagttgtaaagaatgctacagttcctgttattgaaacaggtgttggtaattgtcatatttatattgacaagaatgcagaccttaaaaaagcagttgatattgtatttaatgcaaaaacatcaagaccttcagtatgcaatgcggctgaaagtttgttaatacataaagatattgcaaaagaagcccttgttgcaataaaaaacaaattagacgaaaaagatgtaactttggtaggggacagtaaagcaagagagataattccggatatggaaaaagcaacagacgcagattgggcaacagaatatcttgattataagatgtctgttaagattgtagattcagtagaagaagcaatagaccatatttataaatatagtacaggacatagtgaatgtattgttactgaaaatgcaggaactgcagaaaagtttatgaatcaggttgattcagcagcggtttatttgaatgcaagcacaagatttacagatggtggagagtttggtttcggtgcagaaatcggaatttctacacagaaacttcatgcaagaggaccaatcggtttgcctgagttgcagtcatttaagtataagatatacggtgatggacagataagatagtagtttaggtaatataaaaatcggaggagatatgtggaaaatataatccttcgatttttttattctatagaaaatttctctgaaattcctatagaataaaatgctttgcaggattgcagattattgttagttcataattttttaatttataattaatggactaaatatgaaaaatttgatatattaatagttaaaatgaaaataaaaatatttagatatgaaatatgaggaaaaagggaaaataaatacgaaggagtataataatagttatgaaaaaattattattcattattaatcctaaagcgggggtaaaaaagaacaaacattttgtagaagatgcccttgagatttttgaaaaagcgggatataaggttggagttaagtatacaaagaagagagcagatggaacacgcatagcaagagattatggcgctaaggcagacttgattgtgtgtatgggtggagacggaacactcaacgaggttatgcagggaatgctggaaggtgaaatttcaacacctttaggatatattccggcaggctcaactaatgatttcgctaatagtttaggattaagaaccaaccctaaagatcaggcagagtttattatggaaacagaagcaaaatcacttgatctgggatggtttaatggaagatatttcgtttatactgcatctgcaggtatttttacggaaacatcttactcaacaccacaggaattaaaaaataaattaggacattttgcttatatacttcatggaattagagaagtgttcaaaatcagaaggttaaaacttagaattgagacagaagatgaggtgtatgagaataaatatatattcgtagccataaacaatgcaaaaaaagttggcggaataatgagattggacaaggctcatgtagagtttaatgatggtgagtttgaacttatgcttgttgaatttccaaaggattttattcagttaatgaagactgttgggaagatatttatgcaggatttttcaggcaatataacatttaaacagattaaaagtgcaaagattacaaactgttcagatgttaactggtcattagacggtgaaaaagagaaagcccatgattttgttgaatttaaagttattcacaatgccataaactttatatattaaaaaatcaaattgcaaaagataaatctaatatacctcagtagtatatttgacaataaaaaaaagactggatgtaagagaggtttatatgactgtaactaaggaaaatattaaggattttactgaaaaatatgcacagatttgtcgtaaaaatgacacagttgagaaagaactttttactgagtatggagtaaaaagaggacttagagatttaaacggaaaaggtgtacttacaggtataactaacatttcaagagttgaatcttctaagatagttgatggaaagagtgtgccttgcgaaggacgactttatttcaggggttataaaattcaggatttagttaacggatttatgtctgagaacagatttggttttgaagaagtagcatatttattgctttttggagaattaccaagtgaagataatctgactgaatttaagaaaatgatggctgtatcaagacgattgccaactaactttgtgcgtgacgtaattatgaaagcaccaagcgaagatattatgaacacattgtctaagtgtgttttaactttggcatcatatgacaagaatatgtcagatacatcagtggaaaatgttattagacagagcattaatttaattagtacattccctatgatttctgtatatggttaccatgcatataaccattataagagaaacaaaagtttatatattcacagacctaagccggagctttcaacaagtgaaaacattcttagaatgttaagaccggataagaaatacacagaattagaagccaaggttttagacttagcattggttcttcatatggaacatggtggtggtaataactctacttttacaacaagagttgtaacttcatcaggttcagatacttatgctacaatttcagcagcactttcttcattgaaaggaccacgccatggtggtgcgaatgttaaagttgtagaaatgtttaaggacattaaacataatgttcatgatataacggatagggatgaagttaaggagtatttaagaaagatacttaataaagaagcttttaacagacagggacttatttatggtatggggcatgcagtatattcaatttctgacccaagagctgagattttcaaaagcttcgtagagaagttagctactgaaaagggcagaactaaagattttaacttgtatagtatgattgaaactttggctccgcaggttattgcagaggaaagacagatttacaagggtgttagtgccaacgtagacttttacagtggtttggtttacagtatgcttgatattcctgaagagttatttacacctatgtttgcaatagcacgtattgtaggatggagtgctcatcgtatcgaggaaatcattacagcagataagattatgcgtccggcatatgtaagcaactgcgactactatgattatacaaacattgaagaaagataagaattttggataataatccatagtaaaaaaatgcaattttgcaatataaaaatgcattaacgaatgtaataaaaaacacatcaataaatgtaataaaaaagtataaaaaatcggttacaaaaagattaagacataaacactaaacgaaaatattaaaacgtaaatattaaggtgtaaacgccaatatgtagatattaaaatataaatgttgaagtgtaatgttaaagcttgataaagttgtaaccgattttttttagtgttataataaaatgattagagaaggtacaagattttaataaaaacaggaggcattatgaagcttacacagagtgatgttgaaaaaataaaagaagaaattgaacatagaaaattagtcgtaagacctgaggctatcgaagctgtaaaagaggcaagagcccaaggggatttaagtgagaattttgaatattatgcagcaaagaaagacaagaacaaaaacgagggacgtatcagataccttgaaagagtattgaagacagctacaattataagtgacgaatcagcagatgatgaagtgggattaaataacactgttcaggtttattttgaagacgatgacgaaacagaaactttcaagattgtaagtacaatgcgtggagattcaattagcggtagaataagtggcgactctcccatgggagcagcccttatgggacacaaggttggagacagagttgaagtaaaggtaaacgaaaaagtaagttattatgttgtgattaaatctattgaaaatacaggtgaagaggaaacagacacaattaggactttttaatatgaaaaataatataaaaaaaggcagattaactatttatacaagttatagtcccggagccggaaagacccatataatgttaagggatgctttacaaaattatggggagaaggttgttataggctttttaaatggcaaggaaagaaaaatcaaaggctctaacataaaaccggtttatcattattcattagagaaaatagtttcaaaatataattttgagaatgttgtgattatggacgaaatgggaatgggcggaaaatgtgaggatgataaatcttttatttatgaagatattgaaaaaatactgaatgcaggaataaatgtatatacaagtactaatttaaagagatttcagaatgtaaatagcagttttaaagaaatatcaggaataggtgtaaagaaaactattccgataaggttccttgaaatggctgatagaattgtttttgtagatagaaaaccggagcttttggaaaatgattacaaaaatggagaacttttttgcaataaaaatcaaaattcacggattatgcagaaaaattttaacccggaaattcttaaaaaatatagagttataagtttggaaatattgaaggaatatagaaacaaaattgaaattatagaaaataatgataaaaatatataaaaacagtgttttttataattagaaagtatttgtaaaagtataatcccgtgataaaatatagtgtaagaatagacgaaacgggaatgaaaataattgaaaaatggaggaagaaagcatgaatattatgcacgatatttcaccggaaagaattagaccggctgatttcattgcgacaatcgaaataactaaaggaagcaagaagaaatatgaattagataaagaaaccggattattgattttagacagagttttgtattcttcagttcactatccggctaattatggatttattccaagaactattgatgaagatggagatccattagatgttttggttttgtgttcagaacctatagaacctatgtctttagtaagatgctatcctataggcgttatgtatatggttgacggtggtgataatgatgataagattattgctattccatatggagatccaacctataattgctacacagatattaatcagttaccatcacatatttttgaagaaataaagaatttctttaatatttacaagaatctggaaggaaaacagactaaagttgacgagtttggcggacctgtagatgcggcaaagattatatataagtgtatagatatttataatgaaaaatacaataattcaacagaaaagtaatacataatcttagaggagcaggatgatgacagttaatgaaaagattaaggctctaagagatagaatgagtaggcacaatatagatatttatattgtgcctacttgcgattttcacgggtcggaatatgtaggggattattttaaaacaagagaatttatttcaggatttacaggatcggcaggaaccgttgttgttactttgaaagaagcagcgctgtggactgatggaagatattttcttcaggcagaaaaccagcttaagaacacagagattaagcttatgaaaagtggccagtgtaatgttccgactattagggaatatttgcaaaaaaatgcaacagaatctttggtggtaggttttgatggaagaatgatgacagccacaatggcagaagaaatagaatccataaaaaacatatcagttataagtgatgtagatcttgttggagaaatttgggagaacagacctttaatgtgctgtaagcctgtatggaatctttcgttagaatattgcggaaaaacaaggtctcataagcttggtgatataagggaagaaatgaaaaacaaagaggtggatgttttagttttgacttctttagaagaaacagcctggacgttaaatcttcgtggtgatgatgtggaatgtacacctgtatttctctcttttatgttaataacttctttagatgccacattatatgttcagaaagcatccatacaagatgagatggttaaagaattagagaatgacggaatagcagttgaagattattttaaaatatatgacgcattagaaaatacaaaaaacaaaaaagtatggattgataagaatagtgctaattataatattgtcaaaaaaataaagaccaataatgaagttataaactgttttacacctgcactgaatcagaaagctattaagaatccaacggaaatttccaatatgaaaaaagctcatttgttagatggtattgcaatgaccaaatttatttattggcttaagactaatgttggaaaagaaaaaattacggaactttctttaggagaaaaattagaagaatttagaactgtggcaaaaagctatattgagccaagctttacgcctatagttggctataatgatcatggagccattgttcattatagtgcaaataaagaatcagattatgaaattaaagatgaaggtatggtattaatagattcagggggacattaccttgaaggaacaacagatataacaagaacaataagtctcggaaaagttacgactaaaatgaaaaagatgtatacggctgtacttaaaggccatttgaatttggcagcgtcagtatttaaggaaggctgttcaggagttgccatagactataatgccagacaaccattatgggacttaggacttgattacaatcatggtacgggacatggagtgggctatttgcttagtgttcatgaaccacctaatgccataaggtacagaattcttccggataatcaatttaatccagtatttaaagaaggaatgataactagcaatgaaccgggagtttatttagagggagagtttggaataagaattgaaaacttagttttatgtgagaaaaaagagaagaaccaatgggggacatttttatgttttaaaccattaacgttggttccgtatgatagggaacttatatcttttgaggacatggcagataaagaaattgaattacttgataattatcacaaaatggtatatgaaatgatttctccatatttaacattagaagaaaaaatatggttaaaagatattgttaagggagggaactcttcgaaatagaagagagcaaaaaatgaaaagtaaaagcaattaggatactgattgttgccataggaattaatacattttgtatggcgatgcctgttagacagagagtttattcaataaggctgacgaggctatgtattattctaaaacgcatggtaaaggtcaggcacatatatcacaaaaatagagaatattaaaaaagtcctctgcgtacattatataaagaatgtatgcaggggatttttttgagagaatatattgaagaaagggcaatggaaagtgcaagatacattgtaaaaaataaggctacggtaagacaggccgcaaaggtttttgggataagtaaaagtacagtacataaagatgtaacggaaaggcttgaagttattaatccgggattggcaggggaaataagaaaagtgctagatgtgaataaagctgaacggcatttacgaggtggtatggcgacaagagagaagtatagtcatatgagaaaataaaaaagaccttagttttttctaaggtcatcatttgcgggggacctagagggaatctcaccctctaggttgagtatgaaaaacttaaaatacgccattatagggtatgacgtatacaaactatgtgcaccacctaatcggtagtacattgataatataatggggaaatgttacgaaagtatgaataaaatgtaaaaaagtagaaaaatgtaatattttatacataaaagttgtaataattgtaaaataacagaatgtttaaaatttgtagcaaatatttacttttattttctttttaaattgtatataatgattacagtgtcaagatttgaaagctttgatatctaaattaatataataaaaaatagtttagggaaaagattattacatatactataattactgtttgaaaacttaaaggagtaacaaatgtttaatacagatattggaatagatttaggaacggcaagtgtgcttgtttttataaaaggaaaaggtgtggttttaaaggaaccttcagttgttgcagttgatagagatactgaaaagattaaggctgtaggagaagaagcgagacttatgattggaagaactcctgaaaatattgtggctgtaagaccacttaaacaaggagttatttcagattattcaattaccgaacagatgataagatattttatacagaaggcaatcggaaagcgctcatttaagaaaccacgtatttgcgtatgtgtacctagtggtgcaacagaagttgaaattaaggcagttcaggatgcagcttttcaggctggcgcaagagaggtctttattgtagaagaacctgttgcagcagccattggtgcaggaattgacataagtaagccttgtggaaatatgatagttgacattggcggaggaactacagatgtggcagttatttctcttggaggaacagttgtaagcacatctattaaggttgccggagatgattttgatgatgccattgtaagatatatgagaaagaaacataatcttcttataggagatagaactgccgaggagattaagattggaataggaacatgtttcaataaatctgataataagaagatggaagtacgtggaagaaatcttgtaacaggattgcctaaaactattgaaattacttcagaagagactgaggaagcccttaaggatgtttctgcaagtatagttgaagcagttcacagagtacttgaacagacaccaccggaattggcagcagatattgcagtgcgtggtatagtgttaacaggtggcggatgtttgcttcatggattagatcagttaattgaatctaagacaggtattaatactatgacagccgaagatccaatgactgttgttgccattggaacaggtcagtatttggattatattgatgaagcggcaaaagaaaagattaattaaaaacaaccaataaatatttatataaaatgctgtcccaatgtgtatcttttaactgtagttaagagatgcttaaaaaggatggcatttttattccataaagatttggatattttgacattcaaatcaggtaaaagatatatttaaaagcaactaataagtatttgaatgatgcaattgaaaaaagagagtaactagaaggcagttattaaggaaagagaaaatataccagatgaaaacagttagcggatatgttgaaaatataacatttagaaatgaagataatggttttactgtgttaacattatccagtggaaaagaagatataacatgtacaggtaattttggatatattggtcagggagaatatgtagaaatagaaggtgaggaagttttccatgagatttatggaaaacaaataaaggcaacaaactataaaattgttcctgcaacagatgaattatcgttaaaaaaatatttaggttctggagctataaagggtcttggcgcagtgcttgcagatagaatagtagacaagtttggtgaggatacttttagaattatagaagaggagccggagcgccttgcagaaatcagaggaattactacaagaaaggctatggacattagtactcagcttgaagaaaaaaaggatatgcgtgatgttatgatttttcttcagggatatggaatttctcctacattaagtacgaaaatatttaataattatggaacaagggtttatgacataattaaaactaatccgtatcagcttgcagatgatgtgacaggtattggctttaagacggcagatgaaattgccagaagagccggtgtggaagttaatgcgtctgtaagaataaaaagtggaatgtgctatgctttaacagaagcgtctttatcaggacatacatatcttcctaaggaaaaaatggtggaaactactattaatttgcttggattaagggatcagtacttaaatgctgacggaacatacaatatggaattgcttgataactgttttacggaacttgtacttgaaaagaagttaattttaaaagaaattgatgacaatcaggcagtgtttttgtctactttctattatacagaattaaatattgcaagaatgttgcttgaattaaatatttcaacaccggaagatgattatattcttggggtgaaaatggatacagttgaggatatgtcaggaattcatttagatgaccttcaaagacaggcagttgtggcaacacagaataacggtgtatctattataaccggtggcccgggaacaggaaagaccacaacaattaatgctataattcagctgtttgaatctgacggattagaagtaagtcttgcggctccaacgggacgtgccgcaaagcgtatgactgaggctacaggtcatgaggcaaagactattcacagaatgcttgaaatatcaggtgggcaaagtgatgatcctgaacttgatgcgaagtttggaagaaacgaacaaaatccattggaaacagatgttgttattgtagatgaaatgtctatggtagacacttttttgatgcatgcgtttttgaaagctgtaactgttggaacaagattggtttttgttggagacgttaatcagcttgcaagtgttggcccgggaaatgttttgaaggatattattgaatctgaatgctttaaagttgtatgtcttacaaaagtttttcgtcaggcaggggaaagtggaatagtaactaatgctcataagattaatgaaggaaaagaagttaaacttgacaatagttttggagattttttatatatagaaagagaaaatgctcagatggcattaaatgcaacaataggtctgataaaaacaaaacttccagcatacgtaggagcaaatgaaatggacatacaggttcttacacctatgcgtaacggaattttaggcgtcaactctcttaatccgggattacagatgtatatgaatccacctgacaaaaataagaacgaaaaagagatagccggtgtcgttttccgagaaggcgacaaggttatgcagattaaaaataattatcagcttgaatgggagcagagaacagataaaggttttcttgtggattccggctccggcatttttaacggagatatgggaattattacaaaaataaataatcttactaattatatagaagtaaagtttgatgatgaaagatatgttacatatgattctaaacaggcagaagagttggaactggcttacgctgttacaattcataaatctcaaggtagcgaatatccggcagttgtaatgcctttggtttcgggagcttcgatgcttatgacaaggaatcttttgtatacgggagttacaagagcaaagaaatgtgtgtgcatagtcggcagaaaagaaacttttaacgcaatggttaaaaatgaagatcagcataagagatattcaggattgaaatggcaacttattaattattatcaataagaaaaggtgggggaatgttaggtagagtaattgaatggatgtatccaacagtttgcccggtttgtcaaaaagttcttggcaagggaaagattatatgtgatacatgtaaagatgagttacatatcattaatgagccaaggtgtgctaagtgtggcaaaccattaacagacagtggtaaaacgtattgtaatgattgtaaaaagatgaaacattactatgacagggcaaggtctgtttttgaatacacaggggaaatgaaacttgttttatacagatttaaatatggaaattccagggattatgggaaattttttgcaaaagtggcaaaagatgtattggaaaataaattgaaagaatggaatgttcaggcaataattccggttccaatgtataaagataaggaaataaagagaggttataatcaggcggaagtttttggcagagcgctaagtaaggagacgggaattgctttagacgataaatgtattattagaaagaagtctacggttccccagaaaaagcttagcaatgaaatgcggaaaattaatttgcagaaagcctttggcgtggacaggaaaatatgttccgaatataaaacagtacttttagttgatgacatatatacaacaggtagtacttttgatgcctgtgcaaaggtgttaaaggtggcaggagttgagaaagtgtattgtctttccgtggcagttggaagggatggatagaataataaaaaagactatagtttaggaattaatccagcttcaaaatataaatcgtaaatattaataaaaaaatgttgacgcatttgtatttacgtgttatatttatgaggcgagcaactaggtcttttttttttgcaaaaaaatttagactttaaacatataaaaaatgcggaggtgaaactcatgagaacaagaattacattagaatgtactgaatgtaaacagcgtaattacaatacaacaaaggataagaagactcatccagacagagttgaaacaaagaagtattgtaaattctgccagaaacatacattacacaaagaaactaaatagtttgagttaatggagggtaagaaaatggcagaggcaactaagaagaaagaaagccgtattaaaacttggtggacaggtgttaaggctgaattttcaagaattatctggccggataaagcaacaattattagacagacagttgttgttgtggtaatcacaattatcgtaggcgttcttatttctctcattgatagtgttgtacaattaggattagatgctattattggaagataagaattaaaaatatgaggtgattaaatgtcagaagcaaattggtacgttgttcatacttattcagggtatgagaataaagttaagactactattgaacagacaattgagaatagaaaattgcatgatcaaatattagaagtatcagtacctacacaggaagttgtcgaacttaaaaacggcgtaagaaaagtttctgagaaaaaacttttcccaggttatgtgcttataaacatggttatgaatgatgatacatggtatgttgtaagaaacacaagaggtgttacagggtttgtaggtcctggatctaagccggttccacttactgatacagaaatgctttctcttggaatcaagaatgaaaaagttgaagttgattttaaagaaggcgatatgattgcagtcatcggtggcgtttggtcaggtacagcaggcgtggttaaacgtattgatgagaacagacagacagtcacaattaatgttgacatgtttggtagagaaactcctgtagaattaaactttacagaagttaaaaagatgaattaagattcacgttgtgaattttaataatgcacataagtgctaatagaagaaggttttgcaatgaatagcaaggccgtgggagggattcccgctaataccacaaatttaggaggtgccgaaagatggcaaagaaagtagaaggttacattaaattgcagatcgaagctggcaaagcaacaccagctccaccagttggtccagcacttggacagcatggattaaacatcgttcagttcacaaaggactttaacgcaagaacagctgatcagccgggaatgattattccagttgttatcactgtttaccaggacaagagttttagtttcgtaacaaaaactcctccagcagcagtattattaaagaaagcttgcaagatccagaagggtgcaggcaattcattaaaagaaacagttgctacaatctcaaaggctgatttacagcagatcgctgaaacaaagatgcaggatttaaatgctgcaagcattgaagctgctatgagcatgatcgcaggaacagctagaagcatgggaattaaggttgaagactaattttaaaatgaattgaaaaaagtgggaggtatatccgctattaccactaggaggtttaaatgaaaagaggaaagaaatatacagaggcagcaaagttaatcgatagagctgcacagtatgacacagaagaagctatttctttagtaaagaaagcagcagttgcaaaatttgatgaaacaatagaatgtcacatcagaacaggttgtgatggacgtcatgcagatcagcagatccgtggtgctgtagtattacctaacggtacaggtaaaactgttaaagttttagttttcgctaaaggtgctaaggctgatgaagctcaggcagcaggcgctgatttcgtaggcggtgaagagttaataccaagaatccagaatgatggatggttagacttcgacgttgttgttgctacaccagacatgatgggtgttgttggtagacttggtcgtgtacttggacctaagggcttaatgccaaaccctaaagcaggtacagttacaatggacgtaacaaaagctattgatgatattaaagccggtaagattgaatatagattagacaaggctaatatcattcatgttccagttggaaaagcttcatttacagaagaacagttagtagaaaacttcaatgcacttatgggtgctattaataaagctaaaccagctgcagttaagggtgcttacttaaagagcgttactcttacatcaacaatgggacctggagtaaaggttaacccaactaagttagtaaacgctaacgcataatttaaggttgttactgaacaatcagttgacaataaaataagaatgtgttattatgcacaagtggtttaataccaattgccgaagacagtaggtgcctatggggatttatcctttataagggcgtaaacttagtacctaccgaggaatgaagttataaacatgactgacaatacctctctgtttcggcagagaggttttttatactattgtataatattcggcgcaatgtttggttgcagacctaaattttataaggaggcaaaacaatcatggcaaaagtagagttaaagaaacctgtcgttgaagagatttcagaattactcaatggtgcagctacagcagttgttgtagattaccgtggacttactgttgcagaagatacagaacttcgtaagcagttaagagaagctggtgttgtatacaaagtatacaagaacactatgattaattttgcaatcaaagatactgaattcgcagatttagctcagcatcttgaaggaccaacagctattgcagtatgtaaagatgatgctacagcagcagctagagtattagcaaaattcgctaagacagctgaagctttagaaatcaaaggcggcgtagttgacggagtttactatgatgcagcaggaatcggtcagattgcatctatcccatcaagagaagtacttctctcaaaattacttggatctatgcagtcaccagttacaaacttcgctcgtgttattaagcagattgctgaaaagaacgaagaagttgcataatcaggcataatctgataatgaatgctaagcattcacattaaagatggatttaataacatcgaaacaattataaagaattattaatggaggaaattacaatgacaacagcagaaatcattgaagtaatcaaaggattaacagttttagaattaaacgatttagtaaaagcatgtgaagaagaatttggcgtatctgcagcagcaggtgttgtagtagcagcagctggagcagaaggtggagcagctgaagaaaagacagaattcgacgtagaattaacagaagttggtgctaacaaggttaaggttatcaaggctgttaaggatgctacaggattaggattaaaggaagctaaggaagtagttgacggagctcctaaggtagttaaagaaggtgctacaaaggaagaagcagaagcattaaaggctcagttagaagaagttggagcagttgtaacattaaaataatcgcgacaaacttttcgcagagcgtgcgctcaaacataaaaagagagacagggttgtgtttacacaaaaccctgtctctctttttatgtttgcacgcgtgctttcttcgataccaagttgatagtgcttaaaaatataaccccaataatcaaacagaaatattcaataaaaaagtccttgacaccaattgttacctatggtaaaatcctactgttatgcttaaaagtaggcgtagtgcgcccttttgacagcaatgaaagtgctaaaacagtacaaaaacttaattttattaagcaaaagtaactaaaaaagtaataaaataaagacaaggagtgaaatgtcaatggagaaaaacagaattcgccctgtaaaatcaggaaaaggcatacgtatgagttattcaagacaaaaagaagttcttggaatgcctaatcttattgaagttcagagagattcatatgagtggttcctgagtacaggtcttaaggaagtattggaagatatatctccgattgaagattacgcacaaaacttaagccttgagtttgttgacttcaaattatgcgaagatgagaagaagtacacaattgaggaatgtaaggaaagagatgcaacatattctgcacctttaaaagttaaagtaagacttcataacaaggagacaggtgaatttacagaacacgatattttcatgggtgatttaccacttatgactgcaacaggtacattcgttatcaatggtgcagaacgtgttatcgtaagccagttggttcgttcaccaggtatctactacgttatcggtcatgataaagtaggtaaggaattatatacatcacaggttattcctaacagaggtgcatggcttgaatacgaaacagattcaaatgatattttctatgttcgtgtagatagaacaagaaagcttcctgtaacagttcttattagagctttaggaattggaacaaatgctgaaatcactgaattattcggtgaagaagaaaaacttacagcaacatttgagaaagatccaagtacaagctatgaagaaggccttttagaactttacaaaaagattcgtccgggcgaacctcttagcgttgacagtgctgaatcaatcgttgcaggtatgttctttgatgcaagaagatatgaccttgcaagagttggtcgttataaatacaacaagaaattggcttacaagaaccgtattaaaggtttaccattagctgaagatgttgtagatatgacaacaggagaagttttagcagaagccggaactgttgtaacagaagaacttgctattaagattcagaatgcagctgttccatcagtaatgattcagacagatattaagaatgaaaaagttctttcaaaccttgctgtagatattaatgcatatgttgactttgattgtaaagaattgggaattaatgaagaggtttattaccctgttcttgctgaaattcttgctgaaaatgaaacagaagaagaattaaaagatgcaattaagagaaacgtacacgaattaattccaaagcatattactaaggaagatattttcgctacaatcaactattgtatgaatattgaatatggaatcggttcagaagatgatattgaccacttaggaaacagacgtatccgtgcagttggtgaattacttcagaatcagtatagaatcggtctttcaagaatggaaagagttgttcgtgaacgtatgacaactcaggatcttgaaggagtttctccacagacattaattaatataaaacctgtaactgcagctgttaaggaattcttcggaagttcacagttgtcacagtttatggatcagaataacccattgggtgaattaacacataagagacgtttatcagccttaggaccaggtggtctttcaagagatcgtgccggattcgaggttcgagacgttcactatacacattacggtagaatgtgtcctattgagacacctgaaggtcctaacatcggacttattaactcatttgcatctttcgcaagattaaatgagtacggatttgttgaggctccatatagagtagtagacaagtcagatcctgaaaatccaagagtaacagatgaagttgtttaccttacagcagatgaagaagataattacactgttgcacaggctaatgaaccattggatgaagaaggacattttgtacacaataacgtatcaggacgttatagagaagaaacatcacagtttgataagaagagaattgacttaatggacgtttctcctagaatggtattttcagttgcaacatcaatgattccatttttacagaacgacgactcaaaccgtgccctcatgggatcaaacatgcagcgtcaggccgttccacttattacaacagaagctcctgttgttggtacaggtatggaagcaaaggcagctgttgactcaggtgtttgtgttgttgctaagcgtgccggtgttattgaaagatcaacatcaaaagaaattactatcagatatgatgataatggagaaaaagaaacatataagcttcttaaattccagagaagtaaccagagtaactgttataaccagcgttcaatagtatttaagggagaccacgtagaagcaggtgaagttattgctgatggtgcatcaacatctaacggtgaaattgcacttggtaagaacccacttatcggtttcatgacatgggaaggttataactacgaagatgctgtacttcttagtgaaagattagttcaggacgatgtttatacatcaattcatatagaagaatacgaaacagaagcaagagatactaagcttggacctgaagagattacaaatgatgttcctggcgtaggtgatgaagcccgtaaagaccttgatgaaagaggtattatcagaatcggtgctgaagttcgtgccggagatattcttgttggtaaggttacacctaagggtgaaacagagcttacacctgaagaaagacttttgagagctattttcggtgaaaaggcaagagaggtaagagatacatcacttaaggttccacacggtgaacagggtatcattgttgatgctaaggtattcaagagagaaaatggagacgaattagctccaggcgtaaacgaatcagttcgtatttacattgctcagaagagaaaaatttccgttggtgataagatggccggacgtcatggtaacaagggtgtagtttcacgagtattaccagtagaagatatgccattccttccaaacggaagaccacttgatatcgtacttaacccattgggtgtaccttcacgtatgaacattggtcaggtccttgaaattcacttaagccttgcagctaaagtattaggatttaacattgcaacacctgtatttgacggtgctgacgagtacgacattatggatacacttgaaatggcaaacgattatgccaatacagagtgggaagatttccaggcaaaatatcaggataaattaaatcctgaagttatggaatatcttggtgaacaccttgatcatagagaagaatggaagggtgttccaattgcaagagatggtaaggttagacttagagatggtagaacaggtgattacttcgataaccctgttacaatcggattcatgcattaccttaagttacatcacttggttgatgataagattcatgcacgttcaacaggtccttactcattagtaacacagcagccacttggtggtaaagctcagttcggtggacagagatttggtgaaatggaagtttgggcacttgaagcttacggtgcatcatatacattacaggaaatcttaacagttaagtctgatgacgttgtaggacgtgttaagacttatgaagcaattattaagggtgaaaacatccctcagccgggaattcctgaatcattcaaggtacttattaaggaacttcagtcattagcacttgatgttaaggtattagatgaaaatgacaacgaagtagaattaaaagaaagcattgattacggtgaaacaaactttaatgcaattcttaatgataataagaactatagccagaagaaagaagacagccagagctttgaacaggctggttatagcacacaggaatttgtaggtgaagaactccagactgttgatgctcagggaaatgtagttgaagatggaatggatgaataattaagaagggagatttgatcatggcagataataacgttagtgaacaggtatcatttgacaaaatcaaaattggtcttgcttcacctgaaaaaatcagagaatggtcaagaggcgaagttacaaagcctgagacaataaattacagaactttaaaacctgaaaaagatggtttattctgtgaaaagattttcggaccaagcaaagactgggaatgtcattgtggtaaatacaagaaaatcagatataaaggtgtagtctgcgacagatgtggcgttgaagtaacaaaagctagcgtacgtagagaacgtatgggtagtgttgaacttgctactcctgtatcacatatttggtactttaaaggaatcccttcaagaatgggattaatccttgatatttcaccaagagtattagaaaaagtattatactttgcttcatatatcgtgcttgatccaatggaaacaacattggattacaagcaggtattgtcagaaaaagaattcagagaagcatatgaagaattcggaggaaaattccgtgtaggaatgggtgctgaagctatcaaagaattgcttatggatatcgatgttgaaaaagaagcagagcaattaaaatcagaattatttgaagcaacaggacagaaaaaagcaaaaatcgttaagagattggaagtttttgaagcgttcagaaattcaggtaacaagccagaatggatgattttagatgtaattcctgtaattccacctgatttaagacctatggttcagttagatggtggtagatttgctacatctgatttaaatgatttatatagaagaattattaatagaaacaatcgtcttaagagacttcttgaattaggcgctccggaaattatcgtaagaaatgaaaagagaatgcttcaggaagctgtagatgcattaattgataatggtagacgtggtagacctgtaacaggacctggtaacagagcacttaagtctttatcagatatgttaaagggtaagcagggacgtttccgtcagaacttacttggtaagcgtgttgactactcaggacgttcagttatcgtagtaggaccagaacttaagatttaccagtgtggtcttccaaaagaaatggctattgaattattcaagcctttcgtaatgaaagaattagtagctaatggtacagctcacaatattaagagtgcgaagaagatggttgaaagacttcagacagaagtttgggatgtacttgaagatgtaatcaaagaacatcctgttatgttaaaccgtgcccctacacttcatagacttggtattcaggcgtttgaaccaattcttgtagaaggtaaggctatcaaacttcacccattggtatgtacagcgttcaacgccgatttcgacggtgaccagatggctgttcatcttccactttcagtagaagcacaggctgaatgtagattccttttactttcacctaataacttgttaaaaccatcagatggtgcacctgtagcagttccttcacaggatatggtacttggtatttactatttgacaatggatagaatggttgatcattctaaggaagaagaaattgcttctacagtagctgaagatgctcctatttatgatacagatgaagaaattaaggaagctttagataaaggaattatcggagctcacgatatgattaagtatcatgcagatggtagagttgtaatttgtgaacctattgatgcattaggacattcatttagtgatattaatcaggctattttagcttatgaaaataaagaaatttcacttcaccagagaattaaggttaagagaactgtattcaacggagaaggaaaagaagtaacaggtattattgacactacacttggacgttgtttatttaacgaaattcttccacaggatttaggattcgttaagagagaaactgatgaagattaccttaaattggaagttgatttccacgtaggtaagaaacagttaaagcagattcttgaaaaggttattaataaccatggagcaactaagactgcagaagttcttgataacattaaggctatgggttataagttctcaacaagggcagctatgacagtttcaatttcagatatgacagtacctgaatcaaagaaacagattcttgcagatgcagaacacacagttgatgaaattacaaagcattatcgtcgtggtttcttaactgatgaagaaagatacaaagaagttatcgaaacatggcaggcagccgataatgaacttacaacagcccttcttagtggtcttgataagtacaacaacatctttatgatggccgattccggtgcccgtggttctgataaacagattaaacagcttgccggaatgcgtggtttgatggctgatacaacaggtaagactatcgaacttcctattaagtcgaacttccgtgagggtcttgacgtattggaatacttcatttcagcacatggtgctagaaagggtatgtcagatactgcccttagaacagccgattcaggttaccttacaagaagacttgtagacgtttcacaggatcttattattagagatgtagattgttgtgaaggtaaggctattccatttatggaaatcgaagacttagttgatggaaacgaagtaatcgaaagtcttgaagaaagaatcacaggtagaactgctgcagaaacaatgtatgatgcagaaggcaatatgattgttaaagctaaccatatgattacaccaaagcgtgcagcaagaattgttgctacaggtgttaaatcagttaagattagaacaattcttacatgtaagtcacacgtaggtgtatgtgctaaatgttatggtgcaaatatggcaacaggacagagagtacaggttggtgaggcagtaggtatcatcgctgctcagtcaatcggtgaacctggtacacagcttactatgagaacattccatactggtggtgtagccggtgacgatattacacagggtcttcctagagtagaagaattatttgaagcaagaaagccaaagggacttgcaattattgcagagttcggtggtgttgctgaaattaaggaaacaaagaagaaacgtgaaattatcgtaactaaccctgaaactggcgaatcaaaagcttatcttatcccttatggatcaaagattaagattcttgatggtgctgttcttgaagctggtgacgaacttacagaaggtagcattaacccacatgatttattaaagattaagggacttcgtgcagttcaggattatatgatccgtgaagtacagagagtttaccgtctacagggtgtagaaatcaatgataagcacgttgaagttattgttcgtcagatgcttaagaagattaaggttgacacagccggtgattcagaattcttaccgggaacaacagttgaagttcttgactttaacgaagttaatgaacagcttgaagaagaaggcaaggaacctgcaacaggtacacagattatgcttggtatcacaaaggcttcacttgcaacaagctcatttttatcagcagcttcattccaggaaacaacaagagttcttacagaagcagctatcaatggtaaggttgatccacttgtaggtcttaaggaaaacgtaattatcggtaagttaattcctgcaggtacaggtatgaagagatacggagatgtaaaattaagtacagatgaacgtatcgcaagagaacaggaacaggcagcattagcagtttcagcagaagatgtagaagatgaagcagaaaatgctgaagataacaatgatgtaattgaagtttcagaagatacaattgaaattactgaagaataaaacatttgatggaaatttataataaagtttccataaaataataacagacagttcgtaaccatcctgtctataaacaaaactaaggaagaatctgctagatatagcagtttaaaaagagtgtccttagtaggcactctttttattttataggagaaaaacaatggtagaaggatttaatccaataagatattctgtcatagaagacaagaaccctagagagatagtaatgttagttggagatggatgtaaatggagaaaatgcagattttgtgattatcatttagattcaagcaaagacatagaagccaattttcagttgaataagcaggttttaagtaatgtaacaggaaaatttggggaacttgaggttataaactcaggaagttttgttgatttagataaaaaaactatagaattgattaagcaaatatgtttgaaaaaaggtataaaagaaatccattttgaatgtcattatatgcataaagatgatgttcaaaattttaaaaattcttttttgaatattggaattaaaccgattataaagttaggtttagaaacttttgactatgatttaagagagaaagttttagttaagggaattgaagaaaagaatcctgaagtaattgcaaattattttgatgaaattaatttgttacagggaatttcaggacaaacaaaggaatcaatgattagtgatattgagacaggtttaaaatattttagcagaatatgtgtaaatattatggttgaaaatcagatgccgattaaaccggataaaaaggttattgaacagtttatggaatatgtttatcccttgtacaaagataatgatagggtagatatattattaaataatacagattttggtgtaggatgattaaaggagaaaataaaaatgtctaatgaaatattactggttttatcaatatttataatttacggaagcgtaatagtaatgtataaattatttggaaagcagggattattctgctttacaagtatagcaacaattgcagctaacatagaagttttaataatggtcaaagcatttggaatggttatgacattgggaaacgttttatttgcgtcaacattccttataacagacattgtaagtgaagtatatggaaagaaagatgcaaaaagagcagtacatattggaattacaacatcaattgtatttataatattttcacagtggtggcttttatacacaccagacagcacagattttgcaatgcctgcaatgcagacaattttttcaaatacaccaagacttatgattacaagtatggttgtatacgctatagttcaggaatttgatgtttgggcataccataaatggtgggattttactaacaaattagtaggagacagggaaagatttctttggcttagaaacaatggttcaacattaatttcgcagtttttgaataatattttgtatacgtttggtgcattctggggcattcatgattttaagacacttataagtattgcaatttcaagttatgtaatatttatagtaacaagccttgcagatacaccatttgtgtacttggcaagaagaatatcaaagaagataaaagaataagaaaaaggggcacacgattgatttggtgttgccccttacttattttatgcgttgtatagctagataactccgcttcaaacacgttacttttcttgttttgctccgtcatttattataagacaaaaatcaaaactcgcctatggctcaaacagttgattttttagatacttttatttattaaatacagatattaaaccgtttacaattatgaacagtgttacaagtggaagtatccatttgcagtagaaacggatttttccaggaacattcaggccgtttccagtgttgacttcttttaggtagttgtcccagccccacccgtatttgcttgtgcagaagagtgtgtaaattagggaaccaattggaagtattaggttacttacaaggaagtcttctaagtccattacattagtgccttttcctaaaggatggaagccggataggatgttaaagccaaggacgcaagggattgagcctattattattaaaattgtattaatgagggctgtcttttttcgcccccagccccataagtccatacaagatgacattatgttttcaaagacggctattactgttgagaaagctgcaaaagccataaagatgaagaagcagcttccaattattctgccaccgggcatttttataaatatgtttggcaatgttacaaaaataagacttggtccctgatcaggatttactccgaaagcaaaacatgatgggaatattataagtcctgaaactattgcaacaaaagtgtctaaggctactatgttgattgattcaccaagtagtgaatggtctttacttaagtagcttccgaaaattgtcatggaacccataccaatactaagtgtgaaaaatgcctgattcattgcagcaacaagaacattaataagtccaatattttttatttgctgaaaatcaggtactaagtagaaatacaagcccttagaagcaccttttaagaaaatgctgtttattgcaagtacagccataatgactaaaagggcaatcatcataccttttgaaattttctcaacaccattctgtaagcctaatgagcaaacaagaaatccaattacaattacaacaactgtccagaaaatcatttccgaaggtacagaattcatatcagtgaaatgatccttaacctgagaggttgtagcaccaataaaatcacctttggcagtgtcaaagaaatatttaagcatccatcctgcaactgtagtataaaacatcattaatatataattgccggccattcctatgtaaccatgtaaatgccaaaactgacctttcttttctaaagttgtaaatgctcttgcaatactttgctgactagctctaccaacagaaaattccattgtcaaaataggaagacctagtataacaagaaataaaacataaaataatacaaaacatccgccaccgttatttccaactacataaggaaaacgccacacattaccaataccaatggcgcaaccggcagaaataagtataaatcctaaacgggatttgaatttttctctttccatataaatataaaaacctcaattctaaaatagtcactgaatcatattaaataataaaaaataatttgtcaatttaacgtattagagcgatgaaataagcaataaaccgaatatgcttgtaaataatgattaaatgttgcaattagtactacattttattataataaaaatattgctactttagtacgctaaagactgcatggcttataaatactcctttgggagtgagaaaatattaacaaagaaggatggaaaaatgaaagatactcttgaaatcagatggcacggtagaggtggacagggcgctaaaacagcagcattattgttagctgaagtagcgtttaagactggcaagaatgctcagggatttcctgaatatggtccggaaagaatgggtgcccctattactgcatatgacagaatcagtgatcagcctattagagttcattctaatatttatgatcctcagtatgttgtggttgttgatgaaacattaatagagatagttgatgtaacaaaaggcttaagagaagatggagcaatccttattaatacagccagaccaaaagaagaaattattccacatttaaagggatataaaggtaaagtttatacagtagatgcaagaaagattgcaatggaaacattaggaaagaatttccctaatacaccaatgcttgcagccattgttaaagttaccggagttattgacgatgaaactttccttaatgaaatggaaggttcttttaagcacaagtttgctaagaaacctgaagttattaaaggtaatatggatgcgttaagaatagcgttaagggaggttaagtaaatggcaaagacagatatatcgaaattaggtcaggatgtggcatggcaggatgttacatgtggtaatacaattgtaggttgtggtacaacaaaacagtttataacaggagactggactaatgttgcccctgttatagatgaagaaaaatgtaaacagtgtcttttatgtgtgcctgtttgcccggacagtgcaattcctgtaaaagaatataaaagacagactatagattacgatcattgtaagggatgtggtatttgcgttaaggcatgcccatttggagcaattaagatggaggtgaaaaaataatgccaaagagagttttattatcaggaaatgaagctgtagctacagctttaagacagattaatccggatgttttcccggcatttccaattacaccttcaacagaaatacctcagtatttttctaattatgtttcaaacggattagtagatactgaatttattacagtagaaagtgaacatagttctatgagtgcagctataggagcttcagcagcaggtgcaagagcccttacagcaacatcatctgcaggtcttgcatttatgtgggaagttttaggagttgctgcttcaagtagattgcctattgcattgacagcagtttgtagagcacttacaggaccacttaacattaactgtgaccattcagacacaatgggagcaaaagacagtggttggattcaaatttatgctgaaaataatcaggaagcttacgacaatatggttatggcatataatattgctgaaaacaaagatgttagacttcctattatgatttgtcaggatggttttattacaagccatgctgtaaacgatatggaaattttagatgatatgacagttaaggattttgtaggcgaatatgaacctgaagattatcttcttaatccaaatgaaacatttgctgttggcccttatgctgtatcagattattatatggaatcaagaaaagctcaggctcatgccatggaaaatgcaaagcaggttattcttgatgtggcaaaggattttgaaaaaatctcaggccgtaagtatggtcttattgaagaatataagatggaagatgcagaatatgcagtagttataatcggttctgcagcaggaacaactaaggatgctattgatcatatgagagaaaatggtgaaaaagtaggtcttgtaaagattagatcatttagaccattcccaggcaaagagattgcaaaagcattaaagaattgtaaggcagttgcagtaatggatcgttcagagagcttttcaactaacggaggacctgttggtgctgaaacaatgcaggctatgtatattgaaaaatgtcaggcacttgctatcaacattatgtatggtattggtggtagagatgtaagagttgaagatatgattaatgtatatgaaacattaaaagaaatcgcaagaacaggtgagacaggtgatgtttaccgttatatgggattaagagacaaggaggcaaaataatgggctataattttaaagaagtaatgaataaacctgaaagatttgctccaggtcatagaatgtgtgcaggttgtggagcaacaatttgtgcaagaaacgtgcttcgtggacttcacgaaggagataaggctgttattggttgtgcaacaggatgtcttaatgtttcatctttccagtatccatacgttgcatgggaagacagttatattcatagtgcatttgaaaatgccagctcaacaatggcaggtgttgaaggggcttacaaggctatgaagcgtaaaggcaagattaaagaagattataagtttattgtatttggcggtgatggtggtacatatgatattggtattcagtcattgtcaggtgcaatggaacgtggaacaaattatacatatgtgtgctatgataatggtgcttatatgaatacaggaacacagcgttcttcagctacacctatgtatgctgatacaacaacaactcctgtaggtacacagtgcaatggtaaggaacagtacagaaaagatcttgcagcaattcttgcagcgcatgatattccttatgttgctcagactacatatttcaacggaatgaaggatttgcatacgaaggctgagaaggctatttatacagaaggacctgcatttcttaatgttatggctccatgtccaacaggttggaaatataaaacagatgaaattatggatatttgcaaattagcagtagaaactaattattggccattgtttgaagtaattgatggaaagtggattttaaactatgagcctaagaacagacttccaatcgaagatttcttgagaacacagggtagatttaagcacttatttaaaccaggtaatgaacatcttattgaaaaattccagaaggaagttgatagaagatgggaagatttattatttaagtgtagcagataatattaatcacaaaaaacgtgactggaatggtgaattatgaagagttttaagtttaacagaaaaaaagaagatttgcttcctgtaatgaaggctaaagctgaaaaagcaaacattaaaatgacaaaagagaaggacaagatttctctaatgttagaaaccggaaagtttcaaaacggtgaagatgcagtgcctgtaatctttaaaggcaaaataacaaacacagaaacaggttgtacatttaatggaaaatatacatacggtttttatttgtatacattggttatagttgcagcaattcttatagttgcaagattttcctggtcggcatatcaacatcagatggataatatgatactttgtggtatagtaacagtattattgattggattgattgttgttgtaacaaaaaaatcaaaaggtggaaagaacgttatagagaatcttctaaataatttggatttaaaataataaaaacttgacatagtcattgatgtaatttaatattaacataataccaacggaggtaacagaaatgttgcctccgtttttgcgttgcaaggcaggattgtaggagtgcgaagcaggttacaatcagtagagtcaggatttgggcttttgaaacttaaatcattatatgcagaaaaattgttgcagacgcgaatataataaaaaggaagagaggtaggtttatgagtttggcagaaattgtatcaaagatggatgattttgtttggggaccggtaatgttgatccttttggtgggaacaggtatttttctcactataagattaaagttcagaccttggagaaacttgggatatgcactaaaaagtacattaagtaaagaagcaagaaccaaaagtcgtggagagggagatgtgtcaccgttctcagctttgacaacagctttggcagctacaattggtaccggaaatattgtaggtgttgccacagccatggtagcaggtggaccaggagctttggtttggatgtggatttcagcctgttttggcttgacttctaagtttagtgaatgtatgttggctatcaagtacagagaagttaatgaaaaaggtgaaatgtcaggtggtccaatgtacacaatgaaaaaaggtttcaaaaacaagaaagttggagcagtacttggtatgctttttgcaatttttgcagttatagcttcttttggaataggaaatatgacacaggcaaattcaatttcagaagctttaaataatacatttggtgcaccgtcagcaattgttggagttgtgcttactgttttatccttaattattattgttggtggtattaagagtatttcaaaagtttcatcaatagtagtacctgtaatggcaattttttatgtgatagcaggattgattgttattttgataaatattaaaaatgttccatcagggcttgcaatggtttttaaaatggcatttaactttaatgcagtgggtggcggactttgtggtgcaataacagcatcacttatgaatgccatgcgttatggtgtggcaagaggtgttttttctaatgaagcaggaatgggttcagcagcaattacagctgcagcagctactacagatgatcctgtaagacaagggtatattaatatgacaggtacattttgggatacaattgttgtttgtacaattacaggactttgtattgcatcatcaggtgttctgggaataacaagtgatagcgtaacgggaacatataacagaataggagacaacgtggcaattgtagctcagacagtttcagatggaaaggtggcagatgaagattacctgattaaaaaaatagattgtaattcattaacactgataagtaataacttaaaaaacgaaacaacagaactacagttaagttataaaggagaaaacacaaacaataatatagaaggaacttggtgcgattctgcaggaaatgaatatgttttcgacaaaaacggaaaatatacatacaaagaattagttcagggttctgcattaacaatagaagctttttcatcggcatttaagaaaataaacaagaactttggtggctttggtgcatggcttgttacaataggaattactttatttgccttttcaaccatacttggctgggaatatcacggtgagaaagccttcgaatacatatttaaaacacacaaatacaatatggtatacagagtcgtgttttcgctggttgtctatgtaggagcaacccagtcattacaacttgtctggaacttctcggacatagcaaatgcacttatggcaataccaaatctaatctgcttgcttgcaatgagtggtgtaatagctaaggaagtagaaagataccaaaaggtaattgagaaagaaaagaactagaaaacggctgacaggcgacaagtttttttacttgagcagcttgactatatttatatgaaaaaaagagggatatgttttagataataattgattcacaaaatcaattattaagatgcactgaacagagaatttatcaaaaattctctgtgaattgcatcggttctaaaataaataaacctctttttttcatcaataaatattcaaactgtgaagtaaaagactgtcgcctgtcagccgctttctggtgaattttcggcaacagaaaaaatctttttccttgataataattagaaaaatagatatacttaatagcgtattacttttacaagggataaagttggaggctatataatgaatttaattgagattaaggatttgtatgaaaacaaagaaaattttatagataaagaaatcgaggttggcggctgggttcgtagcattagagattcaaagacttttggatttattgtcttaaatgatggaacttgctttaaaccattacaggttgtttacagcgataagcttgataactttagcgaagtttctaagacaaatattggtgctgcattaatagtaaagggtaagcttgtggcaactcctaatgctaagcagccttttgaaattcaggcagatgaagtatatgtggaaggtgaaagtacaccggattatccattacagaagaagcgacacagttttgaataccttagaactatttcacatttaagacctagaacaaatacattccaggcagttttcagagtgcgctcactttgtgcttacgcaattcacaaatttttccaggagcagggatttgtttatgtgcacacaccacttataacaggaagcgactgtgaaggcgcaggagaaatgtttcaggttacaacaatggacttaaataatgtgccaaaaacagaagaaggaaaagtagattatacagaagacttctttggaaagccaactaacttaacagtttcaggtcagttaaatggcgaaacttatgcaatggcatttaagaagatttatacatttggaccaacattcagagccgaaaattctaacacaacaagacacgcagcagaattttggatgattgaacctgaaatagcttttgcagaccttgcagatgacatggaacttgcagaagcaatgataaaatacgtaataaagtatgttttggaaaacgcaccggaagaaatgaatttctttaacagctttgttgacaaaggattattagatagattaaatcacgtaataaattcagaatttggtcgtgttacttatacagaggcaattaaattattggaagaacacaatgataagtttgaatacaaagtaagctggggtgtagatcttcagacagaacatgaacgttaccttacagagcagatttttaaatgccctgtatttgtaacagattatccgaaggaaataaaagcattctatatgaagctaaacaaagatggaaaaacagttgctgcaatggactgtttagttccgggaatcggtgaaatcataggtggaagtcagagagaagaaaattatgaagtattaactaagagaatggaagaattaggacttaacgaaaaagactaccagttctatcttgaccttagaaaatatggaacagcaagacatgccggttttggattaggatttgaaagaatgataatgtatttaacaggtatgggaaatattcgtgacgtaatcccattcccaagaactgtaaataactgcgaattgtaagaaaacggctgacaggtggcaaagttttttacttgagcagcttgattcatttgtatagaaaaaatagacctattttttctataaacaaatgttcaagatgtgaagtaaaagactgccacctgtcagccgttttcgggaaaaaacagtaatttaaagttcttggaaggcacattaagaatttcttaagaattgttgtaagttgtttttaaaattttaacattaatatataggcatatgatgaagatgtgtgaaaaacgcagtgtcatatttagatggagggtaatatgtacaatattttagtttgtgatgacgacaaagatatagtggaggctattgatatttatttgtcaaaggaaggttataacattattaaggcttatgacggaatggaagcaatggaaattttgaagaaggaagatattcagttacttcttattgatgttatgatgccaagacttgacggtataagagctactttgaaaataagagaaaaaagcattattccaattattattttgtcagcaaaatcagaagattcagacaagattataggacttgatgtgggagcggatgattatatcacaaagccatttaatccattggaattaattgcaagagttaagtctcagattagacgttacacaagacttggcacaattgcagagcctaaaagtaatgtttatagcgtaggcggtcttgaaatcgacgacgagtgtaaagaagtaaaagttgacggagaaatagtgaaacttacaccttttgagtataatattttacttttcttagttaagaacccgggaagagtttttacaatcgaccagatttatgaggctgtttggaatgaggaagctgttgcggcagacaatacagtggctgtacatattagacatatccgagaaaaaatcgaaattaatccaaaagaaccaagatacttaaaagtagtgtggggagttggatacaaaatcgagaagcagtagaaaggaaatgcaatatgaaaaagcaaagaatatttttacatactttaatattagtgcttgcagcagcctgctttggaacagcagcctatggttggactaaatatgctaatgtaaaagctaaaaatgagtataggtgggaataccaggaccagtatgagacacttgtaactgattcgttgcaggatattgtagcacaatatttgtatataaagaatttttctgataataaaaaagttcttgttgaaagtagtgagtatggaaatttaacagcaaaagacataaaaaaactttataaagatgaagataaaaaaaatgagttctataataagctatatgatttagaaagcacgaaaaatgatgatgaaatttttatgacggatgagcagaataatcaatataaatattataagaaagcagtgaaatatatagctgaatatgaagatatacaagattttgatgctgtaaaaagtatgatttatgataaatctaatattcctgaaattaattcagcaagagatggactgaattatgagataatgtatactgacggtgaaaattcacataaaatcactacaagtaataatttgtccgataacaataaatatagagattattgtattattgaaaatggggcaataaatccactggaaaataaaggcataatggaaaattttaatatgtatattgaagatatgtttgaaaatgccagtggccagggaggatatgaaacgtcaatatatttaagtgatagagctgaagaattatgggtaaattattatgatgatgtaaaagattttccaaaagctcttattgaatgttcttttgctgtagataagacagatagtggatatttaaataaattgcatgctaattatgaaaaggcaccatctaatctttcaggtactaagaaaagtttatcagtaattgtattaatgtgtggcatatatgttttggtggcatttgtattatatttgttactaatggttcaggcgggccataaggagaaaggtgataagcctttattaaacaagtcagataaattgtggtgggatgtagaagtgtttgtggcatttattgcttgcttcattgcaattattccgttgtcacagaatgtatattacaattggaagtatgaggagaaaactttgttcaagattcttctggtaggcacaggcatagcatcacttgttgctgtggaattaacagttttgttaagtgaaagttttgtcagaagaataaaatgcaaaacattttggaagacaactttaataggaaagattttttatggaatcaaaaaaataattaaatatttactgttaaatgtaaaaacatcaattcttgttattgcttttggaatagccagctttatctggtgcagtatggcgatattgggagcttataatgaatatacattgtttgttccaactttaatgataataattttaatagttgcagtttgtgcatttgtacttattttctttaaagaatatgattcaattacagaaggaacaaagaaaatatcagaaggtaatttggattataagattgaagatgagtataaattcaaattaaacagaagtttgaaagaatcaataaataatattggcgacggattgagcaaggctgtggcagaaagtgttaaaaatgagagaactaaaactgaacttattactaatgtttcccacgacctgaaaacaccacttacttctattattaattatgtagggttgttaaaaacagaaggacttaaaagtgataatgcagaaaaatatttggaggtaattgacagaaaatccataaggcttaaaaatcttacagaagatttggtggaggcatctaagttaaatgcaggggcaattaattttgaaatgcagcagatagacatagttcaattagtgaaccaaagtcttggagagtatgaagaaaaattcgaagaaaaacatcttactgtaatgaaaacaatacaggaagaaccattatatgtaatggcagacggaagaaaaacatggagagtgtttgaaaatttatacggaaatatttataaatatgcaatggataacacaagagtttatgtggatataacaagacaaaatgataaggttgttatatttataagaaacatttcagcatctccgttaaactttaatgccaaggaattaacggaaagatttgttagaggcgataagtcaagaactactgaaggcagtggtcttggattatcaattgcaaaatccatcgtcgaaaaacaaaacggtcagatgaatatttatttagatggcgatttgtttaaggttgagataatgatgaacttaaaacaggcttaaaataaaattaatatcagagtgtacaaaaagtcttctccacacagttatacaggcgaaagtgtgaagaaggcttttttaaaaagtaatcaaaaaaggtgttgacttttggaaaatgctctcatataatggaacagtacgtttataggttgtaatatgcctatgcgtaaaataaatatgtgattaacacataattctaataacaggaggtgaaaacggaatgcctacatttaaccagttagtaagaaaaggacgtcagtcagcagttaagaagtctactgcaccagcattgttaaagagttacaactcacttaacaagaagatgaatgatacagcttctccacagaagcgtggtgtttgtacagcagttaagacagctacacctaagaagcctaactcagctcttagaaagattgccagagttcgtctttctaatggtatcgaagtaacaagctacatcccaggtgaaggacataaccttcaggaacatagcgttgttcttatccgtggtggtagagtaaaagacttaccaggtacaagatatcatatcattagaggtactcttgatactgcaggtgttgcaaatagacgccaggcacgttctaagtatggtgctaagagacctaaagcaggtaaatagtagcaggatggcttaattaagccaatcacgggttgaatgaatttgtgacggttattagaattatgctagagatatagacagtctaaagccgtgagcaaggacacaacttaagtgagtacctaagatctaatcgcatgtatccactatatgcggttacatgcaaaacggaatttctaaataaaagtataaaaatggaaattctgtcaaaattgattaaggagggaagtaacatgccacgtaaaggacatactcagaaaagagaagtattagctgatccaatgtataacagcgtagtagttacaaagcttatcaacaacattatgttagatggtaagaaaggtgtagctcagaagattgtttacggagcatttgataagattgctaaccagacaggcaaggatgctattgaagtattcgaagaagctatgaataacgttatgccagctcttgaagttaaggctagacgtattggtggtgcaacatatcaggtacctatcgaagtaagacctgaaagaagacaggctttaggacttcgttggatcacattgtattcacgtcagagaagtgaaaagacaatggaagaaagattagctaacgaaattatggatgcagcaaacaacacaggctcatctgttaagaaacgtgaagatatgcataagatggctgaagctaataaggcttttgctcattatcgtttctaatataaaactgcaattgtcacagaacaggctgttatgcagtttgtaactgtgaccgtatggcagtgaagaattacaagaaggtaattctttaataagatattaaattaaggaggaaaaaaccttggctggaagagaatatccactagagagaacaagaaacattggtattatggctcatatcgatgccggtaagactactttaacagaacgtatcttatattatactggtgtaaactataaaattggtgaaactcatgatggagcttctacaatggactggatggaacaggaacaggaaagaggtatcacaattacttcagctgctacaacatgtcattggacattagaagatcatcataagccaaaggctggtgcgttagaacatcgtatcaacattatcgatacaccgggacacgttgacttcacagtagaagtagaacgttcacttcgtgtattagatggtgctgttggtgtatttgatgctaaggctggtgttgaaccacagtcagaaaacgtatggcgtcaggctgacacatacaatgtacctcgtatggcattcatcaacaagatggataaaatgggtgcagatttcttttattcagttcagacaattattgatcgtttaggaaagaatgctattcctgtacagatcccaatcggtaaggaagatgatttcatcggattaatcgatttgtttgaaatggaagcatattattataaagatgataagggtgaagacatcgaaatcacagctattcctgatgacttaaaggatcttgctaatgaatggcatgaaaaccttgttgaaaagatttgtgaattagatgatgaccttatgatgcagtaccttgaaggagaagaaccttctatcgatgatatgaaggctgctcttagaaaaggaacaatcgcttgtgaagctgttcctgtattctgtggttctgcttataagaacaaaggtgttcagaagatgttagatggtgttatcgaatatatgccagcaccaacagatatccctgacattacaggtactgatgaagatggtaacgaagtagttcgtcattcttcagatgatgaaccttttgcagcattagctttcaagattatgactgacccatttgtaggtaagttagcattcttcagagtttactcaggtacaatgaactcaggttcatatgttttaaatgctacaaagaataagaaagaacgtgtaggccgtatcgtacagatgcatgccaacaagcgtactgaaattgataaagtatattcaggagatatcgctgctgctgtaggtttcaaaattactacaacaggtgatacaatctgtgatgaacagcatcctgtaattcttgaatcaatggaattcccagaaccagttattgagctcgctattgagcctaagacaaagaatgaccagggtaagatgggtgaagctttagctaagttagctgaagaagatcctacattccgtgctcatacagacacagaaacaggtcagacaatcatcgctggtatgggtgagcttcacttagatgtaatcgtagacagacttcttcgtgaatttaaggtagaagctaacgttggtgcacctcaggttgcatacaaagaaacatttactaaggctgttgatgttgatagcaaatatgctaagcagtcaggtggtcgtggacagtatggtcactgtaaagttaaatttgagcctatggatccaaacggtgaagaacagtttaagtttgaatctacagtagttggtggtaacattcctaaggaatatatcccagctgttggtgaaggtatcgaagaagctgcacagtcaggtattattgctggattccctgtacttggtgtacatgctacagtatatgatggatcttaccatgaagtcgattcatcagaaatggctttccacatcgctggttctatggcatttaaggatgctatggctaaggcagatccagtattacttgagcctattatgaaggttgaagtaacaatgcctgaggaatacatgggtgatgttatcggaagcttaaattcaaagcgtggacagatcgaaggtatggacgatatcggtggtggaaagattgttaaagcattcgttccattgtcagaaatgttcggttactcaacagaacttcgttcagctactcagggacgtggtaactattcaatgttctttgaaaagtaccaggcagctccaaagtctgttcaggataagattgcatctgcaagagcaaaataatatatggatttaaccattaatttaatataaaggcttgaaaatcttcccattataaaatataatgagagataagcctatgtaaaagaccacaaggtctgaaattttaattttattatttttaggaggattatcaaaatggcaaaagctaagtttgaaagaacaaaaccacattgtaatattggtacaatcggacatgtcgatcatggtaaaacaactttaacagcagctattactaaagtacttgctgaaagagttgaaggtaatgaagctacagatttcgaaaatatcgacaaggctccagaagaaagagaaagaggtatcacaatctctacagctcacgttgaatatgaaacaaagaagagacattacgctcacgttgactgcccaggccatgctgactatgtaaagaacatgatcacaggtgctgctcagatggacggtgctatccttgtagttgctgctactgatggtgttatggctcagacaaaggaacatatcttactttcacgtcaggtaggtgttccaaaaatcgttgtattcatgaacaaatgtgatatggttgatgatgaagaattacttgaattagtagaaatggacgttacagaaatccttgaagaatatggtttcgacggaactccaatcatcaaaggttcagctcttaaagctcttgaagatccatcatcagaatggggcgataagattatggaattaatggatacagttgatgattacttcccagatccagaaagagatacagataagcctttcttaatgccagtagaagacgtattcacaatcacaggtcgtggtacagttgctacaggtagagtagaaagaggaacacttcacttaaacgatgaagttgaaatcgtcggtgttaaggaagaaacacagaagacagttatcacaggtattgaaatgttcagaaagcttcttgatgaagctcaggctggtgataacatcggtgctcttttaagaggtatcaacagagaccagatcgaaagaggtcaggttcttgctaaaccaggttcagtaacatgccataagaaatttactgctcaggtttacgtattaacaaaggatgaaggtggacgtcatactcctttcttcaacaactacagaccacagttctacttcagaacaactgacgtaacaggtgtttgtgaattaccagatggtgtagaaatgtgtatgcctggtgataacgtagaaatcacagttgaacttattcacccaatcgctatggaacagggtcttggattcgctatccgtgaaggtggtagaacagtaggttcaggtaaggttgctacaattattgaataatacgatataatggcgaatagcctataaataaagggacttaggagatttttcctaagtcctttttcttttagtggtactaaaatggtactattttgtttaacttttctgctaactcatcagctctggaagggtataaatgactataagtgttaagggtagtttcaactcgttcatgccctaatctttcagaaatcagtaatggattaatacccatatcaattaataaacttgcatgtgaatgtctaaaatcatgtactctttttttctttaagcctgcctgctcacttttagcctttagctcattataaagaatgactttggtatatggaaagacacggtcggttttcttgtaatcatatatatgtttaatgtaattgtttaaatcattaaccagtagctggagaatagttatttctctgttactcttaggtgccttggtgaagtaacattgacttttcccccgttgaaatttgtgtgttttgccagtttcttatgtcagccggagtaattaaattaattggtttatttcctaaataaggaagtattctgttttccaacaaatacttatgtccgtcataagttatttcttttaatcttgttttaatatcttttaaatacaattcagcaagtgagtttaatgtcatatcaggcgctccctgagtttgcaaaagaaattctcgttcccaattaacagcatctttttttagtttgaagccacgtttctttttttgctttttttctcctgtgtaatcaatgtaataagtttttacatagtaagtgtttctagtttcatctttaaaaattgccatgttgtatctcctttctccctaaaaaagggtataaaaataacacccagcctttgccagatgttccgttacgtgatacaatatgacttgtctagggtgatattatatcacttggagctggtccttagtggctggctctttttatttaccattgcggtgaagtcaccgatatggttttaaacccttcggttacccgggtaagcatattatattttcaaagaacttttagttagtcacttttttatgtcaaaaagtcttaatcacaccaactgaattatatccaaactcgatgatgtaatttttgtgttttatatagcaaccatatttatgcatataagcgtttatggtgtctgtgggtaaagtaccaaggaaagctttttcctttggaaaatacataagtggaatacgtcctgtgccatgatttacctgactgtttacacgattattaattcttataattaaatcgtttagctgtctataattgagttttccattataagcgcgtatttcatcaggtatcttcatcggagcttcaactttggcttttgtttcaaatgcatcatccaggaaagaaaacagaatatcctgtgattttgagatggataaacgatatttcctaaatcttgaatagaataacagcaatacaaacatgtttacttcaacaacttcgcctgtatccagtataaaaggtatggcttctttccaatcaagttgagcctgttttcccatacctgtttcatatctgactattacactttctttattcagacttttattaattttcaatgatgttccttccataaacggtttcagtttatataaatcattaacacttatgatttttaagtctgttatgatttcatttttaattatcattatgagttcctcctaaactcacatatcataacacttgtacatttttatttaatattttatgcacatacttaagtataactttataccttaatcttattctggagctcttcattgtctccattttccttctttaatgttgtgattgtttcagttgctgtcttcagttcctcgcatttatcattaaatacgttctttggtacagcgtgttttggaaactctttctttgcagcctccattacttcatcaacattaagtttttcatctgtaatttttgctttttcaagcaattcctttaaccattccatttttattacctccatagatgttttattccagttctactggtgattggattctaccgatataccttcggcaaggtatttctgttctttagtgcctgcagaaaaaggcatataaaaagagagcctatttctaagctccctgattaacgttattaagttttaaaacatttccacttccaaagtttccctgcgttgcaccggtgcaactaactgtttttcagttttatcaattttacctgtcaactcctctattctgttactaagcctaataaatgtatcaatatcatctattctacatttactctgcatttccctgcatcttgtgatctgttcctgtaaacatacttgtcctttcttgtttttgggtataaaaataccacctagccttttgactagatggtaaacctacttctctttattttctcttttttctacttcttttataaattctttaaattcctcttctgtcattgctcgtatctggtcaaacaatccacctggtttatacattctatcatcacatataaattcttgactattattcatatatcatattctcctataattttctaaatacaaaatcaaacttaaatgataactcctcaagcgctttttccatacttgtaacttcagtatacatcgaatattttttcaatgcaacataataatctttttcgggtatttctttagatggtcttgaataataatatatacttccattatgccctactgtaatacccgctacattcttattttttaaaagaacgtttaaatcacttaaacttggaggtaatccccttggatgattatgtattaataatactttttctccttttttttccgctctactaacatcttgattaaactttttagttctttttattccaaaaggaatatgctggttagttatatctgaaatctttttacatgacgacaaactaattgcatataactcttctgtattttttccgtctctattttttaacgcatttcgacttttctctgcaattaatccttttactttttcattatctgatattttgctaaactttgcactgtattcttttgattttaccactttctaattaactccataattatacttgtcttcatatttctttcctacacctttttggaaactacgttttgttctaatcgacctttctctaagctctgattttacatattttctcttccattccttatacgtcatatccgcaggaacataatatgtattaccatcttcatctcttgtagctctttgctcatctttggtaaattcgtcatcaaaataaggtgctgtacagcttctacaattaacgtgaaatggcggagctgttaccctctcttcatattcactcatcttgaatacttttccatccatttcctggcagatgtctgatgtatgaccgtccaatgtggcttcaatctcatatctttcaacatctaactccttaaagcattccttttgagctgttgaactaaaatacgccgattcagtcattacaagtcttccggcattagccttgcttacattcattttgtttgatgcattaacaaaatcaacaggcataaacatagatgaactgattgcagatgaaataaattcacttaagaagacacttggagaagatgttacggaagacgtggcacgaaaggaacttgtggccagaggatgtgaattaatgcttacagacgcaaattcaatcaaggaacttgccaaaagagacaagggattgttcggaaagataaaggctaagatagatgaatgggttaagaacataatcaaggcttcaattcaatcattaataaggacggaagcattaaaagtggtactgtatcaaaggaagcaatgttgttaaaggattttgccttgcagatgagaacaatgtggaatgaagcattaaaggaagcaggagagagtaacagcagaatcgttagcaaaaatgtggatgtattggatatggttcgctatgacgcaaacaataaaccatatgttgaaattgatgaggatattctggacggtgtggcagaggaagactatgagcagacagcaaagaatgttttaacatagttgttcaaggaaggaatagattataaaaataatgtattcacaatgaacaaaagggacaaaaatgagtttgtacgaaacagaacaatgacttattggttacataacaataagaaattgagaatggataaattaagattaagtaaaaacgcaatggagataattaaaaatgctgataattggaagaatgttgaaaagaaatacaataacactaacaatgagaagatagttgactttgcatatggttatgtaaatgtttcagtatttggaaatgattacagtgcaaaagttgttacaggtgtagataaaagaggaataatacatttgtatgacatatcagatatgatgccaacagaaataaaaagaagcgccaatactaccgttcatcccaaaaggggagccagtatatttaatggcgcttccatagatgagagtataaatgaagatagaaagaatgtcaacaaaaatattttatattcttatgcaggagaaatagaagcaagagatacatctaacagaatgaatttacctgaaaaggaaagaagggagaaaatacctgaaaagggtaatgaaaatactgtgcacagatttttctcattgagacagtcggttgaggaaacaaaggatttaattgcagttcataacttatctgaaaaaaatttgttggaaaacataaagttaggtggatttccaatgccaagcattgccattactaaggttaataactcatatgataattttggagatatttcagttgtattcaagaaagataccattaatccaagtatggaagaaaacaaggtatattcaggtgatgcatggacaccaatgtttcctagaacagaatggaagcttaacgaaaaagcaatgaaaaaaatggcagatatgtttaatacatcaacaaactatatagagcagtatgttaaggatcctgagacggcagttgaaaaactaaaagctgaaccgaaagtcaaggaagcatttgttgagaacgaaaaggcagacattgaaaagaaaacaaaaatgcctgattacgaaacaaaaatattcagtaatgaagcaagcagacagtttatcgaagaaaataatataactgtggatgatattatggaaaatgatgaaattaagagagaacttgcaaataaggtatatccaccaaaggaaggagaaaagaatctttataaaagaatgagagaaaatctcattgaaaaactaaacagatacaagttggaagatgattatgagatttttaaaggaaatgttgaaccgatatttgaccagacatcatatgatgaagctgtagacgaatacgttaacaaacatagcgaacagtatacaaaatatattgaagatgctttggagaatgtatatgaagataagtatttggttaaagaagatgttgaaccattaaaagcaaatggtgagagaaaaagctttaataagcttcatatgccatatgagattaataatattgtcacattaatgaaaaagcagaaaaaaggcaagggaggtggatttttcggaggagcaggcaatcttaaaggtgctgcaacagaaacatttacaagtattgatgagattagaagaaataagtataaaatacagaatatttcaaaagatgaattaaggaaaaaatataattcactaaattcaaaaattcaggaaattgataattatattcttggagaagagaatgacggtgtggaagcaagattacgaaaaacagagaatattaatgaaacaatggttgaagcctttgcacttgataagtttacaaagtcaaatgtaaagaaaaaattcaatgattcaaatattgagataacggattctgtatatgagcagatgaaggaacttcgtgatgaattgaaggaaataccggtccaatattttgaagcaaaacctgagagagcggtatcaacaaatgaaattgcttatgttgtagttccaaacagtgtatcagaaaaaacaaaagaggcacttaggaaaaatggaatagaatacaaggaatatgcagcaggtgataaagaagcaaggaagaaagcagttaattcagattctacagtactattccagaacagaaattattcctatgatgaattagtaaagaagccaccaatgaatatccctgtggttaaggctaaggcgattagtgaaattaatagaaaatcaattgtcgaaatggcaatgaataatattaaaagtcataaagggatagaatttagaggaaagaatcctatcgttaccaatattgatacaggagacaagatacaggttacaacaggtggaatacgacatgggttagcgggaaggactaatgaagccggaatatttgtaaccatgaatcttacagaagccattgagaatggaattaaggtaaatgaatcctcatttggtagaaaaaatgctgatagttcatacatattaatgggtgctatggataatgaagcaaaggaaagatattattacagattagttgtcaatagatatgagagcaataatatgggaacgtattatgttgatgatttatatgccgtaagggcaaaaaaagaagagacatttacggccgtaatgccgacaagggttacagctgacgctgatgcctccaacatctcctctaaattgaatgtatcagactttttaaaagctgtcaaggattattatggctttgaattgtcaaaagatgtgaatgaaaataacggactattcaaagggaatacttgatgatgttaggacaacaccaataaggctaagtgaatcccagaaagctgaaatagagtacacaacaggaatgacatataatgattggcgtaaatcaatgtttggtaagctaagaattattaatacaacagcatcaaatcagattagtaacattacaaatgtaacaaatcaacagttgaagaacataaataccacggctataagtcagatatataatataaatacaacagctaaaagccagatataaggctctatgtcgagaatgggatgacgcaagtttataaattgagatagacaaatgttgacaatggtaacattcacttatatatttatgaatgtcagaaatatgttactgaagaatttaccttatatttaaagtcaaaagaagctgagaaaaagaggaatgcattggagaatattaggacactttcatacgcttatattaatttttatattgaacacccgacatattatagttttatgtatcgcaatacatatatataaatagaatttacaatggaacaatgagtggcaattatgcctggaaaaagaatttaactaaaggagattttgaaatgaaacagattattttaacaggagatcgtcctactggacgacttcatatgggacattatgtagactcattaaaagagagagtgagataaaacagagaaattttgaagcaagtataccagtgggcttcttttgctatccaattagtcaggctgcagatattacagcatttcatgcaacagcagtcccagcaggtgaagatcagatgccaatgttagaacaggcgagagagattgtacgtaaatttaatgatacatatggtgaaacattgacagaacctgatatcattcttccggagaatcaggcgtgttttcgtttaccaggaacagatggaaaagcaaaaatgagtaaatcattgggaaactgtatttatctttctgatgaaccggatgttataaaatctaaaattatgtctatgtatacagatcctacacatattcgaaaagaagatccgggacacacaaaaggtaatccggtatttacgtatctggaggcgttttgtaatccggaacattttaaagagtttatgccagattataagaatttagatgaattaaaagctcattatgagcgaggtggattaggagatgtaacagtaaaaaaattcctaaataatgtaatgcagaaagaattagaaataataagagagcgtcgtaaaatgtgggaacaacgtcttccagatgtttatgatatattgtatcaaggaagtatgaaagctaaaacagtagcagcaaatacacttgaagaagtaaaacattctatgaaaattgattatttcgaaaataaaaatcttctaagtaaagaaaatgaaagataatacatttttcttagggaaaagtggattgttacagaaattcctttacaaaaaggcttacagtagtaataataattcaaataatagcatttaaaacgtataaatggtataatttgagaatgtatgttagaaaacataatgattttttttattatggattgcaagattcaagtagatgaattgcaaaataatattataaaaagtattaaaagggagtttataatgaaaaaattaacaaaggaagagaagcataagcagtgtcttaaagagattaaagctacaatgttagttgtggtcgtatgctttttgtggcacgtgcttacagcatttttactgaattctaaaggaggcactttattccatatgcctttatggttcgtggtttctgtgtttggcacaataattttggcaattattggggtgttctggttgttaaaatttgtgtttgtagatttctcttatgatgaggaggaatgtgaagatgaacagtaatcagattataattttatcagtttttctaggatatttattatttaatgtggtagtaagttttgtttatagcagaaaggcagaaaagagtttgaatacttctgaggagaagaagtattttattggtggaagaaatatgaatggtatagttcttgccatgactattatggcaacttatacttcagcaagttcttttatttcaggaccgggcgcagcaggacttacatatggctatgctcaggcttggattgcagcaattcaggtgccggttacttttttagtgcttggagtgctaggaaacaagttggcgctggtttcaagaagaacaggagcagtaactgtagttggatattttaaggcaagatacaaaagttcagctcttgtaattattacaagtgttggtcttattgctttctttattgcgcagatgataagccagtttacaggtggagccacacttattgcttcaataacaggattggaccacgtaacttcgcttttgatttttggaaccgttgttgtattgtacacagctgttggcggatttagtgctgtagtaattacagatacaattcagggaattgtaatgtgtgtgggaacatttttatttatattttttgttcttaaagcaggtggaggcttggcatcaattgatgcaggacttgccaataatttgcctaatgtttataatgatattttttcaaaatacacaccgggaggattgcttagtttctggattttggtaggttttggaacattgggacttccacagactgcagttcgtgccatgggatttaagaatacgaagagtatgcatcaggcaatgtggattggtgtattaacatgtagctttgtaattgttggcatgcatcttgcaggaacttgggcaggagcattcgttgatgtggataaccttccaacatcagattattttattccatatattgttcaaaaaattatgccaacaggagttgcggcaattttccttgcagctccaatggctgcagtaatgtctacggctgactcgcttttgattcttgccacagccgcaattgtaaaggatttatggaagaattatgttgtaaaagatgatcctgaaaaaaataagtcatacgagaaaaatgttaagtcgataagtacagttattacaattatattaggtatagtagttatggttcttacaattaatccacctgatattattttcgtacttaatatgtttgcatttggtggtttggaatgtactttcttctggccacttgttggcggtttgttctggaaaaaaggaacaaagcaggcggcagtttgtagcagcgtaggcgcaattgcaacttatatttttgcaacatattttattaatattgcaggacttaacgcagttgtttggggacttcttgtaggtggaattttgtattttggaattggaatggtaacaggaagaaaaggtttggatccggatattttggacaaatgtttttaataaagccataggagttttgacactctaattaaataagaaaaagcaggtacaaaaaatgaataaagtagtgaagagaattttaaagatagttggcattgccatagcagtaattgtggttgtattaattggatatattatttacttatatgcaagttatcatcgcattgaagacaataagaaattaaaggttgaaagccgtattgagcagtctaaagctagcgaaaaactttctacaggaaaggaatattcagcacttacttataacattggttttggtgcgtacacaccggatttcagtttctttatggatggcggtaagtcatcatgggcaaagagcaagaaaagtgttatctcaactgttaacggcgcaggtgagctggttaagtcatataatcctgattttgccttaatcgaggaagtggatttaaactctaccagaagttatcatgtaaatgagtattcattattaaaaaatgttatgaaagattatgattgtgtgtttgcacaaaattatgattcagcatttttgttttatccgtttacccagcctcacggaagcagtaagtcaggacttgcgttgttttcaaaatatagcattacggattctttaagaagaagttttccggtttcaacatcttttagcaagttttttgatttggacagatgctatagtatttcaagggttcctgtagacaatggaaaggaattagttatttttgaacttcatatgtctgcttacggaaacagtgatgaaatacgtgagggacagattaatatgttggtttctgatatggaaaaagagtacaaggcaggcaattatgttttgtgtggcggggattttaaccatgatttgaaagcctctgaagatgattcagaaaacagggaatcatgggcttatccttttccaagaaagaaacttccaagtaatttttctttctgcatagatcagttatctgatgagaaaaaagataatctttggaatagtgcaagaaatgcagatatggaatataagccgggagtaacttatacagttacgctggatggttttattatttcagacaatatagaatgtgtaaaatatgataatattaacacaggctatacttattcagaccatgatccggtttatgtaaagtttaaattgaaataaaaaataaaagttaatagaaaactaatttaaaataatatcaaaatgattggtaaatttttaacgagatttttaaattaaataatcttgacatagttagtgaaagttgtattatattaactagtttcatatgcctaacttgattagaatatatataaaaactaagttaattaggttcggcatagcagtttacttagtattatttgaatatttgattatggaagggagattaataatgtcagaaattaacagtattgatgtggaagaagatcagtttgcatatcgttacgatacacagcttcttatagatagaagagatgaagatttggatgaagatgaaatatcagattacattacagagcattttgaaggaaactgtttaatagcagttggtgatgaagatttgattaaaatacattttcatacaaatgaaccttggaaggttttggaatattgcaacagcataggcgagatttacgatattgttgttgaagatatgataagacagtctaatggattgcagggctagaattacaagaataataaatatacagaaattggagatgcgtttgcgtttccgatttctttttttcacggattcacattttttatcttaaaaaaggaacatattacattaatcttaataacacttctgataaagaaacagaatataatattaaagtagaaaatgaggaactcgttgatatagacagcattaatttagattctaattacattgaaattgaagaaggtgtaaagaaagctgttaagtacactataaatcctgataatgctacatttacaagtgttgattggaaagtttcagacactagcattgtatcacttggatatgtaggtaatgttatgaatattgaagctttaaaagaaggcgaatgtgatattacagtaacagctaaaaatggcaaaaaagcagtttgtcatattgtagtaaaaaaagccggggaccataagtatgatagcacaattgaaaaagctagcacatctaaggatggaaagataattgataaatgtagccgttgtggagatgtaaaagttgcacagattatttcacatccaacaaaggtagttttaaataatagcaattttgtttatgatggcaaggttaagacaccaacagttactgttacaagtgcagatggcaaaacagttgattcttctaattatgatatttcatatgctaatggcagaaaagatgcaggaacatatgatgtgaaagttacttttaagggcaactacacaggaagcttaacaactaagtttacaatagcaaaggctaaccagagtttaaaaattaaatcacctaagaaaaaaatgaaggttggtgcaaaggctaaaattaaaataaaagctaacaaaggtcatggaaaagttacatacaaagtatctaacaagaagattgcaaaaatcaagaaaggtaagttagtagcccttaaaaagggaaaagtaaaattaacagtaactttaaaggcaactaagaactacaagcagaagaaagttacaataacaataaaagttaaataacagtttgtaccatatatggtaattctttcatatatgaaacttgaaatctgcccaataatatgcgcaacatcaatcctatggggcaaattccgttagtttcaatgagaataaagcttggaatctacccccatagtatgcataaacttgcttctatggggggaattacttatttgttacttgaattcaacttgtatatttatacagccttaaatccacattcaaattttgcttttgcctcctgtactttttttgcttcagcggcaggagtaggatagtagcccattgtatgcatctgattaaaaacatcaacctggatatcatgttccttggcaagtaagtctaacattgtttcgcgaagattatcgtgaacacattcgttagctccaaggttataaagtgtagtcgcgttcttttctgaattaagagcgtcgcctaaaatttctttttctgtatatacttcattcatagttaaacctcctgatcttcaaaaattaaattattttacataagaataaattgagttaaagtgtccctgatgtttctgtgaaatatcaagcatttgctgttttattgtttcgtcctgactatgctcagcaagcatctgaaactttttgaccaacaactcctcttcatttaataaatcctgaataactgaaagttctttttctgataaatccattataaaaatcctcctaaattatttttcctaattagtattaatataaagcctgaaaataatgctttgaaaaatatggaaaagggtagaatatgatttaaaataaataaaataaataaaaatgtgatatatttgctttttgaattgttttatagatagaaagatctttcagagtaacacgggaggaaaacaatggatacaaacaggtacgctgatttagtaaatatgtatgcaaacaatgtgtacaaaattgcagtttcctattgtaataacaggtcggatgcagaagacattgtgcagaatgtatttattaaattgcttaaatcaaaagaaaaatttaaggatgatgagcatgttaaaagatggcttataagggtggcaattaacgaatcgaaaaatatgaatacatcattttggcgaaaacgaattgttccattggaggactccgaaccaattattaatacaagggacaaatctgatgagaaagctgttttgctgggagctgtcatgaaactaaaagagaaaaacagaatagtggtgcagctttattattatgaagggtattcggttaaagaaattgccgaaatacttagaataaaagaaacaacagttcaaaccagattaatgagagcaagaaatgctttaagggaaattgtaaaggaggattggttaaatgaataatttatataaggaagcaatggatgaaataaatatttcagaccagtgcttaagaaaggtaaaaagtatgaataataataacaaaaaaataaaaaaattcagattaaaatacgcagttgtttttgcaacattgatgctttcattttttgcattcaacattgtgtcatatgcggcaacggggaaagacttaacaagccatatttcaaatgttatagaaaagagtcaggataatgattttgttaagactaagaaatataaagttaacgatgatacagaggttgaggttgaagaacatgaggaaaatctggacaaaaacaatcttaaagttaatactgatacaagcaaagatggtgatgttgaagtagaaatcagagagaaagatagtaataaataataacattatcttaaggggctgtcgcattagcggcagccccttgctgtttcggaaggaattacgtgtcatatgaaagaaacgctgtgtggcaagtaaattattgaagaattcatgctgtttcggaaggaattacgtgtcatatgaaagaaacgctgtgtggcaagtaaattattgaagaattcatgttgtttcggaaggaattacgtgtcatatgaaagaaacgctgtgtgacaagtaaattattgaagaattattgctgtttcagtagaaattacgtgtcgtatggaagaaatgttgtgtgacacgtaaattgttgaaaaaacattgatgttcgaatgaaaattacgtgtcattgggcagaaatactatatacacacgtaattcatggctattacggaattagcgaaccgaaactctgtaaaatccgtaaatgtaggagtaaagcttgtccattcgactagttttacggattttcacaacaaaaattcctcaaaatccgtaattgccaaaatcatcctaattatactagagaacaggtaagttcagattgaaatccagcaagtttaaattgagttcagggaagacccagggcaagtttaggttgagttcagctcaaaaaagttcatatcacgttaaagctaaattcagataaacaaagtttagacagtaaaacaaatttttttgaaatctttcccttaagtatgttagaataataaaaagatttgaaggtgtaatatgaaaaatttaaaaagcagattgattatgtttgtcctgcttgtgggacttgttttttccgggtataaaattgtagattatttttatacttcatatgatgagaagcagaatttcaataatgtggagaagcttgttgaaagtgagtatgaagatgagaagattcaatataatgattttgaaatattaaagaagtataagaaagtatacgagaagaataatgacttagtgggctggattaagattaaggatacgaatattgattatccggttatgcagactaaggatgattattcatattatttaaagagaaatttcaataagaagtcttccatctatgggacgccttttgtaggagatgggtgtggcattaatcccaattctgataatgtgattatttatggtcataatatgaagaatggaactatgtttgcagatttgaataagtataaagacaagaagttttatgaaagtcataaagaagtgcagtttgatacgttgacggaagaggggacatacaaggttgtgtatgcttttgttacggaagtgaataagaaggattcttttaaatattatgaaaaaataaattggaacagcaaggatgaatttaatgaatatgtgttaaatttagaacagagaaagttgtatgacacaggtgagaagattaaaaagaaagataaattattaacactttcaacctgcgagaaggccagcgataatagtcgaatggtagtagtgtgtaaaaaaagcaaaatcaatgacagataacggacaggaggatttatgaaacagaaaacagttgtaataacaggtgcaagttcaggtataggaatggagtttgcaagagctttttctaaaatggggtgtaggcttattttgacagcaagaagaaaggaacgccttgaaaaattaagagaagagcttggaactccgtgcaagattattgttgcggatttatcaagagagggcgaatgctatcagttttttgaaaatatagcagatgagccggttgatgtttttattaacaatgcaggttttggaacttgcggaaagtttgatgaaactgatttaggaaaagaagtctctatgataaatgttaacattaaggctatgcatattttgtttaagaagatggttataaagatgaagaagcagggctatggaagaattttaaatgtggcttcatcagcagggcttcttccggcaggaccttatatggcaacatattatgccacaaaatcttatgtagtaagcattacaaaggctgttgccgaggaattaaaagagcagggaagcaatatttatgttggggcactttgtccgggaccggttgatacggaatttaatgaaaatgcagatgtaatttttgctttaagaggaattacaccaagattttgtgtaaaagaagcaattcacggaatgaaaaagaagcaggtaattatagtgccatcacttaaaatgaagcttgcagttatgggacaaaaattattgccttcaaatattttaatgaaaatagttgcaaaacagcaaaagaagaagactgaaaattcataaatcgtaattgttttatttaatcagacagataatgatattccggtatatttacgtatgaacaataaatgtgtaaaggttgatttaaaaccatggtcaatatcaataggaataatagaataaaatatgtttataataaaagcgggagttgcaatttatgcgactcctaattttgtattataaaataagcgaaaattagaaaattgcactaactaagtgaaaatccgtcataaatttcttaaataaaatgaatgataatgattgactttgaatgaatttgaagataaaattatatcatcaacagaaagaactattacagaaaataacatacaaaatatcatacaaggaggaatattaaatgatttatacagtaacatttaatccatcacttgattacattgtgtcggtagatgattttaaattaggacttaccaatcgtacaagttctgaattaattttaccgggaggtaaaggaactaacgtatcaacagttttaaagaacttaggatttgaaagtacagcccttggttttgtggcaggttttacgggaaatgaaatcgttaagagattaaatgacatgggaattaaatctgattttatttctattgaaaatggaatctcaagaattaatcttaaacttaaatctattgacggaacagagattaacggagcaggacctgacataagtgaagaaaaggttaacgagttaatggacaagcttaatcagcttaaagaaggagatgtacttgttcttgcaggaagtatcccttcatctatgagcgacaatatttatagagacataatggcagatttaaaagacagaggagtgatgattgttgttgatgcaacaaaggatttacttttaaatgttttagagtaccatccatttctcattaaacctaacaatcacgaattaggcgaaatatttgatgttaagcttacaacaagagaagaagttattccttatggaagaaagcttcaggaaaaaggagccagaaacgttcttgtttctatggcaggagaaggggcagttcttattgcagaagatggtcaggtatttgatacacctgcaccaaaaggaaaacttattaatggcgtaggcgcaggagattcaatggttgcaggttttgtggcaggttggatcgaaaaacaggattacgaatatgctttccatatgggtgttgcatcaggaagtgcaagcgctttttcagaaaatcttgcaacaaaagaagaaattataaatgtttacaatcaggttatgggaaaataataaaagaaaaataattattataaaataatggacaaaaaataataactaacagaatttaattaaaaattaaaataaaaaatatgtaattaatgaagaaagattaattacggaaatggaggctattatgagaattacagatctacttgatccaagaagtatttcccttacagctacacctaagacaaaaagtgaagccttagatcagttagttgatttaatgtgtgctagtgggaaaattaatgacaaggaagcttatcgtaagcaggtttatgcaagagaggaagaaagtacaacaggtataggacttggaattggtattcctcacggaaaatgtgatgcagttgacaagccgggacttgcagcaatggtagttaagaatggagttgactttgaggcattagatgatgcaccggtaacattacttttcttaattgcagcacctaacacagaagataatgtacatttaagtgttttaagtaagttgtcggttatgatgatggatcagaatttctcagactcattaagaaatgcaggaagcgttgaagaatttctggaaattattgatcaggccgatgatgaaaagaagagtattgatgaaagattggcagacacaggtgaagcaaaagaaaattcaacaaaaattttggcagttacatcatgtcctacaggaattgcccacacatacatggcagcagaaggtcttgaaacagcagctaaggctaagggatgctttataaaagttgaaacaagaggttcaggtggagctaagaacgttcttacagctaaagaaattgaagaggcagattgtattatagttgcagcagatgctaaggttccaatggacagatttgccggcaagaaagttattgaatgtcaggtttcagatggaatcagtaaggcagaccagcttatagacagagcaattgcaggcgatgcacctatttacaaatcaggctctgaaagtagcagtaatacagaagttagtaaatccggcaaaggtatcggacatcagatttatacacagcttatgaacggtgtatcgcacatgcttccattcgtagttggcggtggtatacttattgcaatagcatttcttattgatggtttaaatgttgatattaattcacttcctgctgatcagagaagtaattttggtacaattacacctatggcagcaatgtttaagagcattggtggtacagcatttggctttatgcttcctgttcttgcaggttatatagcaatggcaatagcagacagaccagcacttgcagttggttttgtaggtggtatgattgcagcaaacggtaagtcaggtttccttggagcattagttgcaggtttcgttgcaggttatttaataatcggtttaagaaaattatgcgacaagcttcctgacgcacttgaaaaaatcgcaccggtacttatttatcctgtagttggtattttgattattggcatatttatgacatatgtagttgaacctattatgggtggaattaatacaggagttaacagtggacttgaaggaatggcaggttcaagtaagatattacttggtttggttttaggtggaatgatgtcaatcgatatgggtggcccattcaacaaggcagcatacgttttcggtgttgcacagattgcagcaggcaactacgacattatggcaacagttatgattggtggtatggttccaccttgcgcaatcgcacttgcaacattattatttaaagataaatttacaaaagaagaaagagaagcaggaccaacaaactttattatgggacttgcattcattacagaaggtgcaattccttttgcagcatcagatccattacatgtattacctgcatgtattatcggttcaggcttagcaggagcattatcaatggtatttaattgtacattgatggcacctcacggtggaatcttcgtgttccctgtagttggaaacggattaatgtactttgtagcattagttgcaggcacaatcgtttcagcagtattacttggagcattaaagaaaaaagtagcttaaattaaaaatatttgcagtgctcaaaattaaccttgggcactgcttttgtggattatttatccatcacggaggaaaaatgttaacagaacaaaggcatagattattattagagttggttaatgagaaaaagagcattacagtaactgaagcaaaagaagtacttaatgcgtcagaatcaactatcagacgtgacataattgcattgcataatgcaggaaagttgacaaaggttttcggtggtgcagttgccctggaggaagatgtaattacggaagaaccgtctgtggaacagagagttgagcagaacaaggaagagaaatatatgattgcagaatatgcggcaagtctcattaaaccaggagatttcgtatatatagatgcagggaccacaacaggatatatgttaaactttttaaaaaacagcaaatctgtttttgtaactaatgcagtaactcacgcaaaaaaacttgcgttgcagggaaacaaagttattcttattgaaggagaattaaaaggttcaacagaagctcttgttggaggatatgcagcagcatctcttaaaaaatttcacttttcgaaaggtttttttggaacaaatggtttaacgaaaaaagcaggttttacaactcctgatacaagtgaagcacttgtaaaaaataaggcaatggagcagtgtaaagaatgctatgttttggctgatcagtcaaaatttgacaaaataagcccggtaacattccagcagtttggcagagcaacaataataacagaaagcaaacctgaaggctatatggaatgtgaaaatataatagttgttcgggaaaattaaaatttatagaatggttgtaaaataattaacagaaattaaaaaattgaaaaggtaaagattattaaaaataaatgaaaggcagtttgtagcttgttatgctatggctgtctttttttggacttaataagaaaagtctttgaaaattccattaattaaaatccggttgagaattgcaagccaagtttggataaaaaagttgaaaaaggcatgtgacattttgcaacttttttgggaaagtttttctttgatttactgcataaaaactgaatttttacaaaaacatcacataaacagctaacaacaaaatgtaataaagtataaataaagtgttgacaatgaaaaagcgaggtgctaatatcgatttaccaaaagaacacaacgtaatatatgaatagatgaagtcagtataagtgacattttcgtaaaagtcgtattatcttagacagtcataaattcatttgtttattttatgtttgttcttaggaataagttaagaaaggagaaatataatggacgtttttttgcaggaacatggtaagactgtttttatagcagtttgtattttacttttagtaggcgttgcatatgcaattggcccggttattagcaaggcagtacaggatgtagttggaagctacacaacttctgttacatttgacagcattgcaggaaagattcctaccgcaggaaagtaggtaggtatacatttggatgtgtttataattgattaattagacgatgggggaagtaggaatgaggaaactttcattgccagataaggcttttggaaatcttttaaaatttattttggatgagaatattacggatataaattggagtcagggattatgggttaatgatttaaataagggaaggtataaaattaaaggctttacattagacgataattttattcagcagttttatacaagaataagcaatttaatgaacgtacagtttaataagaataacccattacttgaggcagaaacggataatttaagaatatcaattttgcatgactcagtaactaacacggggattagcataagtatcagaaagacaccagcagtaagaagaattaacagggacagcatcgttaaagatgattactgtaatgcggatatagatacttttatagagaatgccatacgagctcattgtacagtagtagtggggggattaccgggggtaggaaaaacagaatatgtaaagtatttaacccagtttattccagcgtatgaaagagtatataccatagaagataaccttgaactaagatattcagcaattaatccaggcaaagattgcgttgaaattaaaataagcgatacatttggatattcagaagcattaaaggcaagtaagagacagttacctacgtgggttttgctagcagaagcaagaggcgaagaggtccggttcctaatggaaaatatttctgcaggcgtacattgcctgaccacagtgcatcttgatgatgttagcaaactccctgatcgtttaagaaatatgggacagacaattaacgaaaatgatgtgtattcttttattgacattggagtacagatacggtctgttgtaaaagaaggagaaaagataaaaagaaaggtggcacaggttatttgtctttcgagagaggatgagaagaatggaaagacaatgatatatgaggatggaaagatattaactaaagatttgcctcttgatataaagagaaaatttgaattagcgggaattaagaatccttttttaaaggagaatgaagaatgaaaaatataaaaaatttattaaagagagttagcgtggtggcagtcatatgtttagcgtacagacttaaacttataccggggctgatatgtgttctgacaatagtagtatgtaatgtttttttagagaagcaggacagaataaagaagcaatatttagccaagtataatgatgtagttttgtatatggaacaaatgatttactcttttaagaaacaaccaaagattagaatggcattattagatgcccaaaaagtaagttccatagagatgagagaagtaattgaggaagcaatagtaaatattgattctaacaagtcagcgaatatttatgaggacgcattggcaataattgagaaagaatacaactgtggaagaattaaatcattacataaatttattataaaaatagaaaattatggtggaaattatgaaacgtatatagatattttgttggaggatataaaaaattggagtgacaggactttaacatttataagaaatgtggatagaacaagacgaaatgttttaatatccattgcatcaacactgataacctgtggatttatggcatatttgatacctaaggattacaagtttaccgagcatggattatatcaggtatgttcaatgatattaataatggcaatgatatttacttatcttgcaataactaaacgattaaattttgactggttaaaagaagaaagggctttgcccgacaatatggttataaaatactatgccttagtagaaaaagggtacaataatatatcagatttaagttttatggaaagaataaattacaaaaaagcaaagaaaagactggaacgtgaaatatacaagatttttcctgattggataagagatgtggctattaatcttcaaaatgatacagttcagtcagcaatagaaggatcgtatgaggatacaccatttatattaaaacgaccggtgagaaaattattgattgattttgaacgatatcctgttggaattgagccatatgataatgttttaaaagagtttgacttaccggatgtgaaatcatcagtaaagatgttttattcaataaacgaattgggcagagagcagtcaactaagcagataggtgcaataatagatagaaataataagctgtcaggtcagacagaagaaatgaaaaacaaagaccgaatcggaatagcggcaatgtattcagttataccaatgtttcttggagtattaaagattatagttgatatgttgttaatgattttagtgtttacatcttcaatttcggaggtggtgaaatgaaagaattattatcagaggcaggacagtgtctggtatacggaataatatttgtactattaataatgggattttatggaatatttgtatcggtaaccgtttaataagtatatattaatcaaaatagcagacggattttatgagaaaaaaacaagggggatattatggaacagtttatatcagaacatggtggagttattgtaagcggaatagtaaccatagcattattaggaacaataatgacagtaatcttagctgttggaaatatggacgcttacgagatttcaaaaataatagggggatagtagtggaagtatttttagaagaacatggagaaagtattatatacggattaatagggctggttatggtagtgaccataacagcggtgataagcagaggcattgttaatatagttccggattacaaaaaagaacttagcaggaacaacagttatcagatagaaaagaatgaatacaaatatcccacaataatagcagatgaggttatatatgcagattatggagataccacttttaattatatggactacataagggcgagagattacagaggaggcaatataaccgataaagtgaaagtatatggaaaggtagatgttaaccaaaagggcgtgtacagattaagatgtacagtaatatcatattttaatctggcatgtactaagtacataaatattatagtggaatagagataagaaagagggggaatatatgagattggcaatagaattatttgctatggcaataaccattacattaggatgtctgttattatcatctatgattaccagtggaaatcaggtggctgacgcaagagattattacaacgtggtagttaacagaattgaggatagttattgtaacgaagatgttataagagaatgcattaacgaggcggaaaacaaaggttatcaattatcagtaaaggatgtaacaatgtataatgacaacccaagtaagcttgttgttttatcttataatgtaacctttccaattcttaatatgtttaacaaagataataaaaaacaggcggtgatagaaggatatgcgagataaaattaaagtattaatcataacgtcaataatatgtttattttactgtggagttgcctttggatatacgggagatggcacaaggggtaatccttacatagtgtcaaatgtaggcgaactaacaaaaattcttgataagaaaggaagtaacaattgggtatacatatcattaaaatctaatataaaaattaagaaaacaataactgttagaactggttattttgttataaatgcaacaaacggtgataaaacaattaaacgtagtacatctttaaaagattccattaatgatcaaagcaatccgggatattgttttagaatattaaatacttcatatgtaatatttggattaggtggaaatatgcttacattagatggaagttggaagaatttaggaaatgcaaatatgtcaggctggataaatgtaggaccaggcggacggctttatatagaaagatttgcacgtttgataaacacatttaacaacgaaaaaaaatccggagctccaattatgacatatggagatacgcagattaattgtgaaattggcagatgtaaaggatacaatggtggagcaattaaaaatataaaaggaactttaaaagtatatggagatacaaaaatacatgattgtgtatctgtaaccgaaggtggggcaatacataattcacaaaaaggaacactaagtatagaagattcggaaatttggaattgcgaagcgttagaagaaggtggagcgattttttcaaaagatgcagatagttcgtgtgttatttattcagggaagatacataataacaaatcaggtgaaagtgctggagcagttttctcaggatatggagcgacgcttgttataggaaggtcaacatcgggacctgaaatatttaaaaatacttcaggaggaagcggaggtggagtaagatgcaacggaggaacaggttcagatgcaggtggaataacaacatttataagaggaacaataacaaataatacttcatgtaagcatggtggaggcattgcctgtggagaagcaggagaaaatggtcagtcaaaactttatatgtcagatatgattattagtaataatacttgtacagagtcaggtggtggaatttggacaccaaacaatatacagggaacaggaacagaatatgcaattattcaaaacagccagattacatccaatacttgtcataaatatggtggaggcatatctgtccatggaaaggtttatgtatcaaactgttcaatagaacataattttacaggtgacaggggagcaggaatccatataacagaagaaggtacgttaaaatatgatatgggaacaatttctgacaataaaaccttagacagtattacaggaacgggaatatatgtaaatggtcagcttaaaattaatgaatcggcaagaatagctgaaaataatgtagtttacctgcctaaaggaaaatatatagaagtaacaggtgaactttataaatattattcaagtattgcaaaaatagaatcggaagacaaaagtaatggaacaaaattagtatacataaattatgaaaatggaacaggcgagaaagaactgtattataaaggaacttccagtgatgaatatgaaggaaaaaaagtgcaaaagaaatatagttgtgttggaataagttcgcaacaattgctaagaacgggagaaaatgtttcaggtatcgggaaaaattggattattataagtgaaaaatacttaataaaatatgattcaaatacaactgatgaagttaaaaatatgccttcagatcaagtaaaattttggaatgaaaatattaaattaagcagtgaaggtcctgaaagagaaaaatatataattgatactaaaaaacattggaattactcaaaagatggaagaggaacaagaatttcagcgggagcttatttttatgccaatgaatcaagagttctatatgctcagtggaagaaacgtccacctaaggaaatatatataaatgctaaggacagatattattttaaaggacaaggcatagttataaatagagaagaattgctgaaaaaagttacagtaactgacgatgttgataacggaaatgagtattatgttagaataatagaaataacccgaaccagtgataatcttgtcaataatgatagtagtgacgataagaacgatagtaacagtaataatagcgatagtactaacgataaaaatgatagcagcagtaataagagcgatagtgttagtaataaaagtgacagcagcagtaacaagagcgatagtactgacaataaaagtgatagtaaaaacaataacagtagcaataaaagtgacagtggtagtaaaggtgatgacaaagacaacaatttattagcgacgggatcaaatcttgttcctgaaaagtacattaatacgtcaaaggttagtgtatataaaataaagatatacactgaaacagaaacagcaagtgtaaatgcaacagcaacgtttaaaatttatgtattagataatgaaacagccattggttctgtaagatttataagtagtaaatatctttatacattatcagatacttcaaaatggaataaaaagcgaaatgagaatttgaatacaaggttaactaatgcgttaaaagattcaaatccaatgctcaaagttgcgtatacaagtgatgaaattgagcagataagaaagactgtaaaaggaaaaggctatagaataaccaatagtcttaataaaaatattgcaaaggaatggtagtgtatgaaacagataataattattgtgggaaccatagttataattttcatagctgcaatgacaatagtatctgtggaaagtaaggacttaagaacagacgaattaaacagagcagtttctgcatcaattaagaaaacagtttcagacagtcagattgaaaatcagtcgattatattgtctgataaggaaatggtagcatattttattcagttgttaagtgttaacatgaaaggcaagggaaatgttaccgttgaagtatatgatgcagactataaagagggacttttgtctgttgcagtaactgagaaatttaaatatgtaaatggaaaaaatggagaaataacagttagaaagtcagcaatagctgaataaaaatcagatgtgtcctaaagtcattatcccaccattgtgcaggcacaggtggaataagacaatttaacttataatctatagtattatattatttttgaattttagtgctgacttcgccggagtttagccattcttcagaaccgtcttcataacgaactttaagatggcattccttgtctatttcaagagccagtgcatttcttgaagttccgttagaaagtacgctgataggttgcccaattatcattgaacggctaatatattcgtcaagataagctcttttgtcaaaggattcatagtattccataaaatagtttaaaaggtgaccaacaagtatgcttcgcttatttacggcatcactgcttttttcaaaaatagcagttgcaatttctgaaatatcttcaggaaaaccgccttcaggtgggcatacgttaatgccaattcctactatggcataatccaactttgatgtttcaatattaaaggcagcttcggtaagaatgccacaaacttttttaccttcaatataaatgtcattaacccatttaatgtcagcttttttgttagaaacatcttcaatggccttggctgttgctacagcagcagaagttgttaagaataaagcctgatcagcaggaatatcaggtcttactaatatgctaatgtacaggcctgtgtttgatggagagtagaatttcttacccattcgtcctctgccaagtgtctgttctgtggcgataaggactgtgccgtgtggcgcactctgttcggctttttcttttaaaactgtattggtagatgtaatggttttatatacagacaaattaagtggataatttaaatattgttcaatgctttgtggtgaaagaatgtcattgtcaggctctaagcaatatcctttgttaggaattgcatttattgaatagccgtctttttcaagagttttaatggctttccagatagagttacggcttacgttaagattagttgcaagctgacctcctgaaatgtattcacctttattttcttcaagctgttttaaaacttcgtcttttatgctcatggtaacagaaacctttcttaattagtatgattatgcaataaagagttatgcaatagaagtacataacaaaatttattttatgcaatgaaaatataatgtcaaaaatatgacataaaaaagtataacatcaaaaatatgtttattcaacaaaacaaagtgaatgaataataaaatgttagctaaaaaataaaatgggttgacaattaaaaagcgttgtcttacaatggtgacgttggagtgcgcatattcagagaatatttagaagggacataggcataaatttaattactcaattgatgccttttataaaaaatgaataataagaaatttttaactgttcaggatatggttcttatagctgtatttgtagcaataataactgtatgttcatttatacagatttcagtaggacctgtaccatttacattacagacatttggtgtttttgtaacagcaggcatacttggaactaagagaggaacattagcagttatagtttatattttgcttggtattattggtgtacctgtattttgtggtgcaggcggaccgggagttattgttggaacaacaggtggttacataacaggatttatttttactgcacttattattggcataatcactcatttcttcgaaaagagttctacatggttaaacattggagctacagttgtagctatgattttaggtgatgttgtatgttttgttattggaacaattcagtttatgtttgtaatgaagacttcattgacagtggcattgggatactgtgtaataccatttattattcctgatttagttaaaatattagtagcaacaattattgttaataggatgaagaaatatgtcaaaatacttaattagaccacatcatatgttgtgcatgcagttctttgagggcaagggatacagcgatggatttgtcgcatctatggcagcaataaaagaaaaacttgaaaaagaagatcctcaggttgagattgttgaaggaacagatgatgtatgcaagaattgcccacataatatgggtggggcatgtgagaatgaagattctgtaagacaacatgacaagagagtgtatgacaaagtaattgaaactgtaggaaacagtgccaaatggtcaagtattacaaaagccataagagagaacattatagactcaggtaagatgagagaaacttgtggtaagtgtcagtggtcagatatttgttttaaaaattagaataataaatatatatttcaaacaaccaaagggtgcgtggctttatgctatgcaccttttgtgttatatgcgattagacttgatatttgcgatagctaaacaatataggtataaatctgcaactaaacaatataggtataaatctagatagaagaaccaaaatatgttagtatataatgtattagatttaattttggaggaagcaatgactttagaggcaaagaatttaaatgagcagataagcaatttaaaagaatatgaagtgattcttcataaaaatatagaagaagttgattcagaaggatggtttctgaaacataagaaaacaggagcaagaatagtacttctggctaatgatgatgataacaaggtgtttaatataggatttagaacacctgttaataatgatacgggagttccacacattatcgagcatacagtactttgtggttcgaagaagtatcctgttaaggatccttttatggaattagttaaggggtcacttaacacatttttaaatgcaatgacatatccggataagacaatttatcctgtggcaagttataatgacaaggattttaagaatcttatggaaacgtatatggatgcagtttttaatcctaatatatatgatgaaaagaagatttttcttcaggagggatggcattacgaacttgaaaacaaggatggagaattaacttataacggagttgtatacaatgaaatgaaaggtgtttattcatcagtggacggcgtaatggatagagcaacattacattcattgtatccggacacatcttacagttatgagtcaggcggaaatcctgacaatataccggaattatcatatgaagaatatttggattttcatagaaaatactatcatccgtctaacagctacatttatctttatggagatatggatatggttgaaagacttcagtggattgacaaggaatatcttggcaagtatgatatgttgaaaattgattcagaagtaaagaaacagcctgctttttcacagttaaatgaagaaaaagtggcttatgcaattacagacagtgaatcattggaagacaacacagttcttacagttaattatgtaattggcgatagcagtgatgtagaattaaatactgcaattcaggttttggaatacgttcttatggaaatgcctggagcttttcttaagcaggctttaattgatgcaaaaatcgggaaagatgtttatagtcagtatgaggacgatatttgccagcctatgtacagcattgttgcaaaatatgccaatgaatcggacaaagaaaaatttattacaataataaatgaaacacttgaaaaattggcaaaggaaggtcttgataaaaaggcacttttggcaggattaaacagccttgaatttaaagtgagagaatcagattttggcagaataccaaagggattaatctttggaataaatatgctttcgagctggttatatgatgacagcaatccttttgttttattagaaacaaacaaggtttttgaaaaacttagaaagatgattgacacagattattttgaaaaattaatcacagaatattttataaaaaatactcacaaatcagtggtaatattaacacctgaaaaaggattgactgaaaagaaagaacagcagttaaaagattcattggaagctaagaaaggtacaatgacagatgaagaaattgaaaatataataagagaaacaaaggaactaaaagaatatcagacaacatcttcatcacctgaagatttagcaaaaattcctttacttgaaatcgaggatataggaaaagaaccacgaaaaatcattggacaaccggaaactaaagaaggcataacaatgctttacaacgacctgtttactaatggaataggataccttgacatagtattcgactgtacagatttgcctgaaaaatatcaaagttatatgggacttttgaaacctgtgttaagttacatggatactgaaaagcattcttatacagaacttaatactgaaattgatttggatttaggcggttttgcttttgattcaggaatttatgttaataagaaaacaggagaaccaatgcttacaggcgaggttcacgcaaagatgctttatgacaagattccaaagacttttgatttgattaaagaagttgttttggaaactaagtttgatgactataagcgtttaaaagaaattcttgaagaattaaaatcaagagtgaaatcttcaataataaagacaggtgacagtgctgcaatgctcagggcaatgtcttattattcaaaatcatattatttaaaagaacagtcaacaggacttgcattctatcagttcttaagtgatattttagataattatgaagaaaagaaagaagatttcgcaaagaatttaaaagatacaattgaatatgtatttagcaaccagaaaatgtatttgaattatgccggagatatggaaagttatgaacttgtgaaaaagcttgttattgacttaaagaacagtgtttataatgtcccaagaaataaggatttgtggcagtttagacctgaaaagaaaaatgaagcaataaaaacatcaggtcaggtccaatacgttgcaagaacaggtaactacaacaaggataatgacaaggtatttagtggaagctttatggttcttggaaatattatgagaagtaaatatctttggaataacattagagaattaggtggagcttatggatgtaacgcttcatttacaagaaatggagatgtaatgtttacttcatatagagatccaaaccttggaaaaactaatcaggtatatttaaaagcagcagattttattgaaaattttaatgtagatgaaagagaaatgcgtaaatatattataggaacaattagcggaattgatacaccacttaatgcggcagacagaagtggaagagagtttagctgttttattacagacacagattatgaaacattaaaaagagaacgtgagcagattctttcaaccaatgttgaaaacattagagagcttgcacctttggtaagagaagctatggcagacaataatatttgcgtagtaggtagtgcaagtgcaatagaacaggacaaagaactttttgaaaaaacagtagaattagtttaaaaagtattagtttaaaaagtattagtttaaagttataactaaaaatatcagacagatatattggaactaaagagaattatcagttgtttaccgaaagaaaggagagcatccaggggatgcaataagataatgaaagaaaaatttaaatcaggatttgtagctcttataggcagaccaaatgtaggaaaatctacattaatgaatcagattattggtcagaagatagcaataacatcaaaaaaaccacagactacaagaaataagatacagacagtatacacatgtgatgaaggtcagatagtattccttgacacaccaggaatccacaaagctaagaacaagcttggggaatatatggttaatgtggcagaaaaaacattaaaggaagttgaccttatattatggcttgtagaacctgacacttttatcggtgcaggggaacagcatattgctgaacaacttaaaggcattgatgtacctgtaattcttgtaattaacaaaacagatacagttaaacgtgaagagattttgacttttattgatgcctatagaaaaatatatgattttaatgaaatcattcctgcatcagctcttagaggtcagaacacagatacagttgttgcggaaatatttaagtatttgccggaaggtcctatgtactatgatgaagatacagttacagaccagccaatgagacagattgtagctgaattaataagagaaaaagctctgcatgcattaaatgaagaagtgcctcacggaattgctgtaacaatagaaagaatgaagcagagaaaaaatgctgaaattatggatattgacgcaacaatagtttgtgaaagagattcacataagggaataataattggcaaaaaaggcagcatgcttaagaaaatcggtacaaatgccagatatgaaattgagcagcagttggaaatgaaagttaatcttcagttatgggtaaaagttagaaaagactggagagacagcgaattattaatgaagaattacggatatattgaagaaaaataatttccaatatattcttacaagcccaaataagtatacaaaaatttctatggagaatcctaattatagacatataaaacatggaaaataaaatataattttatataggattacagtgtcaaaaggtcttagcccacggtgtctgcataatggtggggatggcactgaatgaaattagttttagaattggtacttaggagggaatatggaatatcagggaagttctagtgctttttgggcaacaggaaagattgaagattatttgaagtattctgaggagagaaaaagacaggcttgcgaaaaatttatttctgcaatagaaggtgaaaaggcaaatgatagaaacagtaacagtaattgggatggtaatatcctacatggctataagtgaatatgacaaaagactggtattgttaacaaaggaatttggtaaaatcacagcttttgcaagaggtgcaagaaaaacaacaagtcagtttcttgcaggaagccagccaatggcttttggtgaatttaccttgtacagaggaagaaatgcatatacggtaacatcaatgaaaataagtgattatttcagcagtgacatgaaagacattgacagtatgtatatgggaatgtactttttggaactggcggactattatggtagggaaggcattgaggcaggagaaacactcaaactactatatatgtctatgaaggcattatccaaaaatatgctaaaaaaagaattgattagatgtatatttgaattaagaattcttgttataaatggtgagtatccaaatgtgtttacttgtggcaattgcggagaaaaagagaatcttgattactttgatgaaaaaaataatacaatgatatgtagcaactgtcatggaaaagtatcagagaaaaatataattgacaattcaacaatttacgcacttcaatatatagttacatcacctataacaagattattctcctttgacgtgacagataaagtactggaacagatgaaggggataattaacaaatatataaagaaacatatagataggaagtttaattctttagaatttctggaaatttaatattgaaattaattgcttaaacgtatagaattactaactagagaaataaataggagactaagagatgaagagaattatggcaatgctaatgtcagttgttttgacattagggctgacggcttgtggtcatactgttggtgatgttgatttggaatcaggtcaaagtgctgtctacatacagaaggacggtatggtttcatatgctgtaagcgaatcgtttgataaggattattatgataaagatgaattaaagaaggagatagaggctgaaattaaggcatacaatgctagtagtgatgcttcagtagatgatgcaattacacttgatagctttagtgtgtcaaaaaaggttgcaacattgtctcttgattttacaacaacatatgatttacttaattatatgttaaatgataatagagtggaaaaagacaaattctatattggaacaattgattctaatgacgattgcaaaataagtggtaattttgttgaaccaggcaaaaaggataaaatcaaggctaaaactattaaaagtatgacggatagtaatattttaatagtggatgaacagtataaggttcaggtagaaggcaatgttttatatacaagtgataattgtaagattgatgatgatggcattgtgactacagcaaagtcagatgatggactaagttatgttgtgtatgaacttgaagaataatcatattttttagaaaatattttaccagttagcataaaataatttgacaaataaaaaaataaaagttaaattaagaaaaatcataatagaaaatagaaaaagtagaaaaggaagaaatgacatggaaaagacaatggaaaaaattgtagcacttgcaaaaagcagaggatttgtatatccgggctcagaaatttacggtggacttgcaaacacttgggattatggtaacttaggtgttgaattaaagaacaatgtaaaaaaggcatggtggaagaaatttattcaggaaaacccttataacgtaggtgttgactgtgcaattttaatgaatccacagacttgggtagcatcaggacatcttggcggattctcagatccattaatggactgtaaagagtgtcatgaaagatttagagctgacaagattattgaagactatatggctgataatggcattgaagctgaaggttcagttgatggttggacacatgaacagatggctgattacatagaggagcacaagattgcatgtcctacatgtggaaagcacaactttacagaaatccgtgaatttaaccttatgtttaaaacattccagggtgtaactgaggatgctaagaatacagtatacttaagacctgaaacagcgcagggaattttcgttaactttaagaatgttcagagaacatcaagaaagaagattcctttcggaattggtcaggttggtaaatcatttagaaatgaaattacacctggtaactttacattcagaacaagagaatttgaacagatggaattagagttcttctgtgaaccgggaacagaccttgaatggttccagtattggagagctttctgccgagactggttattaagccttggaattaaagaagatgaaatgagacttcgtgatcactcacctgaagaattgtgcttctactcaaagggaacaactgatattgaatttttattcccatttggatggggcgaactttggggtattgctgacagaacagattatgaccttacacagcatcaggaactttcaaaacaggatttaacatattttgatgatgacaagcatgaaagatatgttccatatgttattgaaccatcacttggtgcagaccgtgtaacattagctttcttatgtgcagcttatgatgaagaaaatatcggaacagaagaaaaacctgatatgcgtacagttttacattttcatcctgcacttgcacctgttaagattggtgtattgcctttgtcaaagaaattaaatgaaggtgctgaaaaggtatttgcagaacttagcaagtattataactgtgaatatgatgacagaggagcaattggaaagagatatcgtcgtcaggatgaaatcggaactccattctgtgtaacatatgactttgattcagaagaagatggagcagttacagtacgtgaccgtgacacaatggaacaggaaagaattaagattgaagatttgaaagaatactttgaacagaaatttgaattctaataaaaataatacaatttttagagaaaggctacctaagagggtggccttttgttatgaaaaagactaattatgttagacaaaaataagtctaaataatgatttttatgctgaattttaaaaataaatgaaaaaaatcctaaatagagagtaaaaagcacaaaaactctttggataaaaacgtttctattatataatattcatagaggaattgagaagggtttggaataacttgaatcagttgccgtaaatgaaactatgtttcaaataattaaaaggcgaggtgtaatatgaaaccagtagttaaagttatccagacagcgaaaaacgaaaaacaggcgtggcgcaagttagatgatttggaattgtttaaatattataatttccgaatgaatacagtgtctgttgacagtagcataagctatcagaaacttttgggatttggaggggcttttacggaagcatcagcttatacttgggctaatgcagatgaaaaatcaaaggatgaaatcgtgaaagcttactttgataaggaatatggattggcatacaatcttggaagaacaacaattcatggatgtgatttttcgttagaaccatatacatacattgaagaaggtgattttgagttatcaacatttgatatgtcaagggaagacaagtggcttgtaccttttttgacaagggcaaaagaaacagcaggacacagtctgggaatattggcatcaccatggagtccaccggcttttatgaaagacaacaaagatattaataacggtggcagacttttaaagaaaaactatgcaacatgggctgaatatatggttaagtatattgagggaatgaaagaacgtggcatagaaatagatatgattagtatccagaatgagccggctgcaaaacaggaatgggcatcatgtaagtatgaggctgatgaagaagcggagtttgcagttgactatctttatcctgcattagaaaaaagaggattgcaggacaaagttaaaattgttatttgggaccacaatagagacttaatgtttagaagattaaatgagtcaatggcatatccgggagctagagaaaaggtttggggagcagcgttccattggtatgtttcagataaatcagaaattcttacaatggttcatgaaaaatttcctgagaaacatttattatttacagagggctgtgttgaattagtgaataattcaggcggaacaagttcaaaggcaggaatcggtgcatggaaacatggagaaatctatggaagaaatattataaaagatttcaataactataatgaagcatggattgattggaatctgcttttaaatgaaatcggtgggcctaactatgtaggaaactattgtgaagcaccggtaatgtatgatagaaatacaaaagaaataatgtacaacagttcatattactatattggacatttttcaagatatattgaaccgggagcagtgagaatctgctgtagaaatgatgtggataagggattatattcagtatcatttaaaaaccctaatggagatattgttacagtggttcaaaatgagttgaacagaaagcagagattagctttggttgttgacggacagggaacaaatacggaaatacctgctcattcaattacaacatttataacaaaaaatagtcaggaataattttcttaaatgccctaaacccctttaaatataaagagtttagggcatatttcttcttgactatgagattgtctatgttataattatttcataggtgagattgcgtctttttttatggagttgattatcaactatgatttaagcagtttttgcttagctggtctcatcattaatcgattatatgagttgtgtataggaaagccattccttcaactcataacataaaatacagttttaggaggaaaaaacagatggcaaacaaatgggtataccttttcagcgaaggtaatgctaacatgcgtgaacttcttggtggtaaaggtgctaaccttgcagaaatgacaggcttaggacttccagtacctcagggattcacaattacaacagaagcttgtactcagtattatgaggatggcagagagatcaatgaagaaattcagggtcagatcaatgaatacatcgtaaagatggaagaaatcacaggaaagaaattcggtgataaagagaatcctttacttgtttctgttcgttcaggagctagagcttctatgccaggtatgatggatacaattcttaaccttggtcttaacgaaacagtagttgaagcaattgctgctaagtcaggaaatgctcgttgggcttgggactgctatagaagattcatccagatgtactctgatgtagttatggaagttggtaagaagtactttgaagaacttatcgacaagatgaaagctgatagaggtgttcagcaggacgtagaacttacagctgatgacttaaaggaattagcagcacagttcaaggctgaatacaaagaaaaaatcggagaagatttcccagatgatcctaaggaacagttaatgggagctatcaaggccgtatttagatcatgggacaacccacgtgctaacgtataccgtcgtgacaatgatatcccttattcatggggtacagctgttaacgtacagtcaatggcattcggtaatatgggtgatgattgtggtacaggtgttgcatttacaagagatcctgctacaggtgaaaagcacttaatgggtgaattcttaaagaatgctcagggtgaagacgtagttgcaggtgttagaacaccaatgcctatcgctcagatggaacaggaattcccagaagcatttgaagaatttgtaaaggtttgcaagactcttgaagatcattacagagatatgcaggatatggaatttactgttgaaaacagaaagctttacatgttacagacaagaaatggtaagagaacagctcaggctgctttaaagatcgcttgtgaccttgttgatgaaggcatgagaacagaagaagaagctgtagctatgatcgatccaagaaacttagatacattattacatccacagtttgatgcagcagctcttaaggcagctacaccagttgctaaggcacttggagcatctccaggagcagcttgtggtaagatcgtattcacagctgaagacgctgaaacttggaatgcaagaggagaaaaggttgtacttgtacgtcttgaaacatctccagaagatatcacaggtatgaaggcatcacagggtatcttaacagttcgtggtggtatgacatcacatgctgcagtagtagcccgtggtatgggtacatgttgtgtatctggttgtggcgacatcgttatggatgaagcaaacaagaaatttacattagctggaaaagaataccatgaaggagactttatctcaatcgatggttctacaggtaatatttatgatggtatcatccctacagttgatgcaacaatcgctggtgaattcggaagaatcatgggatgggctgataagttcagaacacttaaagttagaactaatgcagatactccagctgatgctaagaaagctagagaacttggtgcagaaggtattggtctttgccgtacagagcatatgttcttcgaagaagacagaatcgctgcatttagagaaatgatttgttcagatactgttgaagaaagagaagaagcacttgaaaagattcttccatatcagcagggagacttcgaagctctttatgaagctcttgaaggatgtccagtaacaatcagattcttagatccacctcttcatgaattcgttccaactgaagaagacgatattaagaaacttgctgatgctcagggcaaatcagtagaagaaattaagggtattatccagggattacatgaatttaaccctatgatgggacacagaggacttcgtcttgctgtaacatatccagaaatcgctaagatgcagactaaggctgttattcgtgctgctatcaacgtacagaagaagcacagcgattggacagttaagcctgaaatcatgattccattatcatgtgattctaaggaattaaaatatgttaaggatatcgtagtagctacagctgatgctgaaatcgcagcagcaggtgttaaacttgaataccaggtaggtacaatgatcgaaatccctagagcagctcttacagctgacgaaatcgctaagcaggctgacttcttctgcttcggtacaaacgatttaacacagatgacatacggattctcaagagatgatgctggtaagttcttagatgcttactatgatgctaagatcttcgaaaacgatccatttgctaagttagatcaggttggtgttggtaagttaatggaaatggctatcaaacttggtaagccagttaaccctaaccttcacgtaggtatctgtggagaacatggtggagatccatcttcagtagaattctgccataagattggtcttgattatgtatcatgttcaccattccgtgtacctattgctagattagcagcagcacaggcagctatcgctaacaagtaatacactgacaagtgaaaagaatataattacttaaaataatgaactcctgtatactagaaatggtgtgcaggagttttttaacataaaattaagctatgctacattctgctttagggaaggatgaaaaaggttatttaatggatacatgtctaacagcgcaagatagatataaggcatatttagactattttgaaataaagtatgaaaagaattgaaaggagagaacgatgaaggtactactgggaacaactaatccgtcaaaggtaaagaggttttctaaaatgttagaaaattgtgatatagaatttataacattaaaagatttagagatagaagatgaaccggatgagacaggaaaaacgccggaagaaaatgcaatatgcaaagcaggatattatggcaaatattttgacttggtgatttgtaatgattcgggattgtattttgaggaactaagtttagaagatgagagacaaccgggattaaatgttaggactccaatgggaatgaacagattatcagatgaagaaatgattgagtattattcaaatcttataggagagcttggaggaaaggtatctgcctattacctggacggtatagctgtttataacaatggtaggatttcatcatttatggatagagagtcagcaaaaaatgtaggggctttttatatgatagataaagcatcaactaaaagatttgagggctggccgcttgattctttgtcaattagtaaagagacaggaagatattttgttgagggcagtgattctgaaagtaaggaaaatataatatatggcgagtatgaaaagagaatagtaggatttttaaaggaagcattggggataaaataagtatgatatccagcaattcggatagcaattgctgacagtactatataaatctgtgctataatatgtatggaagaaagaaaaaggagtgtattacaatgtcaaaatttatatgacaatgcaattttaggattaactatttaaattgattgggccgttgataatagggattatttacgctgtaattattacaataccaattgaaaaagtagagaaagaacaacttgcaaaagaacttgaaaggcaaatcaagaaagagcagggatatcgttagagaattttgacaataatgttaacggagaaagttagagaatgtctatggatgaattatatttctatgattgtaatttaaatataaaaagtttcgcaggaatgttggaaaatccaacccaatgctataaattcttttggcttgattccataatgcagttggtggcaagaggagaaaatgagtttacatttttggaagtttttgcgggcatgatagcggatgcatggtatgcggtaaaggaatatcacttgagactaggtccaaaatcagtagatggtacaagttctaatcttttggaaagagcagtaaataaaattagcgaaaatgtggatgtgaaaaatgatgaatcaagggatattatcattgaaaaaataaagtgcaacagtaaatgtgttaattctgagatgcaggacttagcgaagaatgtaccatatagattactttcttcgtttgtgaaagagttaggtgggaataatccattatggagcaagactggaaagcttattagttattttgaaatgattaataagaaaagatgtttattgtacacgatagagaatggtagaggattaactaaaaaggttattataaataagttgtggaacaattttctcatcgataatatggttacaatcagtggctggattaagatgaaaaaaattaaatatttgcaggatagaaatccgggagttccgggacttatttataaacttgaaccggaaaaagacaaggaaagaaaacttgaaaatgttagaaagctttgggactgcgtaatagatattaatggtgttgggtttaaagatatatattcaaagcgacatatagagaacaaatatgcgatagatcattttataccatggtcatatgttgctaatgatgaattgtggaatttgattccaatggacgaaaatctgaattcttccaagaacaataaattgccggactgggacgcttattataagaagttttgtgataatcagtatattttaaatgaaacaattcagacaaacgaaaaggcaagagaaaaatttgaaaaatgtaaacaacacaatcttaattcaatttggcctttggaagaattatacatacagaaaattgaaaaagaaagatttttcaatgtgctttatggcagacttcatcccatatatgagtctgcaatgacacagggatatgatatatggaaaaattgaaaggaaaaacatatgaaaaaacgctaaagacactaatgttaattgcaataattgcaatgggaattaaatccatataatgatgaattgtatataatacttattcaaaaggctatagacaaagcagaggacattatcaaagttgccacgtattttggagttgacttaactgcaaagaaagatttaatagcaatagaatacctaaataatataattggaactacggaagaagatgcttggtcagcaaagagaaaaattagttaatccaacatcagcccagaaggtaatgggaaaacttggaggattgtttaaacattaagaaaaataaaaataaggctaacgttcaaaagagcgttagtcttatttttttgaaaaggagatttgcgtgaaagaatatatagtgggattaggactaggaattatattgattaatattatatacataaacattgttttgtgggaaaggaattaatagatgaattgaaaaagtatatttcagaaaacgctattcgatggtctgcacgttgtttggagaggatgtaggaaagagacatttccagagcagatgtaaaaaatgtgttttggaatgagaaatcattgaagattatccagatgatttctcgcatcctaattgtttgatttttggatatactataaatgataaaataatacatattgttgctggaagtgatggaaaatatatttatattattacagcatacttccctaatacaattaaatttgaaaatgatttgaaaacaaggagaaaatagttatgtgtatgttttgtaaatgtgatacagtataagaaagtactacaactcatgttgttaattacaaaaatagtatcattgtaattaaaaatgttccttgtgaagaatgtgagcagtgtggagaaaaatattatacagacgaagtagcagaacagttagaaaaaatggttaacctagcaaagcaaatgatgcaggaaattgccgttttagattattcaaaggtagcataaactttatgtaaattatagaaaaaatgcaatagcgaacctatgatatatagcagctcaggcagctattgctaacaagtaatacactggaaagtgaaaagaatataattacttaaaataatgaactcctgtatatcgtaatggtatgcaggagtttttgattgtaagatttatttaattgcattctataacaacatacttggtcaaaattaaataaaattttgtaattcataatgtggtatcaatctactttctgatatgttagaattatataagatatttttgaagcggaatacatattaaaaagtttgaagcaggctagcgataaagtggtcaaaccttagaatcataggacatacaaaatcaaaagtgatataggagatagcaatatggatattacattcaaaacatcagaaggtaaatttaattatagagtatgtgctgtaattataaatgacgataaaatattggcgatgcaagatgaaagatcaccatattactatttgccaggtggaagagtgtctttaaatgaaacagcagaaaatgctatattaagagaaataaaggaagaacttgaaattgatgcaaaaatagtgcgaccattgtggctgaatcagggattttttgttgaagatgtaactggcgaaaaatatcatgagttatgcatttactttttgatagatatttcaaatacggatttgctggaaaaaggtaataagtttcgtttgattgaaagagagcatacccatgattttgagtggatagaatttgaacgtttacaagatgagtatatttatccggtatttataaagaaaaaaatttttgatttgccggattatcttgtgttacaagatgagcatgaatagtgaagtgagaggatacagcaggaggcttagcattgcaaggagaaacaaagatggacaattttattgggctaaacagttggaaatttttattttgtaagagccgaaagaaatgatgatttcggacaagcaacaattatagaaacagcaggtggaggtgttgaagaaggtgaagaattgcaggatgcaataaaaagagaacttaaagaaaaattgggtgtaaaagtagatgtaatctgcaaaataggagttgtaagcgattgttataatctgattcatagacataatattaataactattttttgtgcaaagttgaatcctttggtgaaaaagaactgacagaagatgaaataaataattttcacttatcaacattgaaattatcttatgaaaaagttgttagagagtatgattataggtcaaatacaagattagggaaacttatagccaatagagaattgccggtgttgcatcgtgcaaaagaaataattgatatttagacaagaattactaaattagaattttaatagacagttatagtaataagtataacgaaaatattttatttaataaataataagctagaagaaggatattatatataatgacaaatgaaatcgtattatttaatgacggtaatgttaacatagaggttcaaataaatccggaacaggaaacggtatggcttactcaaaaacagatagaaacattgtttggagttagtcatgcaacagtaagtgaacatatatctaatattttgaagtcaggtgagctggatgatacttctgtcggtttttccgacaaaagtactggaggcagaaaaccccaaatatacaaccttgatatgatattgtcagtaggatatagagttaattcaaaaaaaggtattgcgtttagacgttgggctaatggtgtgttgaaacaatacataatggaaggatatgcaataaacgaaaaaaggatgtttgcacttcaaaaaacggttaatattcagacaaaaatgttagcatattccttagatttggaggagatgtgtatccgtcattggaagaaaaagctgcaaatttactttactttataataaaggaccatccttatgctgatgggtgcaagagaatagctgcatctcttttcctcgaatttttagcacgcaacaatgctctttataaagatggagtaaaaattatcagtgatggagcattggtggcaattacacttatgattgcagaatccagagcagaggagaaagagataatggtaaagttagttatgaatttcttggcaatgtaaaatattgcatatataaaagaaatgatatgaaagtatggcaatttatagcaggtggtggagaagatgaggatgaaactataataatatctgcaaaacgagaggcatatgaagaagcaaacataggtatggattgtaaatattctgtacttgatacacaaaatagcataccaacatactgttttaaagaagcaagaaaaatataggctgaaaattaggactattggcaaatgaggtgaaaaagaatgaacaagtatttagaaaatttaaacagaatagagtttgttgtaacaatggcatgcacagggagatgcatacattgttcagagggagagcataaatcaggtggagagcatatagatggaaacatagcagcacaagcagttgttgatatatgcaataactatgatattaaatctttaatgacttttggaggggaaccattgatatatccggaagtggtttgcaacattcataaaactgctaaagaaatgaacataaaggatagggcaataatcactaacggatttttttctaaagacaaagaaagagtaagagaagtggcgcaaatgttgtcatatagtggagttcaaaaagtgttattatctgttgattcatttcatcaagagactataccgcttgatatagtgaaatattttgcaatgtgcataaaagagagtggtgtagaaattaaattaaatcctgcttggcttgtgagcaaagaagatgataatgaatataacaaaaagacaaagaaaattatttctgaatttgaggatttaaatattccacaggcaaaaggaaatgttatttttccaaatggaaatgcagtgaaatatctaagtgattacttcgataagaacaaggaatatataaatccctatgaggagaatccaatagatgttagaacaattagtttttcagaaaatggggatgtgttgaatgggaatatttatgaaaaatcaattatggagataattgaggaatacaaagtttagaataaagatacatttcttttttaaagaaatagtaaaacaaatttagaatttatgaggtgtggtaatgataagaaaagtaagaggtgaagaaataccaatatgtgtggaagttattaaaaaaagttttttgacagttgcagatgaatatggttttacggaggaaaatgctcctaggtttacagcttttgcaactacgcaagatagattgtattggcatatgtagaagaaaacagagttcttcgtaaatggtatgagttgaatggagtaatacatattgggacaaagaaatatgatttttttccatttacatgtggatatatgaaaaagaaattgtagagaaatttagtatcaggaggcggaaaaggagaaaagcgatggacgaatggttaaaaacaagagacttacccttacattttatatctgttgcaggattagtatataaaggcgatgaagttttattgattaaatcaaaacgtagaggatgggaaatccctggcggagtggtagaacagggagaggatataatgagtggcttaaaaagagaaatatttgaggaaagtggcattgttgccgagccggaaaagtttgttggtatatatcagagattgaatactaaagatggatatggtcctcttgaaggaatgattttaccacctgttgtgaatttgacatttatttgtaaatatatagatggaaatgaaaatgtatcagatgaaagtattgaagtaggatggtttactccaaacattgcaaaagaaaaaattactgctcctgatataaagaaaagagtttgtgatatgttggaatttgatggtaagcaacattttagcacttttgaaaatatagatagtaaaataaaatttattagcgatattcttgtcaaataattatacataacacggagtaaaaaaattgaaacaaataattataatcggatgtccgggaagcgggaaaacttactttgcaaaacagttgtcagaaattttgcaaatagaactttttcatatggataatatatattggaagaaagataaaacgcatattagtaggggagaattgattagcgcggtagatcgaataataagtcaatcagaatggattcttgatggaaattatatatcaactattgagcaaagaataaaaggtgcagacacaatttttttatttgattatacaacgaaagattgtttagaaggagttaaatcaagaattggtgtaaagcgtgatgacattccgtggatagaaacaaaattggaccctgattttcaaaaatggattatggattttagaaaagatacattgcctcaaatagaaaaaatattagaacgatacaaatataaaaaaataattagatttgcttgtagaaaagataaggaaaaatacttgatgaaattgaaaaagaatgtaaataagaatattacaattcataccacggagcttaatatagagttgcaggatgaccaatggcaaatggaatatattgatcataacagaaatattgccagagcaatagtgtatgatgaggatggaaatttttattttgtaagagctgaaagaaatgatgatttcggacaggcaacaattatagaaacagcaggtgggggtgttgaagaaggtgaagaattgcaggatgcaataaaaagagaacttaaagaagaattgggggtaaaagtagatgtaatctgcaaaatcggagttgtaagtgattattataatctgattcatagacataatattaataactattttttgtgcaaagttgaattctttg

SEQ ID NO: 12780 - DNA, 1382 bp, Unknown
  gut microbiota DNA sequence
ggaatttgtttatgattcttaagttttctaatagagtttacatagatattaaatagcaaaggagatgattgtaaatgaaaaatagaagtatctgtcgtttaacaaaaaagtggagaaaaaaaatattgtaacccttcacaaaattaggaggaacaatgataattaacaaacttgattctatcgaatttagacttaaagaattgcatgattttacttggttaaagaaatatggtactgctttttgggttgtagatgaaaccggctcaggatgtatttgtattgggatggaggatgctgaaagaaaatatttttgtaaaattgcaggagtaaatacagttgaagcagaagtttcaccggaagaatctgtgaaaatcctaaaagaagctgttcatctatattacgatttagcacaccccaatttgactaaaattattgaggaatatgattataaccaattttatgttgtggtttttgaatgggcagatggagaatgtttatttgaccattggaattttgaaacataccaaagagatataggtattaaaagtcctaaagaaaaatttaaagaattacctgttagtaaaaagctgaaagcaatagaggttttaaattattttttgcaaaatgtaaaccaaaagggatatgttgctgtcgatttttatgatggaagcattatgtatgatttttcaacagatgtaactacaatttgcgacattgacctttttaaaaaagccccagttatcaatgataaaggtgtagattggtttggaacaaagaggctgaaagctccagaggaatatatggagggttgcgcgattgatgagcagacgaatatttttactttaggtgcattaatttttgagttttttggaagattttctgatgaagaaatccatcaaagatattgtaacaatcaatttattccctgcacattacctaattggcaattaagtgaagagagttatcaagttgcaaccaaggcggtaagtcttaataaaagtgaacgttatttaacatttgctgagttttggtatgaatggaaagcggcaaattccaatttttgagattgagaaatcggaagttatggaggtgaaaaatgtatttcacagacgaaaaagactatattatgcgaatgataaaagaaatggtaagagtattattttctttaatgtttgggaaaaagtatgtttctgttgaacttgaaaaagaaaataaatatgaagtatcagggaaaaatttgaaagattttcttgatatgattgattcagggcaaattaacgaagcggagaatatacttttagataacattgattatacaaataatgatgatgttatggcggcagctcttttctatcaataccttagtgagaaagatagtgagt

SEQ ID NO: 12781 - DNA, 640 bp, Unknown
  gut microbiota DNA sequence
tgggagaaatctgtggacttccaagaataatggatatgggacagtgtaatgacgcttatggagcaatcaaagtggcaatagcattatctaaggcatttggctgcgaagttaacgaacttccattatcaatgattttgtcatggtatgagcagaaagcggtatgtattttgcttacattgcttcatttaggaataaaaaacatcttcttaggaccgactttacctgcatttatttcacctaatgtgttgaaatatttggtagaaaattataatatatctcctataagcacaccggaagcggatcttaaaaaaatcttaggctaaccggtattaggaggaaatatgtcaaacgtaattaagataaatgattttgatgctaaggagcttgatgtttacgcacgattgtcagagggacaattgctaaacagacatgagccggagaaagggattttcatagcggaaagtccaattgtagtggagagagctcttgatgcaggatgtgaacctatttctattttggtagaggacagacacatcaaaaatcaggcaaaaaatataattgaaagatgtggaaatattccaatttttacggcaccgtttgatgtattgacaggaataacaggttttaaattaacaagggg

SEQ ID NO: 12782 - DNA, 1017 bp, Unknown
  gut microbiota DNA sequence
ccatataagctaagtaggcagaatctgttcctccggaaaacgcaattgcgatccgcggattttctgtaaaaaactcttgcagtgtcattccttctcctttatgactaaatgtactcttttcgaccactcttatccgggattcccatctcggtacgatatttattgaccgtacggcgggacagtttaattccttttgccgcaagctggtcactgattgtctgatcgctgtacggttttttcttattctcaccgtctacgatctcctggatcatagctttcatctgctccggtgtcttttcgtccccttcatttccgcagctgctctttactgcaacagaagtcaggaaatagttcagcggaaacacgccccaggaacattgcagatatttgcccctcatggcacggctgatggtagattcatggagattcaattcttctgccagatctaccagacgcatcgggcgcttatgtccgggtccatacatgaaaaaatcattctgttttgctaccagcagatgcataacacgggataaagtggaggaacgctgtgaaatgcagttagatacccactgtgcctgctgtactttatctttcagatatttttttgcttcctcatcggtggtactctccatcatcgcctgataatagccactgatggaaaatcccggatactgatattcattaatcaatatttcaaactgatcttccagttttaccacaaccgcatccggactgatataacgaagctgttcacggtcactgaaagagctgcccggctttggattcagtttgcggatctcctcacaggcatcctgtacttcctccagagaaacctgaagctttttcgcaatgtttggcagatgatttttggcaacttcttccatataattcttaatgatctcaaccgtcacatcggaatagtccttgatccgttccacctgaagcaacagacattcctgaagatttctggcgccgacgcctgccggatccagttcctggatctcctgcaacatttcc

SEQ ID NO: 12783 - DNA, 1559 bp, Unknown
  gut microbiota DNA sequence
tgaaggcaatcgaataaggaaaaaggtaagcacgacaaagctacagaaggaagtggcaggcaagagaatcagaaagaaagcatcagccaagggaaaagaacttgccaaaaagtcagccaagaatgcgtcaaaaaatgtggcaaagaaaacatccaaaaaggtagccaaggatacaacaaaggaagttaccaaggaaggtacaaaacttgcagtaaaaacaggcactacagttgccggttcagcggcaggtcctgaaggcacattgattggaatggctgcaggtgaagcagtgggaatgaagattgaaaacacattttacagggcagagcaaaaaagcaggatgatgaaatatttcatggacaagctaaagcctggtgatgaacaaaacgacagcatattcaaacttgcaggaagcctgataaaaaacaagatggcatacatgattaagcaggtggcatccctacttgcaccgttggttgttccaatactaatagtggtaatggttgcaacaggaattgtgtttgcaatcctagcggtgctatataattcaccatttgcaatatttcttccaccacttgaaagtggagacacaatacagacggttacaacccagtatgtatctgaatttaatcaggaaatacagacattggtggatgaacacaaggatgcggatgagggcagaaaagtatatgtggattatgaaggaatgaacagtgagccttcaaactactatgacgtcatgtgcgtgtacatggtgaaatatggttacgaaaacacggcaacaaaaatgaatgaaacaaacaagcagaatttaaaggcagtgtttgatgacatgtgtaggtacacaacagaaaatgttactgaaaaaaagggcaaaaagaagaaaaagtaccttgaagtgagaattacattaaaaagctacacggaaatgtcagagcagtatcagtttgatgaggaaaggcaggcaacacttaatcagctaatgagtgcctgcatcacaagtaatccgtcaggtggtcagacaggtggaagtcagctaagcggcttgcagggaagtcttaccccacaggaaataacaagcataactgacaaaataacaaatccaacacaaaagaccgtggcatcatttgtattgtctaaagtgggatatccgtacagtcagaatttaaggaatagtggaaaggcatttgattgtagttcgctggcatactacgcatggaaatcagcaggtgtagacatagcatttggtggctcaacaactgcagctgcagaagcgcagggattgaagggtaaaagcgtaaaggaagaaaatttacagcccggagacttgatattttatagctacacaaccaatggaagatacaaaaacataagtcatgttggtatttatgtaggcaatggaaaaatggttgaagctgtggatgaggcacacggagtatgcttgggtaattatcataatggagggttggtgatgatatgcagaccaggaaaataagaaccctaaggtatagcaacactaactcttaaattagatggctttaatatatcataaccataca

SEQ ID NO: 12784 - DNA, 1043 bp, Unknown
  gut microbiota DNA sequence
tggagctgaatcaggatgaatacaccggaaaagtgtatgactggtcggttgcaactgaaattttcaagaaagtaaaagaagcacatccggaaatgacacctctgtatctgcagggaagtgcaagcccgatgagacgtcttgcatttttcgacgagttagcggatcagttcggtgttctggactgggaggctgatcatgactccacaaccgtagtgaatgagtttgaaaccgatacttacaaagaagcagtaacccagctggcggaatggtttgatgcaggatacatttatccggatgcgttgacggatacacagggatctgcagttatgatgaaagccggaaatacgttctcttatatgtcagcaattaaaccgggctatcttgttgaggcaaaggcatctacaggaacagactgctatgcaatgtattttggacaggatgtagaaggtggatattcaactacaaacgtaagtttttatgatactggcatcgcaaccaacagtgcggatccggaaatggcctttaagtttatctccgcgctgtatacagatccggaggttatgaatctgtggcagaatggtattcaggatgtaaactataaagttttggatgatggtactgcttattatgtagatggtgaagatgcttctaactttaaatatcatcagaatacaggatggtttatgggcaatcagtttaacacatacgtatggaatgatggttccaaggatgcaaattactgggataaactgcagcaccataacgactgggcacagtattcaccggcatacggatttatgtgggattcttctgaatactctacacagatcacagctctgcagaatgcactgaatacgtatcgtccagcacttgagacaggctctgtcggagttgctggtgtagaagaaacactccagaaactgaatgatgcgctgtatgcagccggactgcagactgttatggatgcaaaacaggagcagctggataaatggctggatgaaaacggaggagctacagaaactccgcagtctaaccttgatacg

SEQ ID NO: 12785 - DNA, 691 bp, Unknown
  gut microbiota DNA sequence
cgaaaatgtaatccggggagcgaaagaatgagtaaaaagaaaaatacgttactgagaaatacttctatcttgatggctgcaacgattatctcgcgtgtgatcggtcttttataccggtcgccgctcggcgaaaccatcggaaatgagggacttggttattacagtacagcgagcaatctgtatacgatcctgctgctgatctcgtcctacagtattccgatggcagtatcgaaaatcgtatccgaacgcctagcattaaaagagtaccggaacgcacaccgcgttttccgcggagccctcctttatgccgtaatcgtgggaggaatcgctgcactggtggcgtttttcggcggaaaattccttctgccatataaccagcagaatgccatcctggccctgcgcgtactggcaccgaccatcttcttctcggcgattctcggcgtcctgcgcggctatttccaggcccacagcacgatgatgccgacttcgatttcacagatcatcgagcagatattcaacgctgctttcagtatcggtgcagcctggttctttatccagcagtttgcgacaaatgacaccgagcgtgcgaaattcggtgctgccggcggaaccctcggaacgggagccggtgtgctggcaggcctttgctttatgctgctcgtttacggggtaaaccggaaaagcattctgc

SEQ ID NO: 12786 - DNA, 230 bp, Unknown
  gut microbiota DNA sequence
agagtatccgcgaagaacttcctaatataagtttgggaacagtatatcgtaatcttagatttcttgtagatcagggtgatgccctttcactgaaacttggtgatggtaaggagcactttgatggcaatgttaatccacacttccatttcatatgcacacagtgcggatgtgtcgatgacatatttatgccgtcaattgacgaaatctgtactattgctgctcagtactat

SEQ ID NO: 12787 - DNA, 1006 bp, Unknown
  gut microbiota DNA sequence
gaatttctgtcgtttttcgacagccagaataatttatcataattttctttgtctgtcaacaactttttaaaattcttttttgtttgttattgtcgtttcagcgacaactcgtataatttatcataactttaagggattgtcaacaactcttttgatttttttgaaaagcaattttctgttgcatacttattaatacatttcaaggatttttttgtagtcactaataacttttttccatgttttcttcgtttaattatttaattcatattttacatatgccccttcttctgtatcatatgcctttaatgttacatgcttacgtcccagaattttctccaatgtattaattttatctatattttctttactattactagataatctcactgttccattgtttgttacttgtaaaatacctttcttaattttatctttataactactgttataatcaaactttacattttttgatcctgatttaaaaggcactctattcaatcccatatcatcataagtatttattgaaactaacgtaacattacatacgaacctcaactctattgacgtttttccggattttttattcaattcaatatatggatataacgtaccaatatgcccaaacccttctgtatacacttttttattccacttaactgtattatatccaccatacaaaattgcttttttattcttttttaccaatttgtacttaagatacttttgcttaaagcttttaattttcttagaaacagacttaaagcttggattcttcggcattacggtaactgtccattgtaaatcgtcataaaattctccatcatcagtatatatgtctgcatatatttttacgcttccctttttcttcgcctttacagttccatcggacataacttttgcaatagaagaatcttcagatgtccaataaacctcataatttgcttgttgtgggttactatataatttaaattttttagttttttacttgcctgtacctggctttctg

SEQ ID NO: 12788 - DNA, 298 bp, Unknown
  gut microbiota DNA sequence
cgcctgccggctcggtcgttgctcctgcaaagcagggtcatccacaggatgaccgcaacccgtctcgcacttttcataaaaaagaatctaaaagggtgctgcttctttgtttttatagggcgcaagcccgcgacgaagtagatgcgaaagcatatacgagttatacggctaagggtgctgtttttttgcattaaacgagcgtaggtcttgtgctcgaaggttcgaagtctcgcctgccggctcggtcgttgctcctgcaaagcagggtcatccacaggatgaccgcaacccgtctcgc

SEQ ID NO: 12789 - DNA, 350 bp, Unknown
  gut microbiota DNA sequence
acaatctgtctcagaaacattcctactgcattggacattggaattccaagtcgatcaagcacctgctctgcctgttcttttacttcaggttcgacacgtgcaaatacatttgctgttcttgccatagatatcgcctcctcttttttcttcattatatcttgtttgcttgcaagttgcaagcgattcgcaatctgttttcgtaatttcatacactggcagacggcaggtgacagataaggtatctataaaaatctgtatttgcttcaatgactctgccacctgtcattcttttaatcgaatactgttctcctgcttttcatttacttggtactccaactcattcttcatcc

SEQ ID NO: 12790 - DNA, 214 bp, Unknown
  gut microbiota DNA sequence
agccgcggtaatacgtagggggcaagcgttatccggatttactgggtgtaaagggagcgtagacggcaaggcaagtctgatgtgaaaacccagggcttaaccctgggactgcattggaaactgtctggctcgagtgccggagaggtaagcggaattcctagtgtagcggtgaaatgcgtagatattaggaagaacaccagtggcgaaggcggct

SEQ ID NO: 12791 - DNA, 401 bp, Unknown
  gut microbiota DNA sequence
acaaataatttacaccttatttatacctttggaagatcgaatcggaataattaaaaaaattgtcataattcagttggtcaaaaaatagtactatactcaaaatcaatcaaaaaatcaatcgtaaaaaaatacgattgattttttgcacatttttgcatataatataatcattatggttggaaagggaacgattactatgcgtgaaacaagaatattagaattcaaggaaacgattacgaatacttttttgaaaacagttagtgccttttcgaattacaatggtggaacaattctttttggggttgatgataatggaaatgtgaaaggattgctagatgtaaaacaggcctgtctggatatcgaaaataaaatcaatgacagtatatcacctcaaccaaact

SEQ ID NO: 12792 - DNA, 506 bp, Unknown
  gut microbiota DNA sequence
tattattgttgatttcaatgaaagaagtgatgacagaacaaatgccaatgctcttattcttggaaattcaggacagggaaaatcgtatcttttaaaacttttattgttgaatttaagagaacagggaatgtctttaataacgctagatcctgaacatgaatatgaagaagtaacctataatcttggcggtatttttattgatatgatggcaggacgatatatcattaatgttcttgaaccaaaacaatggtcagaagatatagaagattcaggcgaagatgatgttcctgttgcatttaaacaatcaacggttcttgcacagcatatttcctttttaaaggattttttcaagacatataaggcgtttacagaagagcaaatcgatacgttagaaattatgttggtaaaggtctatcaaagattcaacattaatgaaaagacggatcttagtgttctagaacatgacgactaccctatattgagtgatctctatgattacattgatg

SEQ ID NO: 12793 - DNA, 228 bp, Unknown
  gut microbiota DNA sequence
tgtgtggctgcttctgagccaacatcctagttgtctttgaaatcccacatccttttccacttaacacacactttgggaccttagctgcaggtctgggctctttcccttttgacgacccaacttatctcgtgccgtctgactcccgtacatcatctgtatggcattcggagtttgatattcttcggtaggctttgacgccccctaggaaattcagtgctctacctccac

SEQ ID NO: 12794 - DNA, 464 bp, Unknown
  gut microbiota DNA sequence
ccaccaacaggtccgatagcaaacagctgaattaaagtaacaatacctgcaataatcattgcattctggagaagtgatatctgaactgcttcatattcacttccggcaccaatgccgcatgctccggtaattataagcaacggtgtaagattgccgacaaacattgccattacatgctgaagtccaagcggtatagcctgctttaaagaaagattaccgtcaaacttatatgcctcttttgaaagttcgattttcttcatatatcctccatatatccttatgtatatttacagatatatattatcatttatcaacaataaaaaatcaagtaaaaaagataatttataagattttcttattatgataatcacataatttattcaatatttttaagtgcctgctccataggaacatttttaattctcttaaaatcaaatattgtaactataagataaccaattaat

SEQ ID NO: 12795 - DNA, 294 bp, Unknown
  gut microbiota DNA sequence
ttctatatcatatgactttttcttagtccgagcaggctgatttcgccgtatttcctgttctctttgatatttaagttcccatgcacgatgggagaagacatcaggatcttccacattgagataatccacttcattggttgcaatatcacgacggtgatagtcataatacttaccaaaagtacctttgagctgctcgatcagcttatcccggaaatcaggacgtatatggattctggtgtccagcaattctgtatactgttcaggttcaggacgaaatttttcttcccggaaagc

SEQ ID NO: 12796 - DNA, 485 bp, Unknown
  gut microbiota DNA sequence
tctcgctactcattccggcattctctcttcttatccctccactgctccttccggtacagcttcgtcggcattaagaatgctcctctaccaattgcattcgcaattccgcagcttcggtgttgtgtttcagccccggacattttcggcgcaggacctctcgactagtgagctgttacgcactctttgaatgtgtggctgcttctgagccaacatcctagttgtcttggagatcccacatccttttccacttaacacacactttgggaccttggctggcggtctgggctctttcccttttgactgcccaacttatctcgtgcagtctgactcccgttcatcatctacatggcattcggagtttgatattctttggtaagctttgacgcccccgcggaaattcagtgctctacctccataagactaaaacgaggctagccctaaagctatttcgaggagaaccagctatctccgggttcgattggaat

SEQ ID NO: 12797 - DNA, 580 bp, Unknown
  gut microbiota DNA sequence
cttagtacattttgatttggtaaaagtgtacggcatgccctatacatacgatgaaggtgcttcgcttggagtacctttcgttgacaaaccactggatcgtgatgcacaacccggacgtgacaaggtagccgatgtttatgctaaagttgttgcagacctgaataatgccatcgactcagaagcactgaccgtatccaaaaaagcaggtgaaaaacaaggctatatcgatttatgggcagctaaagctttgctgtgccgagtgtatctatacatgaacaaaaatcaggaagccttcgatttagcaaaagaaatcatcgacgactctccttatgaattatggactcccgaacaatacgctgaggcatgggacaagcaagatccgaaccatacaaaagaaatgatttttgaattgataaacaatggttctgatgactgggccgaccgtgaaggcataggctacttgctgaatgaacaaggatatgccgatgctatctgtacaaaatcatttgttgatatgctgcaaaccgatcctgcagatgtccgtaacgaagttgtgataccagcaatgtacgacaaagac

SEQ ID NO: 12798 - DNA, 510 bp, Unknown
  gut microbiota DNA sequence
cgattttacgtctgtccgaagtttacctgaacgcagccgaagctgctgccaaactgggcggagcagccaaagcagaaggtataaaatatctgaacgatttattggacaaacgcaccaaaactccaacagccaaagtatccgatgctattgctgatgacgaattcctgagcaaagttttgattgaacgccgtaaggaactggttggcgaagggcaacgctttttcgatgccatgcgcaataacgaaacgattgtacgctatagcagtgaggaaaaccaaggctggcactactcattacttaaagaatcacaaagtttcgaccgtacgtatacaaaagcattgttgcctattcctgtaagtgaaaccaatgccaacccgactttgaaagcacagcagaatccgggttattaaacaaagcctaaccagtaccggtttgtcgtaatagcagaaaagacaaaccggtagttaagctttctgatgataaaacataaagcatgatatggtatttcat

SEQ ID NO: 12799 - DNA, 253 bp, Unknown
  gut microbiota DNA sequence
tttttgatcatacactcaaaaccacacactgaaatccttcatccggggagataactcctctttccttccttcatggataagccctcgacctattagtatcagtcagctccatgtgttaccacacttccacctctgacctatcaacctcgtcgtcttcaaggggtcttaattcttgcgaatgggatatctcatcttgaggggggcttcacgcttagatgccttcagcgtttatcccttcccgacttggctaccc

SEQ ID NO: 12800 - DNA, 160 bp, Unknown
  gut microbiota DNA sequence
atctcatcttgaggggggcttcacgcttagatgccttcagcgtttatcccttcccgacttggctaccctgccatgcacttggtagtgcaacaggtacaccagaggtcagtccatcccggtcctctcgtactaaggacagctcctctcaaatatcctacgc

SEQ ID NO: 12801 - DNA, 279 bp, Unknown
  gut microbiota DNA sequence
tgccatcgctcaacggataaaagctaccctggggataacaggcttatcactcccaagagttcacatcgacggagtggtttggcacctcgatgtcggctcatcgcatcctggggctgtagtaggtcccaagggttgggctgttcgcccattaaagcggtacgcgagctgggttcagaacgtcgtgagacagttcggtccctatccggcgtgggcgtaggatatttgagaggagctgtccttagtacgagaggaccgggatggactgacctctggtgtacc

SEQ ID NO: 12802 - DNA, 547 bp, Unknown
  gut microbiota DNA sequence
ctagtttgcaaaagtagtagcatggaaaaactagcagtttaaattgcaattaaatatcaaaattttgtaatacaagtcctgcttttgggacagctaaaaaagtagaatctacttaacagttaaatcgggaaataaattaaatagcaaaaaaatcgaaattttagaatcggaggtgcctatgggaacggattcactatactatattagggattatagcggaaattattacaggataaacaatgtaaatgaattggtggctgtaaggaatgaaacagatgcaactgtatttaattacgaccaggcgaaaagttatattggaacaggaaagaaatcggcattctatcgtgctattccaatagaaacggaagatggaaatgacggaggcgatattagattttaaacagcgtggaagtacgagaggagccggatgtggaaaatcagtatgaaaatatttcggccgtaaaagagcttacttatgaagaaatgataattgaggaaagaaaaaatactccttttgatggaaagaaaaatgattggtattcttttg

SEQ ID NO: 12803 - DNA, 379 bp, Unknown
  gut microbiota DNA sequence
gtgtccccacatttctgatacattgcagtacaggaatttcaacctgttgtccatcgactacgtctttcgacctcgccttaggtcccgacttacccagggcagatcagctttaccctggaaaccttagatattcggccgtgaggattctcacctcactctcgctactcattccggcattctctcttcttaacactccactgctcctttcggtacagcttcgtcgcagttaagaatgctcctctaccaatgacattgtcattcctcagcttcggtgtagtgtttagccccggacattttcggcgcaggacctctcgactagtgagctattacgcactctttgaatgaatggctgcttctgagccaacatcctagttgtctt

SEQ ID NO: 12804 - DNA, 212 bp, Unknown
  gut microbiota DNA sequence
cacggcccaaactcctacgggaggcagcagtggggaatattgcacaatgggggaaaccctgatgcagcaacgccgcgtgaaggaagaagtatttcggtatgtaaacttctatcgacagggaagaaacaaatgacggtacctgaataagaagcaccggctaaatacgtgccagcagccgcggtaatacgtatggtgcaagcgttatccggatt

SEQ ID NO: 12805 - DNA, 246 bp, Unknown
  gut microbiota DNA sequence
gtggaaccgcgtactttttgtagaacggtccggcgagttgcgctggctggcgaggttaagcaccaaaggtgtggagccgaagggaaaccaagtcttaatagggcgaatgagtcagtcggagcagacccgaaaccgggtgatctatccatgtccaggttgaagttgccgtaaaaggcaatggaggaccgaacccacatccgttgaaaagggtggggatgaggtgtggataggggagaaattccaatc

SEQ ID NO: 12806 - DNA, 474 bp, Unknown
  gut microbiota DNA sequence
cactttatatgtgcgaccgcgtactttttgtagaacggtccggcgagttacgcttactggcaaggttaagcacttcaggtgtggagccgtagggaaaccaagtcttaagagggccagagtcagtaggagtagacccgaaaccgggtgatctatccatgtccaggttgaagctgccgtaagaggtagtggaggaccgaacccacatccgttgaaaagggtggggatgaggtgtggataggggagaaattccaatcgaacccggagatagctggttctcctcgaaatagctttagggctagcctcatatcagatttgcggaggtagagcactgaatttcctagggggcgtcaaagcctaccgaagaatatcaaactccgaatgccgcgtaatcgattatcgggagtcagactgcacgagataagttgggcggtcaaaagggaaagagcccagaccttcagttaaggtcccaaagtg

SEQ ID NO: 12807 - DNA, 214 bp, Unknown
  gut microbiota DNA sequence
agccgcggtaatacgtagggggcaagcgttatccggatttactgggtgtaaagggagcgtagacggcatggcaagccagatgtgaaagcccggggctcaaccccgggactgcatttggaactgtcaggctagagtgtcggagaggaaagcggaattcctagtgtagcggtgaaatgcgtagatattaggaggaacaccagtggcgaaggcggct

SEQ ID NO: 12808 - DNA, 296 bp, Unknown
  gut microbiota DNA sequence
tttttgcaaatattattttcatatttatgttcgagctttggtattaccttattttcttttaatactttatcacatactgaacatttttcttcacctgtttttccttcgatataacaatttgcttctctggcatccacaacctcaactgtatgttcacccggttccaaagtctgtccctgttccacaagttttccacatgtatcacaaataacatcacctgtgtaaccaccctctgtacagtctgaaagtgttcttccttccctgtgtgttttctcatgagtacatgttattgttat

SEQ ID NO: 12809 - DNA, 1963 bp, Unknown
  gut microbiota DNA sequence
tgctcttttttcctttaaaaaaaggacagctgcaatcacagccatccccaataaaagaagtatcagagatattttaattattttcttcatcgtccttctcctttttgaaattgtattttgatttatcctttgctctcacgcatgcaaaacatccaattaccattaataatgagataagtgaaatcatcattcctgcagtctttccctttattcctgtctgtggtgtgtcaggtacttccggtattctttcatcaaccactgtaagcttctgaagctttcctgtgtcccttatcctgattttcttatcctttgcaaccttgtaatgctttggtgcgcttacttccttaaaggtatatgtttctcctgcctttagaattccttcaatgagttcagaattcttgccggttgtaaattcataaacctttctgcccttgctgtcatacaccttgtactttgcaccgctaagctgcttctttgtgtctgatgcagtcttgttaaactgaacctttattgtgtcatcagtcatgtttaccttctgaaccttgccgtcatctgcaacggtaaactcaacactttctgctgttgcataaccgtctcttggctgtttttcagttaaaatgtatgtctttccaacggcatatttaccttcaatcacgtggctttcttccgttgaaacccattcgtccattacaactcctgtgtccttatcagttacctgcatgcgacatcctgaaagttcccttccgtttgtaatgtccttctttgaaaattcaacctttgttgtgtcatcatacattgccacctgattatcaatattttccttgaagctgtctccactcttaacataaacctttgtcctacaattattgctaccactttcaacaagcttgaatgtaatggcatctgcagttacaaatccatctgcaggtcttgtttcagccaatgtgtattccttatccttaagaagtccattgatttttaatgcataatcgttgtctttttcgacatgaacgttggaatatcccatttccttaagattttcatttaacttaactgatgaaatgtcacctgaaacccagcttatgatttcattgcccttgtcatcatttatccttaaatgacagtccttgatttccactgatgatgcaatcattctcttgctgattactgtttcagtctggtcttccttaaccattacccttgctgaaactgttgttgtttcctgattcttgtattcaaggtgaacttcgtgcatttccctgtcaatgtaatagctgccacttacactctcctctaggaaatagtaattacctgaatttaatgcctcattaatgagttttccctgctcattaaccttgccataaccttcatccattaccggcacattaaatggtatctttgccacaccattttcatctgttgtgactgtagtgattttttcgcctgcatttacaatcacgtttccctttcggtcataaatgttgtctcttgaataaaatccaaacactgcatcagcaacaggttctcctgttcttgaatcctgcttttcaagggtgatgtcagtctttacaagttcattgtaaacatcaagttttccttccttggaattttcagaaacatcaagaacatattcatcatccttgttattccacttaaagcttaagttccatgatgcctgtttcggaagaacgtaaccatactttgtctttacttcctttaatgtgtattcaccaagcggtacgtttaatgtcattgtgccatcatcatttactgtgtagttacaaataccgttacagtcatttgtaaactcagccttttcacctgttgtaattgttgccacaaccgaatccttattaaacagcacagttccctgattgtcctgtgacatgatgtctttttttgcagtaagctcaaatacaacaccgttaagctttacatcctcataatcaaaaggacgaatctt

SEQ ID NO: 12810 - DNA, 1123 bp, Unknown
  gut microbiota DNA sequence
ctttccatatgtcacgtcattgtaatactcgcactctgcataaaggtattcatttccaagctcatccttcattgtcttgtatgaattgctgtttattacaactgttacaggactcttgtttaccttgtatccttccggtccctcgatttcgtataccttgtatgttcctgccttaagtttctcataagtaatgatttctcctgtttcatctgttacaaatctgtcaacgaccaccattttgtttccattgctgtacttctgtgtcacaagtgtctcattgccatcttcctccaccttgtaaatctgatatgttgtgcctttctttaatactgtctgatgtgtttttgaatccttcttcacgatttttaagtatgccgtaaattcaggattgtttaataagtactgataagtcttaccgttttcagttacattcacataaaagtcaggacatttttcagtattgtctgctccaatggtctgatgtacaacatatgtaccatatggtaactgctttgacttggcataaccgtttaagtctgttgttaagatgtctctttcagttgcctttgccttgtcataagagcctgcacttgcaagataaatctgaaactgtgcacttttttcaaatggtacaatgcctgcagttccgttacccatgcccttgatgattgccacatcacccttgattggcttttctgaaacctgcttttcaactgaattgtattctgcagtgaacttggcaccgtcagctacaatgtcatacaccttgtcattcttaagatatccccttagtggtgtgatttcctttagataataagtctttccacatctcatgtagtctgtttcaaactggtaattcttgtctgttgtatatgacttaattaactttgtgcaggctgcatctgaatatacaccatacactgcaccttcaagtgttgcatcaccctgagcagtcttgcctgtttcttcatcaatctttacggctgttaattttaccttcttgtacttgtccttaagaacaggcttgtatgcaagcttatagttgctataagttccttctgctgtttcaggccacttgccatcactgtttcttgtccaggaatcagccttcttaagtgtaaca

SEQ ID NO: 12811 - DNA, 3140 bp, Unknown
  gut microbiota DNA sequence
ctatatttttttccctgatacttcttggagtcatatcctctacagtaatcctcaataacattcattataaacttagtgttcatatactctcttgcatgtacagatgtttcaacataaactgttttcttagcttttgcattaccaagtgtaacatagtataagtttcttttatctaaactttttcctgcaatgtcaactttaaatattgagccataagctttttccaactttttaaggtctctcttcatatcattatatgaatatttcttatctgctgcatttacaatcttcttggcattgcatttgtatgtaatgtactttgattcaactaataatttctgattgcctacctgaatcaatgaatatccattgttgcatttcttgtaaacataataacggatacctttttctacttttgttactttctctaactttaagttatatgctgtaactgttttctttacataaccacctttttttacgttttttcctgttgtgtcaacatccggcttagtagttggctgtaccgtagttggctgttcaacctttgtagtggtttcctgtggtgttgttacagcgggtgtagttgtttcaggtgctgtagttgtttcctgaggcgctgttgttaccggagctgttacttcttcggcctttacctcagtcaaattaattcccaatgcaatgataccaattagcattagaatttttaatgtttttttcataagttccttcctttcaacttttttctcccacatgtaggtattgtaccataaaatgacctttaaatgttctttattttgcttatatagccattgaatctaaaaaagacaaagtctccaaactgttgaaaactttgcctttcctattagaatatattacaaatgtagaactctatcttttatttcctgagttcttccctgattccagaactgtgttccaatatagccgcatgttcttcttgcaacactcatcttgtcctgattacgatttccgcaacttggacattcccatacaagttttccattcttttcatcagttactatttgtatttccccattgtatccacagcattcacaataatctgacttagtgttaagctctgcatacataatattgtcataaataaatttcataacctgaattacagcttcgatattatcctgaaggttaggaacttcaacataactgatagctccaccaggagataacttctgaaattcagattcgaatttaagcttgctaaaagcatcaatcttctctgttacatgaacatggtaactgttagtaatatagttcttgtctgttacaccttttataatgccaaatctcttctgaaggcatttagcaaacttgtaagttgttgattccataggtgttccataaacagaatagctaatattttctgctgctttccattctgcacatttatcattaagtttctgcatcacctttaaagcaaatggcttagcttcgggatctgtgtgtgactttcctgtcattcttacacacatttcgtaaagtcctgcgtaacctaatgagatagttgaatatccattgtataataacttgtctattgtttcacccttcttaagtcttgccaaagcaccattctgccaaagaataggggcaacatctgaaggtgttccaagtaatctttcatgtctgcatcttaaagctctgtgacaaagctctaatctttcatctaatatcttccagaatagatccatatctccattagaagaacatgccacatcaaccaagttgattgttacaacgccctgattaaatcgtccatagaacttgtagcttccgtcaggatttctctggctgtcttcaactgttaagaatgaacgacatcccatacatggatatacacatccgttcttcatttcacgcataaccttagctgaaatgtagtcaggaaccattctctttgctgtacatttagctgataaaactgttaaatcccaatatttagaatcaggtgtaacattatcttcatcaagtacatatataatcttagggaatgcaggtgtaatccaaacacctttttcattttttacaccctgtattctctgttttaaaacctcttcaattaatactgcaaggtcatctcttgtctgtccttcaggaacttcatccaaatacataaacattgtaacaaaaggtgcctgtccattacatgtcattaatgtaataagctggtactgaatagtctgaatacctcttgtgatttcatcacgaagtcttctttcaacaatcatcttaagctgttcgtctgagtagttaactcccacttcatcacgttccttcattacttccttagtaatcttgtcacggctaacctgtacaaaaggtgcaagatgtcctaatgaaaatgactgtccgccgtactggttacttgcaacctgtgccacaatctgagttgtaacgttacaagctgtataaaaactatgaggtggatcaatctttgtttctgaaatgcatgttccattctctaacatatcctttaagttaataaggtcacagttatgttccttctgtgcaaaatagtcagaatcatggaaatgaataatcccctgttcatgtgcctgcgtaatttcatcaggcaataaaatacgtctagttaaatccttgctaacctcacccgccatataatcacgctgagttgagttaatcgtaggattcttgtttgagttctcctgtttcacctcttcattgatctgatcaataagtgcgagtattccatcatcagttgtgttagcctttcttgccatatctctcttatatctgtaacgaacgtaaatctgcgcaacttcatatccacgcatctccataataccacgttctaccatatcctgaatatcttctactgctgtagcgtggtttgactgagaaatctgatccataacaatcttgccaacagcctcaatctggtactcattaagtctatgtatcggttctacttcgttattagcctttctgatggcattaagaatcttttgcacatcaaaacccacttcttcaccatttcttttaattactctacgtgttatcgtctccatcttgtttctcccacaatgtattatctttatatatctttattttttaaatgtactatatcttgtgttcacctaaag

SEQ ID NO: 12812 - DNA, 758 bp, Unknown
  gut microbiota DNA sequence
atattttttatttttcttattttcccataaataaaggctttttcagattaaatggtttacatattatctgcctaattttttttcaaaatttttaaatactccatttatcacaatcaatgagataactgctgccacaaaatctgctataggtgctgaaaacattatgccctctacaccttctaaacctatttttataaatataataggtaatattactaacaacggaagtaagaatataatctgccttgtaagtgacaaaaatgttcccttgttaggttctccaattacagtacagaatgttgatgtaattggctgtattccgtttaagaatgtcataaataagaatattctaaagaatttttccgcaaacataaaatattcattggaacctgaaccgaatattccgataatctgtcttggaaataactgaaaaatcaggaacgctatagtggacaccactgtattgcatgttactgctatcttatacgtcttctttacacggtcataattgcctgctcctgtgttaaaactcgctataggctgtattccctgggccacaccaatacatattgaaaaatataactggttaactttcataataatacctgcacaggcaattggaattgatgcaccataaattgacaatccaccgtaatactttaatgactggttcattacaatctgaacaatcatcatggcaagctgattaagtccctgcgccattcccaaatgtaatgttctaaaaacaaattctttgc

SEQ ID NO: 12813 - DNA, 763 bp, Unknown
  gut microbiota DNA sequence
ctgttttgtaatgacgcatataccacactaccatcataaaagacacaatctgtcctataacagttgcaagagctgctcctgacattccccatccaaatctcattacaaataaataatctaatataacattaataattgctcccacaaggttgcaatacattgaaaatttagggctgccgtctgctcttacaagatgtgagcctccattggctaccattacaaatgggaagccaaaagcaaccactcccacatactcttttgcgtaaggcaaaactgagtcaggtgaaccgaaaaacttgagcaaaggttccataaaaaaaagtgagattaatgctattaccacacctactccaaacattaccgtaagtgcatttccaataaaatacatagccttcttcttatttcctgcacccatattaaggttaaaccctgccgcaccaccaattcccagtgcaagcattgcggcaagacacatagttgttaggggaaatgctatatttgttgctgcattacctaactcaccaacagttcttcctataaagaattggtcaacaatattatataaagaagttacaagcattgatataatgcttggtattgcaaactttcttaaaagccttccaaccggctctgttcccaatggattaactttatctttttccatattgatttcctttcccaaattgcattttttggcaaagcgccagcgctattaataataccacttttacatatataatttccagtaaattaattaaattaa

SEQ ID NO: 12814 - DNA, 23803 bp, Unknown
  gut microbiota DNA sequence
aaatatttgttttataagattgttatttttttaacattctttttcttgtattgtattttctcctatgttataattattctgattgcaattcaatcacgctatagattaacaaaggagtaaaagatgagaggaatttattctaataaaacagaaatccgtcacaaggtatttactgaaattgcccgtatggcatatgatgacagtccattgtcacgaattgaagatttaccatatgaaattgttcccggagaaatcggaaaatattacgataatatctttttggaacgtgccatcgttggtgaacgtcttcgtacaacaatgggacttcctattagaaagatgtcagaacatgcacctctttctgaaggaattgatgccagcgcaattgacgagaaatactacgatcccccacttattaacattattaagtttgcatgccatgcatgtcctgagaaacgtgtttttattacaaacgcatgtcagggatgtttagagcatccttgtattgaggtttgtcctaaagatgcaattaagatggttaaaggccgttctgtaatcgaccaggacaaatgtataaagtgtggtaaatgtgccagtgcctgcccatacaatgcagttgtaaaacaggaacgtccatgtgccaaagcttgtggcatgaacgccattaagtcagacgaatatggtagagctgatattgattatgatcaatgtgtatcctgtggtatgtgtttagtaagttgtccttttagtgcaattgtagacaagagtcagatttatcagactgttcttgcattaaaaagtgaaacaccggtttatgctgccattgctccatcatttgtacgtcagtttggtgctgatgttacacctgaaatggttcgtgccgcattaaaagtattaggttttgaagatatggttgaagttgccattggtgctgacctttgttctttacaggaagctgaggactttcttgaaaatgttcctgccaatcagaaatggatgggaacttcatgttgtcctgcatggtcagttatggctaaaaagactttgcctgaatatgcccattatatttcaatgtcacttacacctatggttcttactgcaagaatgattaaaaaacaacatcctgaatgtaaggttgtatttatcggaccttgtgctgccaagaaattagaggcaagcagacgttcagtacgaagcgatgttgattttgtattaacttttgaagaaacaatgggattatttgatgccaaagctgttgactttaaatctcttgaagttgaagaaccacttcagacatcaagtgcacttggaaaaggatttgcttcaagtggtggtgttgcccaggctgttgttaaggttattaatgaaatgcgacctgatatggaagttaaaacagttaaggctgaaggtttggccgaatgtaaaaagatgcttatgatggccaaagccggaagatatgacggatatttattagaaggaatggcttgtcccggcggttgtgtaggtggtgccggcgtactttcagatgtacgaaagactgcaatggacttacaaaaagatatggcccgttcagaattaaaagatcctacagaaacacaatacaaagattacttagaattaataacatcggaggattagaaatgaaattaaaaactaaacatattacagttactgcagtcatgatagctttaagcattgttgtaatacaatttattaaagctcctcttatgattgccggacagaatgttgccatctcaggtgccctcattaatcttatactcataattgatacactttactgcggattagtaagtggagttatattatcagtaattatccctgtgttctcatttatattaacacagagtccacttatctcagcagttcctgttatacttccatgcatcatgattggaaacattgttttcgttctttttgcctggtttgtaagaaacaaaaaaatcgaacttaacttattaccattaagccttgttgttggctcaattgcaaaagccggaataatgacactacttattgtacagtgggcaatcccacagtttggtgcttcacttgctccaaaaatagttacaatggcaaaagttacatattctacaacacagttagttgctgcactttttggttcattccttgctattatcatttggccaatcgtaagagttgcagtaaaaggaataaaataagaatatttatgtaataaaacaaaaatgatgttagtttaattgctgacatcattttttatgtcttttaactacaggtatccttttccaaaatatacataattatatttccacttcaaattcaaaacggatttctcctgtcttttatttatatatcgccggaaaagggctgcatgcaaacacgttgcttttcttattttgctccgccgtctattgtaaagtgaaaacctaaactcgcctaaaggctcaaacagtaggtttatcgctttacactatgctcgcaaaatttcgaaaatctgcctattgtttgcaaagcagcccttttccggcaatactaaaccaaaataaaacaggagctacaaccaatgcaactcctgcgtttttatgccatatgaactatatttaataataatgtccatgccaaaccgtaatatgttactacggccaccaaatcgtttactgttgaaataagtggacctgaagcaactgccgggtctactttaatctttgtaaagaagataggaattattgttcctacaacacttgagattatcattgcaagccataacgctcctccgatacatcctgacattgcaaaggcatttactaccgtctgtccttttgcaagccatataaatagtcctgttatcataaatgaaatggaacctattatcattccgttaaagaatcctacttttagttccttaagaacaaaacctaactgttgccttaatgtaagttcctcatctgttaatactctgattgttacagccagtgactgtgttccaacgttacctgacattccaagtattactgactggaaacttactatgataggaagtgttgctataacgtgttcaaacattcctgttactgatgaaactccaagtcccagcattagtaatattacaagccatgggattctcttttttaaactttcaaccaaaggttcttccaaatcttcttctgatgccaaagcagccaacttagcgtagtcttcacccatctcttcatctactacttccaataagtcctgagatgtaataacaccaagtatgtgctggtccctgtcaagtacaggaattgaatcttctgagtagtccttcaaatcttcaatacagtcatctactgtttcatggtcgtatacaaaaggatatgatgttgtaaccaatgtttcaagtacaacatattctcttgccacaataaggtctgttaaatctattgctccgtaaaatttattttcactgtcaagtacatataatgttgatatattgtcattgtctgcagcctgttcaactacacgcttcattgcctgcttaattgtaaggttaagtgttaatgtaacatagttagttgtcatcttgctaccgatttcatcgtcatcatatgactgaatcaggtcaatgtctttttttgcttccttatccattaactggataagttcctcgctcttttcatcctccaattcatcaagaatatctactgcatcgtcagcttccatgttttcaagaatgtctgccgcaagttctgaatccaattcttcgataaattcttccggatcatctaaataagcgaaaacctctgaaactctttcaagtcccattatagagtaaagttttcttctttcctttacatctaacttctctaaaactgctgctatatcattctcatgataatcatccagttcttctttcttcttatacgcaggttcgtcgctttttataatctgtataatttcgtcttcataatcatccctttgtggatttatatcttttaattctttgtcatcgattttatcttccactgtcatatacctcctctgccattttgtgccattctaatgtgccctgtgtatatgcgggaaaactgatgtcagattcttattttgagagaaaaagcataatggatattttctctgttttcttcaaaatatctaacattacagcttcgcccccaactgtcagaactatccattatcttcacctccaaaatttaataattatttattagcacagaaaagacttatggtcttaaaccacaagtcttcctactatattcttcactattaaatttaacacttttttcatgattatgtcaacctaaccatgactttattatgtactttttttcaagaattaatcgttttttcttaaaaactcatcccatagtgcaaatccgaatcctaacactaaaaatacaattcccaatactgtacaaatagttaccatacttcccattgtttcatttcctccttctatttttctttttgatttttaactgtttttttcatgctttttccatatggttttttatgttttttacttttccacgaatttaacacttatgattttatttaacaatatgttttggcacaccttaacggcttattaatatcaggcgataagtttttaacatattattagcttctagggtttgttccttagcactatttttacatttataattattttcatttttctgttaaaaggttatactatttattagatttttaatttggagaaaagctatgaagttaattaagaacatattaaaaaaggattttgcaagaaacactattattacttttttgcttatgactgtggcaacaattatttcttttgtattattttatacgcctaatttttcgccatcagttattgcacctatatatattcttgtattaatacttattggcacatacaccacaggatatttgccgggaattattgcttccgtaattagcgttatatgtattaattttctttttacatatccttattttcagcttaattttacaataaccggctatcctcttacttttattgtgatgttgtcaatctctcttataataagtacctatatgacaagatttaagaaacagggcatagcacttgccgaaaaagagaagcttattgcagaaggtgaaaaggaaaaaatgcgtgccaacctgcttcgctctatttctcacgacctacgcactccccttacaagcataattggtgcctcttcttctcttaataacgatagtcttaacctgtcgaaagaggaacgtactcatcttatgcgtaacattactgaggatgcggcatggctgcttaatatggttgaaaatattttgtctgttacaaagattcaggacgacaacagaactctcaagaaaagttctgagcctttagaggaaattatgtctgattcagttcacagagttaaaagacgtattcctgacgcaaacattcaaataacattgcctgatgagtttgttttggttccaatggacgcgcttctaattgagcaggttattatcaatcttttagaaaatgccctaaagcattctcattccaagaagcctattgaactttatgccactattgagccaaaaactgttaccgtttatgtaaaggactatggcattggcattagtaatgataaaaaagatgagatatttaagtcttatacccgcagaaacaacagccctgacagggacaagggtatgggcattgggctttctatttgccagactattatagaagcccacaatggtgaaattcatgcagacacccatgatgaaggttctgtattttatttttcactgcctaaagaggattaatttttaattagttttacaatcaacttttttcaaaaaatttggaggattattatgaaagattacactattctacttattgaagatgaaaaaaatattgcagattttattgaaaagattctgcgttctaatgattataaagttgtaacagcttccaccggtggcgaggggctttcacttataaaatcaagatgtcctgacattattcttcttgaccttggacttcctgatatggacggtcttgatgtaatttcaagtgtgcgttcatggtctttatgtcccattattgttctttctgcaagaactactgataatgataaagtatcttccttagaccttggtgcagatgattacataactaagccctttagcaccaatgaactacttgcaagaataagaacttcattaagacatagcaaccgtgttgttactaacgattcagtaagtgaaaaaccttacgctgcccttggccttaaaatagattttatgaaaagaattattacaagggacggtgagcctattcatcttacccctgttgagtacaaaatcgttgcctacattgccaaaaactccggcaaggtaattacatactcctctattcttaaaaacgtttggggaccaaatatggacgaaaatgataataagattctgcgagttaacatggctaacattcgaagaaagattgagccaaatcctgcggaacctacttatattcttactgaactgggtgtgggatacagaatgctggaagattcttcactataaaaaaaatggttacgttctacgaaaatctgaacgtaaccatttttcttattctacagtctgaactttcatcatattagttgttcctgatgttccaagtggtacacctgaagtaattactacaatgtcaccctgatttactaacttgttctcttttgcaacttcaactgcgtaatcaaaaagttccaatacgtcttccttttctttaagaagtacaggagtcacaccccatgaaaggctaagctgtctgcaggttttctcatctgttgtacctgcaataaccatacaatcaggtctacagcttgaaatcattcgtgctgatcttcctgacttagtaactgtaaggatagccttagcttccaagtcataagctgttgtacatgtggcatggcaaacagcctgtgtaatatttctttctgtgtgaatattctggttgaaaaatctctgcttgtaattgatatccatctctgttctttcagctattctaaccatagtctgtaatgcgtcaattggatacttacctgccgctgtttctcccgaaagcataattgcacttgtgccatcataaatagcattggcaacatctgttgtctcagctcttgtaggtcttgggttattcatcattgagtcaagcatctgcgtagctgttataaccttcttgcctgcctgatatactttcttaataatcatcttctgaataattggaacttcttcttccggaagctctactcccatatcacctctggcaaccataatgccatcagcagcttcaataattgaatctatgttgagtattccttcactgttttcaatctttgcaataatgtgaatattttcgccaccgttttctttcaaaatagcacgaatctgttctacatcttctgcacatcttacaaatgatgctgcaatataatcaacatcctgctctataccaaaaataatgtctttcttgtcctgttcacttaaatattccatgttaatatgaatgtcaggaacattgacacctttcttatctgaaatctttccgtcgttctttactttacaaacaacgtcctgtccaactattttttcaacttccatcttaataagaccatcatctattaaaataactgaacccggctctacgtccttatacaaatcaggatatgttatgtttacacggttttcgtcaccaatgattttttcacctccaaccaatgtaaatgtctgacctgaaaaaacgtgaaccttaccattttcaaagttacctgttctgatttcaggtccctttgtatccaacaatatggctaccggcttgttacacttttctcttaattccttaactttgttcattcttcccaaatgctcttcgtgagaaccgtgagagaaattacatcttgctacatttaaaccattcttaattaattcttctaatacattgtccttatctgttgcaggacctaatgtacaaacaattttagtttttctcatatctgcctttacctcttgtcttttttctttttataatataacaatgaacctatatttatacaagttaaaaatatgtaaaaaaaatgctgtggattttattaattttcactttttcttttaatgtattaaaatcctttattaaaattcacaaaattttaaacttttttccctatacattttctatttattggagtattatgattctgtaatgtgaaaatatagcattaataaactttaaaaagatatattttatttggaaaggcatattttaatggatattaatttaaattatagggatgaatttattgaattagtaacaccgattattgagaatgaaaaagtaaaacgaatggataaatacatacagcatggtactacaagcacattagagcattgcatttccgtggcttacgttagcttttcgattgcaaagaagtttcacattaattgcgattacaatagcttaatacgtggtgctttattgcatgactattttctttatgattggcatgtaagtgatgaatctcacaaatggcacggtttcagtcatgcaagaatggcacttttaaacgcctcccgtgattttgagcttacacctattgaaaaagatattatagaaaagcatatgtttccacttaacattagattacctaaatacaaagaaagctatcttgtaacaatcgctgacaagatttgttcttcatatgaaacaatatataaagttccgtatgttgcaatttataattaggatacaatttaattagatttaaaaagtcatatggattcaagttgaatctgtatggctttttgttttgtttggtgtaatctttgtggaattttaagatattttgtggtacgcagcccaaaatttcaacgacaagcatcacatcaattagaaaattgcaacagtagtcattacccgctaaatctcttccagcaccttaaatattttatccaaactatctatttcatattcaggctttatctctgtcatattctcgcttcttttcggattgtaccagcaagtatgaattcctgcattaattccacctagaatatctgaacttaaactatccccaataataatcattccttcaatattaggattattcatcttttcaaaacaaccattgaaaaattctactttaggcttgttatatccaattctctgagaaataaaaatatcttcaaaatattttgagatatcagcaccggcaattcttttgtcctgaactgatgctgtgccgttagatacaataaacaatcgatatttgttctttagttttctcaaaacatcaattgttccatcaattatgaagtaactgttgcttaagttgttttcataaagttgccatgccttatctcctgactggttaactcctaactctttaaaaagaatctggaatctgcctgtcaaaacctgctctcttgtaatctttccaagctccaacagcttccattgggcgtcatttatttcactatatctttcaataattgatgacaacggttctatgcctagctcttccaatgttttcttcaaagcaaaagcctctgacttgtgaaaatccaatattgtatcatctaaatccaaaagtactgtatctatcatttattctccttattctacacaaaactaaaatacagaatcactaatatgccaagcactattctgtaccatccaaaaatctggaagtcatgctttttaatatatcccataaggaactttattacaagaattgaaacaagaaatgccacaactgttccaatcaccaaaaccgtaagttctgttgcagaaaataccagtccgaattttattatcttaagaaagcttaatccaaacattaccggcactgcaaggaaaaacgtaaattctgctgctgccactcttgaaacgccaatcaataatgcacctataatagttgagcctgaacgtgaagttcccggtataattgacaaaatctgaaacagtccgataataaatgcagtcttatatgtaatgtcatttaaagttaaaactttaggtgttcttgttttattccatctttcgattacgataaaagcaataccatatacaattaatgtaatggcaatcacaataggtgtgtgaagatgtgcctcaataaaatcatcaaacaaaatagttacaacagctcccggaatgcaagcaacaactaccttaaaccacatagaaaagatatccttttcaataaccggcttacttttgtccttaaactgaaacgggaacattttattccaaaacaaaacaacaaccgctagaattgcccccaactgaataaccacaaaaaacatctctttaaagtcagcacttacattcatcttaataaactcgtcaaccaaaagcatatgccctgtactactaattggaagccattcagttatcccttcaacaattcctaaaaaaataaccttaataatctcaataaaatccaacatgctctatcctctcttataattcaaatattaggaaaacataattttccttttttactgcaactaataatagcatatataatctattatgaaaataaaattttgcctattacttttaatttataatttcgttagctttttttaagcaaaccttaatatttaattaaattgcaaatagttctcccttgtattatatataaaagacaccattcattagtcattcatagttcttttactttcgcttggaatcaccagagataggctgcctaacaaacaataggcagatttttgaaattttgcgagtatagtgtaaggcgtaaaacctactgtctgagccataggcgagtttaggtttccgccttacaatagacgacggagcaaaataagaaaatcaatgtgtttgcaggcagtctatctctggtgagttcctgaaaatacaaaaagggaagtcactaactgaatggtggcttcccttttaaatactaattatattttcctataaattctctagttcttgcattctgtgaattaaatacctgctcaggtgttccatcctcaacgattactccattttccatgaagattattcgattggatacttccttggcaaatgacatttcgtgggtaactattaccattgtcatatgttcacttgcaagttcttttatgacttttagtacttcctttgtaagttcaggatctaatgctgatgttggttcatcgaaaaatagtatatccggattcattgccaatgctcttgcaatggaaactcgctgctgctgtccacctgacagttcgcatgggtaagcatctttcttgttggctattcccattttttcaagaagtcggttagctgtttcttccacttccttcttgtctcttttttgaacatttaaaggagcatctgtaatgtttttccaaactgaatagtgtggaaaaaggttaaagttctgaaataccaatccgtatgttgatttcaattccttaagctgagacttaggtgcatatgttactatgccattctcgtttgtgtcagccattaatttgtcattgtattcaatctttccacctgaaattttttcaaggtttactgcacatcttaataaagtagacttacctgaacctgacggtccgataatcgaaagaacatctcccttatttacttcaagggaaatatcttttaacacttcaaattcgccaaaacttttttggatgtgtttcatttctaatacactcatgtttcttctccctatctgtaataacttaatttcttttcaattaatcccataatccaagctaccaaagcattaaatacaaagtaaaatactccggcaacaaagaatggtgtcaaacttgatgttgatgaagctatctgttttgcaatactgaacatttccatataagctattgaaaatgcaagtgatgtatcttttacaagacaaattacttcattagtaattgatggcaatattctcttaattacctgtggtaatataatcttcataaaagtctgtgccttgttgtatccgagcatatttgctgcttcgtactgtcctcttggcattgactcaatacctgaacggtatatttcagcaaagtatgctgcgtagttaagcacaaatgaaattattaccgcataaaatctgtaatctcttgaaatctgtatttttaataaatagcttggtccaaaatatattgccataacctgtaacataagaggtgttcctctcattattgatatgtagatgttaaccaaccattttactattttaattctggacattcgtccccatgccacaacaagaccaaatggtaatgagaaaagcagtgttaaaacaaatatctttactgtttctatcatacctaatgatatcttctctaacatcatattcatcggcattgtagtagcaactatcataaatcctgttcctatagtcatttttatttatctccaagacaaatcatatcttctattccgtattttttagctaattcatcaactttaccttcatcataaagtttctttaaatcagcattaactttatctctaagttctgtatttccttttttgaagccaattccatactgttctgaattaaggttttcatcaagaataacataattgttatttctgttgttaacctgatattttgcaacacctacatccattgctacagcatcaactgtacctgcttctaattctgagaaagctgtgttgtaatcaggaaattcctgaatctctttaaatgtctttccaagcttctcctgatctccacctttctgtagtaactgaagggctgcacttgctgactgagctgcaacatacttatcctttaaatctgctaacttagtaattcctgaatcctttgctacaactacaacctgctgattgtttacatatggatctgaccattcatacttatcttccttaccgttaatagtaaatccattccaaatacaatcaatgtttccattatttaattcagcatctttagaagcccattcaataggtgtctttactaattcccaaccttccatgtcacaaacagcctgtgccaattcaaggtcaaatcctgtatattcacctgtatctgaatccatatatccatatggtggatattctgcatcaaaacctactgtaaatttcttttttgaagaatcgctatcgctcttctttgtttctttatttccacaagctgaaagtgataaaaccatagctaatgaaagaactaaaactaataattttttcattttattttcctcctggattttcgttctctaatactttactaaactaaagtttactaacaaatgctatcaaatgtaccgtaaaaagtcaagcaatattcatcattttctatcatttttttatattgtagaaatccgaagcacaaaacagtccaaataatcatgttatgctttaaaattatatttttatttacatatattttttgctcaaaaaagcaaaaatttaaagctgccactgtaccgaatttctcagcatagtgacagcttcatcgccataaaatggctttatataatgtggaccaaaagacgggaatctgtggacaaatggtccaacattttaacatatttaattattagaattaattaatttcttaatggcatatgccacaccgttttcatcgttacttaaagttatgaaatctccaagcttttttatttcatctctggcattatccataactactgaaacccctgcattttttaaaatatctacatcattaaggttgtcacctattgccatagtttcttctatagaaatgcctaaatattctgccaaagccataagtcctttagcctttgtagttcccttaacattaaattccaaattagtaccttccgaatatgaaaggtcataatttatatctttaatcttctcaactacttcatctcttatttcagcagttggaaagaaaatattaaccttggcaaccggcttatctcttgaagcaatatactcaccaatgttctcaacaggcactctggtcttctttataagctcatctatgtgataaacattgtatctcttagtatcttctatacatcttctctctgaataaattacaccatcagcctgcaactcaaacatcatatccatgtctatagcctttactgtatcatatatatatctaacatcactcatatccaacaaatctgaatagagcattttattattttcaaaatcaattacatatgcgccattgcacattattccatatttaacatatggcattttcgaggacacctcttctaactcgttatctattcttcctgtagaaaaagtaaactttatacctctttcttcatattctttaactgtctttttattttcttctgacaaattcttgttgctgtctaacaaagttccatctatatccatagctactaatttaatcataaaatcctcctaaatttgctcaaaagaaaattctacttcatattagaaatagcttctattaactgttctactgccaactcttcatcttcgccttcggcttcaacaactacggtatcatcacatcgtactgccaacccaagtacacgcaaaacattcttcatatcaatgccattgcttcctttataaagttttatgtcagacttataacttcttgcctgattaaccaaaacaatagctggagttgcatgtatcccctgtttcgccttaactgttatttcctgtctcttcatttctatacctcccattattatcaaaacacaactttaagttctgataatctgtctgttaaatttcattcctgtttagtatagattttttaactgtttgtgtaaagtaatattccggtaacattttaccgccaccggaatattatacactgagcacatatatttaatactattttgatattaaacattaaatttctgattacttatttaaataatctttgatattgttataaattcctttagcatctaaaccatgtttttcaagtaattcttcagctaatgctgattcaccgaatacatcctgaacaccaattttatgtacaggtgcaagattttcttcgcttacaacatctgcaacagcacttccaagtccgcctattacagaatgttcttcaactgtaacaatctttcctgtttccttagctgctttaattaccaaatccttgtctaatggcttgattgtatgcatgttaataactcttgcattaataccatccttagctaacatctcagctgcctgtaaactctctgacactaagattccgttagcgataattgttaaatccttaccatcttttaaagtaacaccttttccaatttcaaatttgtagtcaggattatcattaattacaggaactgctactctaccgaatctcatatatacaggtcctttatattcataagctgcttttactgctgctcttgcttcaacatcatcacttggacaaataacaaccattcccggaatagttctcattaatgcaaaatcttcgttacactgatgtgtagcaccatcctgtcctactgaaataccaccgtgtgtagcaccaacttttacatttaagtgaggataaccaactgagtttctaagttggtcaaacgctctacctgctgtaaacattgcaaatgatgatacaaaaggtacgattcctgttgttgaaatacctgctgccatgccaaccatattggcttcagctataccacattcaatatgtctgtcagggaaaacatctctaaaaattgttgtctttgtagctccaccaaggtcagcttcaaaaacaagtaagtcatcatgttcttttcccaattctactaatgcgttaccataactcattctagttgcaatcttctttacttctgacataatgcttcacctgccttttctaattcttccattgcctgtttgtactgctcatcattaggtgcagctccatgccatgaaacattattttccataaatgaaacgcctttaccttttacagtcttagcaatgattactgttggctgtcccttaacggtttttgcttcgttaaaagctttttcaagtgaatcaaaatcatgtccgtctgctttgataacatgacatccaaatgattcgaatttttcatctaatggatttggtccaatgatttcatcaattgttccatcaagctgtaatccattattatcaacgataacacaaagattgtctaactttctgtgtgaagcaaacataagagcttcccaaacctgtccttcgtcaatctctccgtcacctactaatgtgtatactctgtaatctttattcttaagctttccgcctaaagccattccaactgctgctgaaataccctgtcctaaagatcctgttgacatatcaagaccaggtgttttcttaatatcaggatgcccctgaagaattgtacccatctttctgtatgtcataagaatatcttttgaaaaatatcctttttctgctaatactgcataaagtgcaggaactgtatgtccctttgataaaacgaatctgtctctgtcaggattcttttcatccttaggatctacgttcatttcattaaaatataagtatgtaaaaatatctgttgctgataatgctccacccggatgtcctgactttgcattatgaatcattgatattgtttcttttcgaatgttattagcaattttctctaattctaatttattcataacaatgctacctttctaaataattatatattattctccaaatactgccttgtaatcagcctggaatttagcaattccctgatctgttaatggatgttttgtcatctgttcaattaccttgtaaggtactgttgcaatatctgctcctgccaatgcacagtctgtaacatggattgggttacgtactgatgctgcaatgatttctgtatcatatccgtagatgtcaaagatttctgaaatatttctgattaagtcgattccaggtgtattaatgtcatctaatcttccaaggaatggtgatacatatgctgctcctgcatttgctgcaagtattgcctgatttgctgagaaaattaatgttacgtttaccggtattccttctgatgaaagtacctttgttgcttttaatccttccactgtcattggaatctttactaccatgtttggatggatttttgcgatttcacgtccttcggcaatcataccttctgcatcaacagttgtagcttttacttctccactgatcggtccgtctacaattgtagtaatttctttgattacctcattgaaatctcttccttcttttgcaattaatgatgggtttgttgttacaccacaaattactcccatatcatttgcttttctaatatcttctacatttgctgtatcaataaaaaacttcatatcattgcctcctaaacctttatttctattttgttacatttcctgtttgttttcgatgttaataaattttaaaagttttttcttttgtatattataacttttacatttgtattttaatttctttagtcttctatttgttatctttcgtatactttaatttgtcttatgtatacttttattctctcttgtgttttttatctaagaaatttacttttttgcttattacgtttcctttctaccggatgctgacgtttggcattcaattgactggagcttagaacccttgcgacagcatccaaaagaaagagatcaaatctaaaatgactttattttttgtttttactgtgcttcgtcaaaagccttctttaacttttcttcaagttcaggcattgacataatattctctaaaagaactaccttagggaatgagtgagtaaagttttcaaggtcgccacctacaacaaacaaatctgctgcgttagctgatgcatctgataaagatgaatgcataacttcaactccgctaattcctaatttttttaatgccttttctacattaagtctaatcattaatgatgatccaagtcctgaaccacaacaacacattatttttttgattcccatgataaacatctccttttataaaaaattttattgttattaagttttatcccctgctaaaagttgcaggggataatttttatttagttttcaaatattaaattgtcaataattattattcagcttttgctgcaggtttctttgcaacaaagttgtaaataattgggattaagaataagattacacaaacaattaataataagttacctgttgtaaatcttgcaatgtttcctaaaataatacctacaccacagaagtcagcatctgagaatgttgttcctgcgtaatgtaaagcaccaagtaccggcatacagaatactggtaagaatgtgattaataaaccgtggaagaaagcacctacgatacatccttttaaaccaccttcagcatttgcaaatacaccggctgtagcaccacagaagaagtgaggtacaacacctggaagaataattggaactgctgcaagagctgcacccttaataccaaataagatgaacataccaacgataccacctacgaatgatacaaggaaaccaataagtactgcgtttggtgcgtatgggaatactaccggacagtcgatagctggttttgcgtttggaaccaacttgtcagcgatacccttaaatgctggtacgatttctgctaagatcatacgtacaccagaaaggatgatgtaaataccacctgcgaagttcatacctgttacaagtgcatatgtaaaccagttagtataaccacctgatacatagttagtgtcaaggtcagcgaatcctgacttagttgaagcaacacctgttacaataaggaaaagaaccatcattgtaattgagattgctactgtattatctctcatgaaagatactctctgtgggaagttaatatcctctgttgacttaactgttcttccttcttttctagcctttgatgatgttaatttaccaacctgagctgcgaaccagtaaccaattgtactgaagtgaccaaatccgatatcttctgtacctgtgatttttgtcatagtcttctgagcgattgctgggaataatgccataactaatcctaagattaatgaaccaccaattacaagtggagcacctgtaagtccgcctacactaagtactacggcaataagacaagccatatataatgtatggtgacctgttaagaagatgtaattccatctactgaaacgagccattacaatgtttgctaacataccgaagcacataataagtgctgttggtccggcatactcaacaagacctgctgtaacgattgcttcgttgtttggtacaaccccttgtacattaaatgcaaagttaaataatgtaccaaaatcatttaatgatcctgtctgcaagaatgatgaacctgctgataatactaagaatcctacgattgttttaattgttccttttactacatcttcgactggtttcttctgtaaacataaaccaatcaatgccatcaaaccaactaagatagatggtgttgacaataactcctgaataactttcaaaactgccatttcaaaattcctcctttttttacttttgttgttctagctgttttcctgagcttttctgtcaaattctaataagtactcatatacatcttcagctgtctctgcctggattaattcctttaacgcttcctcatccataaaaagctgagccaatgtctgaattactgacatatgagattctgagtccgtagcggctaacgctaccagcaaacgaactggttttccgtcttctgaaaacttgattggttttctaagtacagttactgccagctgttttttcagcactcccgtttcaggtctcccatggattaatgcaacatcatcagttaatacataatatggccccatctcatttgtgatgtcgatgataccctttgcataatctggcgttacataaccctgttcctctagggaacgtaggctgacggtaatcgcttctttccagtcgtcaacatgatcaagaatttgaacattctctttttttaacatgtcaagaatcatccgtgaacctccttatcaatttgtaaatccataataacacttacttttgcaaaaaagaagtccaaccttttgcacattttttgtgcaaagtgttggactattttttgtatcgttttttattttattagtaattttaacgaatccagtatttcatcagggttttcagccatttccagtttttcaacgtttttttcaactgaaaagacacccattatatctttcaatactctaagatgtttttcctggtcttttgcagacataacaatgataatcttggctttatggaagttagaaaactgtaccggttccttaaacacacctattgaaacacctaaatcatttacattgtctttaggctgactgtgtgcaagaacaacatctttggtgatgaacatatatggtccataatatcttaaactgtcaattatgctttcaatatactgttcattaattgtacctctttcctctaacggttttgcagatttcctgagagcttcctcccatctgcattttttattttcaacaaaaaccaaatcctttgacaataaatcaagaagacctttctttttcttgtcaagatatacagtcattctctgatttctgctttcaaagtatttctgcaattcattgtataagtcatctcttttgtcattgtcaacaaacttctttatagtctggaacaattcatctacatcaacattaccctgtaagtttttaaatactgaatgatttaaaataagcttcttatcaaaatcagtaagtataggatgtacaactatcacaggaaccaagcagttaatcttgtgagttgaaataactacatcacaaatgttatgtacgttaattgcttccttgttggatactactcccacaatgtctacctgtggaagcatctttaaaagctcatgttttatcatgtttcctgatgatataccgttagtacatactataagaactcttattttctcattttgttcctcttccttctgaagatgagcgccaaaatgaagtgcaagatatgcaacttctccctccggaaccggaagacctatctgctgctctaaatagtgacacactatcttagttaaatcaaataattccgaatactctcttacaacatcctcaagcataggatttcctacctgaataccatattggaacctatacattgatgtattaaggtgataatataatgctttttcaaggtcatccttatcttcaaatttaacacatgctaccttttcaaattcagcaacaagagcctttgataattcgtaattagattccttagaatagttgttaaatacatccattgtattcattgaaactctcgaacctaataaatgaagacataagtatattttttctttctctattaaattcgggaactcctcttcaataagcctgtattcctgagaattttcaagttcttctttctttaagtcagggaaatataatccttcattgcctttttccattaacggaataagcattgcaatggatcttaatgttccctcaacatagcttgtatttaatttagtttcaattttctgtaatttttttaagttttcttctacactgttatctttcaaatatgaaaaagtttcgctttcgtacactggtttcaacatattaatgtatagcataaacaatgctcttattcttatgctgtccccatcaataaaatatccctgcttggatttataacctaatgttaagtcaaaatcctgtaactgcttaacaactactctaatatcattgaaaatagtatttctacttacctgaagatattccgctaattgttcaacatttactgcttccttagattttataatatagcaaattataaaatatattctttccattggtgaaaagatatattcttcttttgcgcctcccttttccattacctgttcaatttgttgtttttcttctcctgttagtttaattcccttgccacgaacaacagtgatttcatttattccctgaacacttaaccaatcattaattttgcataattcataataaatgcttctttttgatagtttgaattcttctgaaatctgtggtaacgaaacgtaagtatcacttgccataatcatatataatatcttcttacatctagtacttatatatgcctctgtcattacctgaactcccttttcttattttaaaagttctaactaacttttatatattttaattaaaatgcaaaacaccaaaatcttgattacgctgattactctgcgcttcacaattttaatttttttcgtatatatttacttactttcttcatctaacataggcgcatctacacattcaggattcttcaccttacctgttgcccatgcacttcccacatcacatctgccgtgatgctttaactttcgtatttcaccatcgttaccatcttctgcaacattcaaattaattctggctgttgtagctgatgcttcatctagcatcttaataatattttcaatgtctttttcgcttgctgccataatacacctactttccaaaatattctgcaacctttttaaggtcttctattattgataaatgctgtggacatgccttctcacactgtccacatgcaacacaatcacttgcctttccaaatatatgagttaatctgtcataatactcaccctgtggagtccatcctttttctttaacttcttgcaaatccgcattaaataatgaaaaatatttaggaattgcaatcttcatcgggcatccttccgtgcaatatgaacagcctgtacaaggtatggcaatattactattaatcacatctacagccttcataataatatcttgttcttcattattaagtggcttaaaatctttcatataactcatattgtccattaactgttccatattactcattccacttagtaccatcttcacattttcatgacttgctgcaaatctaattgcccaagatggaattgatgcttcactgttgtactctttaaacatcttttccacattatcaggtacttttgccaaagttccaccctttacaggttccataacaataacaggcttattgtgtttttttgctacttcataacattttcttgactgaatcccttcgctatcccaatccaaataattaatctgaagctgaacaaattccatttcaggatgctctgttaacactttatcaagtaactgggcattgtcatggaaagaaaatcccacatgttttacaagacctttttccttcttatccataatccagttaaaacaatcaaggtcattatatattttatagtgatcctgacctatatcatgtaacagataataatcaaaaaattctacacctgtcttttctaactgcttattaaataccgcatctctgtcttcttttgtcttaatgaaacctgcgtgaagctttgttgctaatgtataactatctctaggatatcttttaaccaaaacctcttttgttgcattttcactggcaaatccacaatacatccatgctgtatcgaaatatgtaaatccatttttaataaaggcatctaccatcttcttagtaagctcaatatcaatgctagctccatcattttcgtctaacaatggtaaacgcataagtccaaaaccaagtttcttatttccaaaagataattcactcataacatacctccaaaaaatatagccttatttatttttaattcgaatcataacacataagttcaattttacaacttttaataaataaaatcaactttcttgtattgctccttacctatatgcctccttacctatatgtttctaaaagaataaggagca

SEQ ID NO: 12815 - DNA, 54336 bp, Unknown
  gut microbiota DNA sequence
tattattctgcctttgaaaatgcaagataagctgctccaataagtcctgagtcttcgtttaatgtagattttcttacctttacatatggcttcattatttcgtaaactctttcttttgcaagagcttcaacttcttctacaaagtcatctatctttaatgctacggagccgcctaaaattactatttcaggatctgcgtatccgtaaactacaccgataaagtttgcaagatattcttttgcatcatccattatctgctttgcaacttcatttcctgcttttgcaaggtcatttacttctcctgcatgttttacatcaagtcctgccttaacagctcttgatgtaatggctgtaccactgcttattgcttcaattcctccgggaattattgagccatggcttggtccatctttcatcattacgcaattagctacttcgttaccaaaaccgtgtgcgccgtgatagatttctttatttattacaaatcctgcgccaagtcctgttgatacagtaaagaactgaacataattataatcctttccttcacctacaactgcttctgcaagacctgcaaggttagcatcattttcaagatatacaggcttgttaataagcttgcttaattcttctgcaactttaagattatgccactgtcccttaaggttaggcggtgttaaaatctttccgttaattaagtcaagtggacccgggcatgacattcctgcaccaacaatatcacagtcaaaactttttataacttctgcaattttgccaagtgttacatcaggattttcactgtctgttgcaaactgctttctctcgattatatttaattcttcgtcagctaacgccactcttgtatttgtgccaccaatatcaattgctactgagtacttcatgtttttcctcctatttagcttttacacaaattgttacaaacttgcaatgtgataattctttaacattaattgtattgttttctaccttaatttcttcagtcttttcttctcttaagttagtgtagtaagcttcttttacatcaaagttaaacttaattgtatcacttatgttttcatgattcttaccattaaaaagtctgataatatatccgtcattgtcttcagctttcttcattgcagaaacaacaagtttgttttctgtttcaaataatgaataacgtgattcttttgttccttcaatttcacgctgtgagaagattaatcttccgtttaagaattctgcataagtataaacttcaatgttagtattatatgcttttgccaatgtgtcaacgttagcttcgttaatgtctgaagcgtatgttgtaaatccgaaagcaaagtccatttcttttaatagttgagctgcaggtgtttcaataattctttcaccacttgcacggcccggacgataaataagattttccttacccataaatccataagtacggaataatgtaagtctaatcatatgatcatcaagaacttcgtattctcttacgccctgtggaattacagcaataccctgtttgccatctgttaatgaaacatatgactgtgtaggttcaatgctaataggtggttcctgccatgttgactggtcattagcccagttagcaagttcctgaactcctgctttcttttctgttttgttttccgcacttgccatgtaaagtttcatttccttttcatagtagtttggacgtttaattgaaccgaactgttcatcagcatagttaaatgatgaaacaatctggctgtcaaataatacacataaacggtgtgataaacctttgttatcaacatgtacgttaaaatcaataaccttagaatcttttctaagagctacagtcatagtaattggaagatttacacttaccttaccttctgcacgttcttctaagtcttttggtactaccatgttaaacttaattactgcctgatcataaatatcactaccacttacttcaacgctgcattctgatttattagaaaatacttctaaatcttttcttggtggtgaatagttaaagctgtcaccatcatctccgttttctacaagaacaccctggttcttataagtaacgttattttctttatctgttatagttaatgaaccgtcttcttcaacgttaattgcgtagaattcattttctaatgtattcttcttttctaagttcttagcgctattgccctttgtgtcaagtgtgtactgaacataaccaaatgctggtacatcgctagtcttaatagctattgtagcttcaagaaccttacttggaacatagaacttacgtgaaggatcaagtttaattgtctgtgataaaacataatctgttaaatctcttgattcaataactgtatagtctactttgttacccttttcatctaaaattgcaaaatttccacccggaatatatgtcttaacaacaactgtatcatttctcttctgaggtaaagtattaataagtgtaaatgtcatctctgcatcattctttacacttgttgcaataagacgtgaatgtaattcaactaagtttactgcaatatctcttgcctgcttatatcttacataaacatcttcattagctgtatctgaaatacatgaaccaattgaatcgtgagctgcattttcaaataataatttccagatttctcctactgcttcgtgaggataatcatttcctaaattgtatgataatgtaagaagtggttccattacgttagttacatagttctgaatctgtgtattcataacctttaagtctgaacgtgatgagaaaatagatttgtgaattctcatatgcttagcaataacaagttcaccacttacttcttctaattcaggattttcgctctttacgtctttaatataatcttcaatacaactgattacatattcattttcaggatctttttcgtttctttccttaataatttcaggaagatttgttctaattggagcctgatcaaatccgttagggaagtagatatgctttgtagcactacgtccgcctgctttttcgaaacattccttctgccaaaattcttcactctgctttggatcttcaggaatatttccaccaatataatatccgaaaggaatctgtgttgtgaatacaacgcttccgtcgtcacctctccaattatagtcagtgtgatttaccatatcatcacttacgcctctccagaataaagtatcatcaataccaaattccttgtaaatctgaggcatgttacctgactgtccaaatgaatcaggaacatatccaacattcatatatccgccaaaagtttcgcaacgcttcattccgtaatacatattacgaacaatgctttcacctgaaataactaactggtcagtctgtgtataccaaggtccgattactaacttcttttccttaactaattttgttattctgtctttatcctgtggcatccacttaatatagtcatcaagtaatgacccctgtgcgtcaaccataaaatatttaaaatcagggttgctttctaaagtatctaatacgtcctttaaatctttcataagataaactttagatcttgatgttgtaaaataccattctctgtcccaatgtgaatgaggtactacatgtacttttcttttcattacaatcctcctaatgtttttaaaaaaagcaggggcaacccggcccctgccctaatagttttgaaagttattatttaaaattgattttagtttttttaattacttgatgtcttcaaatgagatgtcaatttcgtctatatctacatcttctgaacctgcttcgctcttatcattgaaatctacgaaaagtgtagcaagaatagctataacgaatgcaccaactaagatacctacaatgtaagcccatccgtgtgttattgatacgaatccgtaaataccacctactggagggatatcacccttagcacctaagatagcgataactgctgtaccaattgctgcaccgaacatatttacaggaattaaaatctgtggcttaacaagtgtgaatggaatagcaccttctgtgattcctacaactcccatagcccagttactcttacctgtttctctaaattcatctgagaatctcttctttctgattactgttgcaatagcgtatgctaaaggtggcatacaaattgctgcgttgatgaatacgtttggctgataaattccttctgccattaatgcgtttcctgccatccaagctgacttgttgatagggccacccatatcactggcgatcattgcaccaaggataatagccattactaactgtgagctctggttctggcacattgaactaatccaatttactaaccatgtgttaattgctgcaagtggtgtagcaagaataacacccattattattgcaacaaaacctgttgctattaaaggacaaacaacaagtggcattactgaacccattgattctggaaggtgaatgtgcttcttagcccattttactgagtaaccagcgatgaaagctgcaattacagcacctaagaaacctgcgtaagtacttgatgcaactgcaccaccgatgaaaccagcacctatagccggcttatctgcaatactgtaagcgataaatcctgctaatacagtattaaccattccaatacctgtccaacctacgttttcaattaacttcatgatgtgccatacacctgttccatctgcatatggatctaatgaagtaataccaaagcataatgctataagttttggtatggcaactactaatgatgctccgataataagaggaagcatgtagccgataccagtcatcaaatgaccttttgcgtctttaaaaaattgtttcatgtctcttaatctccttttttatttagttatcttttgtattttttacatatatgaatatgtatttttcttttgtaattaaacattaattgtttaatttatcttttgtgtatttcagtaattttatcttttgtatttagtatttagttttatcttttgtatttagttttgtaaaaaatttgtctctagtattttttgattatcttttgtactttatctatctaaaaatactttttggctattatttgctaactgctgcaacacatttctttaatacagcttcaggtgccttaatgcagatattaatatctacacggataaccttcttgccttcgaaacgatccatgccaacaatcttctggtcagaagcgataattacgaaatcagctgcctgagcttcttcttttgtaatttcgttaatctgtcccatactaccctgctgttccatcttcacatcataacctaatgcttcaccagctttttctaaagccttagctgccattggtgtatgtgcaagtcctgctggacatgctgaaattcctacaattttcatattaattgtcctccttcataatttttaatatatattcctttagctctgccttatcagttgatgatttaaccttctccttaaattcatcttccaaaagactagttgccaattttgaaatcattaataagtgttcgttccctgcattttccattggtacaataagtgcaaataaatacttaactttagaatcatctaatgtttcccaatcaagttcgttcttacacttaacaaagaaaatagcaacttccttagcgtgagttgactttgcgtgaggtattgcaaattcatcctgtaagcctgtagaatactcttcttctctctttaagaaatctccaagtaaaccttccttgtcatcagtaatgccatattcaaaagccttgctgctgataaagtctaaagcttcttctttgttcttagcatcaatgtcaaaaaaaatataattttctttaatcattatttcctccaaataaatgttttatcttgctgtcttgcattaagtatacccacaacctgcttccgtttcaattcatccgatttccaacttaaaacggaaaaacatcaccttcactaccccaacttccgtttcaaaacggaaacccatttcacaccactgtcacacatttccgattcaaaatggaaacccattttccttcactatcccacatttccgattcgaaacggaaaaagatacatttgcgctttaaagccagatatcatatactattactagaaaaccaaactatactattaacaaaataatagtagaaacacaattgcaatatcccctgtataccacggaagttttgtggcaaacacgttgattctcctcgttttgctccgccgcctattgtaagacaaaaaacaaaactcgcctacggctcagacagttgttttttgccttacgctatgctcacaaaacttcgggaatctgcctattgtttgctcactaaaactttcgtggtatacaggtatgatttgtgatgaacaatactttcattaagaggaggcagaaatgtttcagtacagtcgtttagacgttatgtttaacagaatcagaataaacgaatatacatctgttaatgatttagaatccctacttggtataacggacagaactataagaaacgacatccaggagataaacaatgatcttgaaaagaacggagcaataattaaactaaagagaaatcacggttattatatttctattttggatgaagacaagtacaacaacttcataaaggaaatggatacaaaagaggataacgcttctcttcttgattcttcggaagacagaatcaaatccattctttattccttattgtccactaacgaatatgttacaatggatgatttggctgaatctgtatttatttcgaagaatactttaaataaatacattaaaacaattaaagagattattggtaaatatgatttggagtatattaccaaacttaatgccggcattaaaataatcggctctgaagattctaagagaaaatgtatattcgacaatgttttgtacactgattttgatcactacattacaggatttactaaagaggaacgaacaatatttaaagatattgatcttgatttacttaaagatataacaataaagcaattggacgaacattttgttaagacaagcgattttaacctgaaaaatataattattcatttagctcttatgactacaagagttcttggaaataattacataagcattcagaatattaacactgatgcttcaattatgggacttgttaacggtctttgccgtgaactggaagagcattacgatattgctatttccaaaggtgaaaagaactatatttatcttcagattgtggccaatacacaccttgaaataactgatattgacgatgaccatttgcgtacttccatattaaaggtccttgatgttatttatcaggattacaactttgatttaagaaatgacgaaatattaatcgctgacctttttagacatttaaagtctatttttacaagtaagctttatgacttaaacagtaccaaccctcttttggaaacaataaagactaactatcctttggaatacgaaattacattaactgcaatttccaaggttttcatatgtgaaccttacgttctaaaagaagaagatgttggatacgtgtcaatttatataggtgccgccattgaaagatgctattataagtcacctaaaaagaaaaatgttattcttgtatgcggaagcggtcacgccacaacgcgtatgttagaagcccgtttaaatgttgtttttccggacaagattaacattgttaaatgcgtttcatataatgaatattcaaactacaccaaagagaacgttaaagacatcgattttgttattacaactgttgttctaaaaagcaatctgctgccttcaattatggtagactttgcactgaacaataaagatgtggaatcaattaacagatatctttcaaaacttttgagaaaacgacttcaaatgtttgaccagttctttgataaggatttgttctttagatttaacgaacagctagacaaagaaacagttatcaagaagatgtgcaacaaacttcaggagaaaaattttgtaaacgaagattttcttcagtctgttcttaaaagagaaacaattggaaaaacaaatatgaatgatgtatttgcccttccgcatcctatggaaatgtgtgccaatgacacaaaagttgccgtggcattactgaaagatcctatagcatggaatgacagcaacaaaatacagatagtattcatgcttgttctaaaacatggagaacagaaagattttgaacatttgtatgatatattcatagaaataatcaacacaccaaaactacagcagaatattttgaaggctaagacatatgaagagttcttggatgtgctgtatgatggaataaagtaaaagataggactgccacaaatgggcagtcctaattttttataaattgttattttggcacttaccttttcagccttttatttttactatatttgaccacttactgtatacttttcttccattttttttatagtaaaaagttctcgccttaaactgatactttactccctttatcagtgttttccttgagcttgttattcctactgtgccttttttatttttgcttttctttaattttttcgttgtatttatctttctgaatttcttatattttccatgcccgtttctcatatatacttctatacctgagcttttatctgatataattccccaatatatctgccatttctttgacttcttttttatttttattttaggcctattgagtttatttgatttcgatttttttacattatttaaacttccctcaacatcatatgattggaatgtttcttcattcgtaaaattagctataatatgataatagtatttttgcccctgttcaacatcatcatctatcaaatatggagaatatgtcatacccattagtttataaaaaccatctttttcttttgctctataaacataataagattttactgttcctaaatccctccattccacttttaatcctgaattgtcagaagtattttctatttttttattagatttttctccaacacaaaaggcctatacactttaacaattaaactagttcttagctctttattatctttgtccagtgttacaacttctatcttataatcctttgcttttgaaaatatctcaattgggagtttacataatatatcccattgtctcttatacaatattattgagtcttctaattttccatctatatatatgtcacaatatctggtctcctcactattagaattaatcggcaatacaactgcagcctttctgctttcattttcataatataatctaatgccatttaaccaaagagtttctccatgtgaattttctgctttcatctcccagtcgccatatgaatatcttttttcgtaatcaggaggataacacccagactccccatagttatcttttataaaatattgattatactcattcgcccaactagtagtatttgatcttatatatgccaaatcacttactgccgcattacatttagtacttactcctaaagaaactataattgtacatatgattgtcacaatataaaaacctattttattatttataattctgtgtttagaaattgattctttaaatttcatttgttatccctccaataacacttttttactttagaaacattaattttatatgcataatttaattatacactattagcttgtttttggggaatattagatattattcttttatattaaaacaggctgccacataatgcgacagcctactatacttttaatctattttatttttcatcatatgtttcaaggaaatgatgtttaacgccatctttcttataagcaactactgtatttaagtttacattttctatgctcttaaatatgttgccttccacatatggattaacctttttaagttctcttataaggtcttttatttccattctctttgaacggttttcgttattgttgcaagttgtgcatgtgtctgtgaacttgcaggcgcactggatgaagtgaaggtcgttgtaatctctccaagcctttatgtcgtcctctctcacaagatataaaggtcttataagttccattccttcaaagtttgtgctgtgaagtttaggcatcattgtctgaacctgtgctccgtaaagcattcccattaatatagtttcgattacatcatcatagtgatgtcctaaggctattttgttacaacccatttctttggcaaaactatataaatgacctcttctcattcttgcacaaaggtagcaaggtgacttttcaacattaaatactgattcaaaaatatctgattcatatattgtaattggaatatttaatcttcttgcattttcttctataacctgtctgttggcagggctgtatcccgggtccattacaaggaatttaacctgaaaatcaaacttgttgtgaagctttaattcctgaaaaagttttgccataagcattgagtcttttccacctgaaatgcatactgcaatacagtctccttcttttacaagttcatattcattaattgccttagtaaatttgctccaaattttcttcttaaacttctttcttatactctgctcaacattcttggcgaaatcatctgcttccctatttttcatatcttcaagaagccaaccgatatagccaccttcaaggctgactgcatctaagccttttgcttttaagtcatctgctacgtctatgctgttttttcctctggcacaaactataacaagtttctttgaataatcaatcttatcattgttttcaatttcgtcaactgaaacctgaattgctcccggcattaccccatgggcaatttctgcatcacttctaatatctataagttcatatgtttctttatctaatttatttaattctttaactgaaatgctcattttttcttacactccgttttttaaaaattccctaactgtttaatatataacctttttctatttctgcttggctgccaaatctttaacaacttctccgccaattataagtccaactattgatggtacaaaagctacacttcccggaatatctcttctttccgtacatttgtgggtcgctcccggtgggcatatgcagtgatttttacagctacttgacatatcttcaattggtcttgttggctgttcctcagaatatactacttttaattttttaatgcctctcttctttaattcacgtctcattacttttgcaagaggacaaactttagtcttgtaaatatccgcaaccttaaactggcttccatcaagcttgttacctgcgcccatgctgcttataattggaatgttcttttcctgagctttcattacaagtgctatcttggcagttacagtgtctactgcgtctacaatgtaatcatattcatcccatgggaaatcatcagcgttttcaggtaagaaaaagcactcgtggattctaacatccgcattaggattaatgtctaaaattctatctttcataacctgtgtcttatattttccaacagtactccttgttgcaataatctgtctgtttaaattagtaagacaaaccttgtcatcatctattaaatcaaaggcttcaacgccacttcttacaagtgcttcacaaacatatccgcctacgccgcctatgccgaaaatggctactcttgactttgataacttttccattgcttcctttcctaaaagaagctctgttcttgaaaactgatttagcatattcttatatttctccttaacacttaaatggcggatgcactgcatccgccttgttttcctagtaattcaatgggtttaattatatattatttaatttgctttgtcaattactgcaaaataaagacttactgtaaaatacaggttttttctataaatatcctgttgtaaaggaaaagactacaccgttacgatgtagccttccttaaaaggcttagtatatatgtattcattctttgtagaaagaatttgcattaattattttactgtaatgattattctggcttctttcctgttataagttcttgcaatgatttctgccttacccttacgtaatgccttaaccattccatccttgctaaccttaataaccttcttgttctttgagataaatttaacgcttcctgcacttttatttgagagcttagtcttaagtttaaatgtatctccaaccttcattacagatggttttttcttaaatacaattgatttaggtgctttcttaactgtaaccttacatactgcagttattcccttttcaccataaattgtaattatagcttttcctttcttcttagccttaagctttccttttcttgttacagatactaccttcttattgctagatttaaatttaagcttgttgcttaatcctattgattttactctaagccttagtttttcttttttacccatcttaatcttcttattctttaagtcgatgtgtggtgttgtgctttcatctgctgcacttacattttcagttgattcctgttcctgattaaacgtgttagttgtagttccttctgttggcacctgagttgtcggtttagccgttgttggtgcctgagttgtcggtgcaactgttgttggcatctgaattgttgtttctacaggctttttaaccaatccattaattgcatcattaactaccttaactgcactgtccatttcttcctgagtagatgtattgcttaagctattggccttgtttaatgctgtttcaaccttattccagctatctgccgtatactcatttttatttaacgctgcaaccttattctgtacactcttaagttctgttttgtctactgcatatgtctcattgtcctcaagaataatatcatcgtagtatgccttaaagttactgtcgctaccattatacgaaataccaattcctacaatagtcttacctgccaggctttccttaggcatttcatatgaacagtctgtccatttacctactgtaactgtctgcttagcttttgccgtaatctttgatccatcacttaaaattaatactatattagtattagctccgcctttattttgtgcatatatagaatatgaaagctttaatcccttattcatattaatctttgtttctgaaatctgatacaaatagcttgcattgttctttgatgttataccatcaattgttgtcatgtaatcaccggttttggcaatttcatttctttcaatcttaacagttgcattaactccgtcgttgtttacctgcttatcatttttaaagcatgggtcaaccggataatatccaccgttaggatttttttctgaaggacattccacatacttactttcaaaactgtttctgtaataaattggtccttctgactgtggtaccggattttcctttactgcctctcttaatcccttaaccatcttatttgcttcaccgactactcttaactggaagtcctgtgaacaccaatatccgtcacaacttgctgttacaaaccactgatcctgtggaatatcaaagtagtcactggcattctttgcaatagctgtaccttcatcatattcatcaaacattgcaatgtagaatgatttaattcctaactgtttaagcttgtatgcctgataccagaaattctttcctgcatttcgtggcattgcattaggaacatcagtatctccaccatgccataatgcccatgagaagcctgagaataataccggataataatctacattattttcccgacaccactgccaatgcttttcaataaatgttttaaacaaaccatctattgctgattctgaactaatatttgatccaaccatccaaggtgaaatcatatcaacctgtttaaatattccttcatattttgacattgtagctgtgtttgtactccagtctcttcctgtaccaaatattacataacatcctctattatggaagaaattaatcatttcctgataatcttctactctgtcaggtctgcctgaaactgttgttccccaaagacaaacaacaggttttccatcaactgttgcataagcatctgaattagtcatctgaagctgtttttcaatattgtaaacccagtcaaatttaatatcattaacccatgaactaattgatgttgtgtcattagcatcttttatctgatctccaccactaatatcatacataatgtagaataagctgttattattttcagcagctttctgcatcttgtataataatgtgttctgtggttcatcatacaatgtacgtccttttattgttcctgcaaatctctgaattgcagcaccgtcaattccatactgactcatccatttaaaatgtgtattaattacattttcgttagttgaatcatataacttagttggttctccacttccaagattagcaaatcctgtctgtgcaagagcactttcgtcgtattcttttacatatgggaagtaatctattgatatgtgattctttcttggccagcttgtaccatcactatctgctgaaccataatcataatgtccccatcctgtatactgtgtacctgttccaaaccatgcctgatatcctgcaaaactttttcccgtaaactcagcatgttctgtttttccccttctgttagtaaccggttcaatatccggattaacagacttctttataatttctatctttgaaatatatgttcctgcgttgccatttccatatagtctaaagtcatactttccaaactgcccatgtctaaatgatgcatcacttatacatactgaagttgaagtccacttatttgttccaccacgtaaaacagatgctgtcttaaatttagttgcacttgtttctttatctgcgtcaaggtccgttatcgtattatattgcacaccataataagcatttgtattatcaaaataagttattctaatcattaagttattatcatcttttgtaactacattattttcaactgcaaagtgtgcatattcatactgaccaagttttatacatttatttccattgtattcaacaaagaattttttctggttagcattattaatacttaaatctacgcttagggccttacctgatggtgagtcgctgttaaagtcataccaagctactacttcattactttctttcacatcaactgctaccttttttgtcattccaaatgatacatcatcaacataaacacttccgcctttagatgtattaaatacaagcttcatatctgtaatgttattccaaatgtcagccggattgctttctgttgtattgccattctttaatgatgtcatatcaaaagtaactgtgctaaacttattgtctgaacttaatgttacagtatcgttatttacattctgtcctgattcaggaattactgtataagttttatcaccacttgtaatttttaaagcaacattttttgctgcttcatctttattattaattttaaagcttacatttttaaagttcccatagtcaattatctgacttccgtaagttacgattggtccaactgatgaagtacctgcaccattccatgttaacttgacagatgcttttccttctgatttgacatttgcatcgtaactatatgttccgttttctgctttccatgcaggtcttattccaagactctgatttgcagcatcaggattgtccttgtcatatacccacacatcctcgtcaccataaatccaatcaatagatgtaaaatatgtaatatcctttgttggattatatgttgtatctgttccggtaactgtctgtgttctaaatggtgcaattggaattcctgcactgttttttacattacagccataattaaagttgttaaatccgtagtttacgtttttaggattttcaaccctctcattatatactttaattacgttatttcctactatctctgcttttgcattaacgtaaattccatcacttccggctattgaaaatccatgtacagtatttcctcttccgtttataatagaaagtccttttcctacataatcaaatgtaagataaatagcattccctttaatctgcatggatttataaattggtgctgtataaacatcaccaccgccataaaccatattcatagctgccgtgcagaatctttctcctacaggttgtttagttctaggatgaattgctgctgatgaaacaccatccttaacatgaactaatggtaaatcataaatagttatcattgacatattattgtttttgttttcaacaaatgatctactcattgctgtagctaagtatcctaaatgttccatgtttttatttccctgatcatactgacccggggcaagctgtgtgaaaataaaaggcattgaattattttcaaatccaaatttttcactccatgttttctttaataaggttaactctttatcgtaaatttctgaacgtccactattactttcaccctgataccagattgcacctgctatcttaaagtttgtaagtggtccaaccttctgattgtaaagtgttgacattgttccggctgtatcagaccaaaactcttcatcataataaagtcctcttttttctaattcttttattaatgatgcatcaccttcaataccatctcttggaatccatccttcaataactgttccacctattggtgtatttaaaacacctacaggtacatttaattttgcctgcagattctttgcaaaagaatatgctactgctgacattttattaacagcatttacatcatttcctttaccccaatatgctccctcaacatcgtaattagggtttaatggttgcgctcctgtctgtcctgccggatatgttggttcaaggaaaaatcttaagttggaattgtttgcatttgcaagtatattctccctgtccatatccatatatactgttaatgccatatttgactgcccacatgcaagccatagttcaccaatcaaaatatccttaacagtttttattaaagttccgttatcatatacctgtaatgaatatgtgtcataacttcccttctgttgctgtaaattagctttccaatttccgtctgttcccaccgctacagtactttctgtcacagtctgaccctgtttgttaataagtttgacatttatgttatttccggccttacctgttccccatactgtaataggtttattttgttggaacatcattctatcactaaaaattgttggaacagtacactgattagtattatcaattaattttatattgtttattttgattttaatcttgtccgtaaatgttgtatgtacaaaataaattctcatataatttatctttgagtaatcaatttcccctgctccggcctctgcgttagaaatatttagtgtatatgtattctttccatttttccatggaagatttttcatattaaactgaaccatctgatctgtagcggaacctgcacttgataattcaataaactgttttccgttattgtataataattgtgatacatctcccggattagttaagttttctacttctatatccatctgtaattgcatcttttcaggattatgctttgatatgtctattggagtagtcatcttgcactcgtcacctacataagctgcagactctattgttttatccattgttaaaggaactgaccctacattataagtagtatcccatttttttacttcaggttcagttgctttttcagcttttcttgatgtgtcaactatacatacatctttaagtcttaatgactgatatccaatatcctttggtaatcttgtaagacatagtctaaaccatgtaatcttcgacggatcaaaatttgactttttagttcctactgaaaacggaataagtacatcattccattcacctgcaaccaaatcacttccatctgctctctttaaattcttcacaggaaggtttacataagaatctaaatccaactgtgcatcagctatttctaaaaagcttgccaaattcttatacgtaaagatttctaatggatttctttctccttctacctgttttacaaaaactttcatgcttaatgctaaattcttttcatcaacatttgaaacgtcaatatttaagtttcttgtgtatgtctgataagtaattgtgccatcagcattttcacttcttggtacctgtattttttcgtatattgtagacaaaacataattgtccataatattctttgtctctgcttttaccaaacaatcattgttcataagcaaagacattacaagtataaaaagcatggctgtcatcctgtatagccatattccccttttccttgtttttttcattttcttcctcctataaataacaacttactaacattcttattttagttgaatcgtttttagtttaaaaatacaaaatattgtatatacttataaattttctttataagaagaagttcttttataaaaaaaggggtttgggaagtctgatagatttatctgaatataaagaaataaaactctttataaaaacggtaccatatacaccgggatataataaattccgtttttccatttgtaatcctttgtatgaacaacatatttgttacatatacgattactaaacttgttgcaaaatacatcaagtgatttatgtgttctataattgccggatttcacctctaatggacatatcttatctttaaccgaagttaaaaaatcaatctcatacaaatgatttgaagttttacttttcatcgtgtaataaaataaattattaccttttgctattagcatctgtgccacaacattttcatagacatatcctaaatttacatccagtttatccgaaagtaacttattataaataatattctccgtatattttttatccttaaatgccaaagttataaatagacccacatcagaattaaacaatttatatcgtcctgcatccttttccaatgccattcccacgtcaggattattagcatgatatgcaatatttacagtgtacgaactgagcatatcaggaatcagctctcttaccttctcagagcgaaccccctctcttgcacttgacagaatatatcttgatgcattaccactaagattagcaggtatggcatcataaatatctccagcaagaccggttccatctatcttcacaaaatcttcttcatataagtctacaatttctcttttagtttcatcaaccaattgcaaattattcttctctatatacgtttctatggcctgtggcattccaccaacaagcatatacaatctgaatatccgcatcaggtttctatgcattgcattcccagcaggctttttgttctttataagatgccttattgtttccgctgatacctcatctcctattgcccataagaactcctcaaaatccataggaaacatagatattttatgttcttcgcttggaatcaaaatatcctttgtattcttttttattgataataaagagcctgtttcaatatacttatatcttccatccgcaacgagatatttaattgcctgcctagcctttggaaataactgaacttcatcaaaaataattaccgactctttctcatataacctgattcccattaactgctgcaattgcaaaaagaaaaaatccaaatcatacgtgtcatcaaataggtcaataattgccttacttgtatgagcaaagtcaatgagaatatatgatttaaactctttttttgcaaattcctctgcaatagttgatttaccgactcgtcttgccccctttatcaagagtgcgtatttatcgcttctgttctatttccactcatatatttcatcgtatatttttcttttaaaaactggtttatccatgcataaatccacctttccaccacaagtataacgcaaatccccattcatgtaagccaaaattatggtcaaatccccattaattttctcgcattttttacccatatcccctttcgttttcttaactattagattttagtctatttcttcattttcttattatgcacaggtaagttctttctaatcgttatatttaccagtataatgtgaaaatatgcactgttagtagtttggtgtaaatcataaaaaacaccccaggacaaagtcctgaggtgtaatatacttttctgaaacgccctgaagcgttcttgattgtaaaattgactatcgcttgctaaactgtggtgctctacgagctgctttaagacctggtttctttctttctttcattcttgaatctcttgttaagaatccagctttcttaagaattggtctgtaagcatctgaatccacctgaagtaatgctcttgagataccgtgtctgattgcaccagcctgtcctgtatatccaccaccgtgtactgtgatgattacatcaaacttatcaacagcatcgattgctgctaatggctgacgtacgataacctttaatgtttctaatccgaagtattcatcaatacttctcttattaattgttatatttcctttaccaggcattacatatactcttgcaatgctgctttttcttctacctgttccataatacttttctgtagccattgttatttcctcctctcagttaactaaaatgttaattcttctggtttctgagctgcgtgtggatgctctggtccagcataaacaaaaagtttcttaatcattgctcttcctaaaggtccctttggaagcatgcctttaactgcaagttcaataacactttcaggcttcttatcaagcttttcttttaatgtcatttccttcataccaccaacgtagtctgaatgacgatagtaaatcttctgttctaatttcttacctgttactgtgattttatctgcgtttgtaataattacatagtcacctgtgtcgatatgaggtgtgaactgtggtttgttctttcctcttaaaatcttagcaacttctgatgacaaacgacctaatgtatatcctgtagcgtcaactacataccattttctttcaatatctgatggactagccatatatgttttcattggtttacctcctgaaattttgcttttctaaaaaaatttatgtgttaaatgtccgtaccggggctttggctagggcataaaactatcgtgcataccttgtcacaataaatgattatacggtatttaatatttgctgtcaagagtcttttttcgtttatttaagctttctttatatccatttattaaagcttttataaaagttctttatttacgctttattatcatttatgaacaattatatatagcttactcactatactttattttcatctatgaatattttgtacaacttattcactatactctattccaactagtgtaagaccacacgccggagctttagggcctgcaacatatctgtcttttgcctctattatttcctttacatgttccggcggataaactccaagtcctacctttattaatgtaccaacgattattcttaccatattatataagaaaccatttcctgtaattctgattgatattacatcatctcttttgtttacactaagagaatataccgttcttacagtactttctacctgacttcctgctgagcaaaagctggcaaagtcgtgttctccaactatgtactctgctgcctctttcattttctgctcatccaaaggcatatacataaaatgtgtgtaaaacctttgcaatggatcaggaaaccttctatttaaaatcttatattcatatgtttttgtgctatctctgtatcgtggatgccaatcaagtgggacttcatctgatttttggattctaatatcgttaggcaatctttgattaagtgcaaaagatattttttctgcaggaatccttgtttccgtatcaaaaacagctacatttcccattgcatgcacccctgaatcagtacggcttgcacctataactgcaatttcttcatttaataaatcttttaatgctttattaagaacttcttcaacagttattccgttaatctgcacttgccaaccgcagtaattggttccatcataagcaattattaaccttactctcttcatttgcgttcctttattaacatttattcaactaatattaacatattaatggttgtaatgttattaaccataaaattagtacctaaaattattgctataatcaaaaaacatacaacatatgcatatgcatcatgtctattatagcttaaaggcttcatttttgttctttcaccgccgtgataacatcttgcttccattgcagttgccaaatcagcagctcttctaattgaagatacaaaaagcggtattaatataggtattaagcttttcgccctctgcaatatatttcctgtatcaaaactggcacctcttgccttttgtgccttagttatcttgtctgtttcttccattaaagtaggaataaatcttaatgccaaagacattaccatagctatttcatgtacaggaaatttgattacgttcaaaattccaaatgatttttcaagaccgtccgctaaatcgttaggtgttgttgttagtgtcataactgatgttccaactactaatagcacaagtcttatcgccatataaacaccttttataattccctgttttgttattgtaaaaataaggaaatgtacaatcacatctcccggcgtaagaaaaatattaaaaactacacttaacagcataataaaaataatccctcttatgcctttcatcatcttcttaaaaggtacctttgacatctttattactattcccagaaataacgtaatcagtccataaccaattacattgttaatcataaaaaccattactacaaaaactaacgttccaaaaagtttaactcttgggtccagtttatgtattactgaatcttccggataatattgtccaattgttatatctaccattttatcttcctaaacttttcaatatactttcctttgcttcttccagattaataatattttcatcaacatcaagtccatcctccttaagctgatgcataatatatgttatctgaggagccgcaagacctatttgttctaactttttataatgtttaaaaacattatgtggggcatcatcatacataacctgccccttattcattacaataattctttcggcgtagttagctacatcctccatactatgagaaacaaggactattcctattccttttttttctctaagctcttttagacgatttaatattttatccctacctgccggatcaagacctgctgttggttcgtctaaaataagtatttccggattcattgcaagaactcccgctattgccactcgtctcttctgaccacctgacagttcaaaaggagttttctcgtacaattcttctcgtacaccaacaagctgtaaggcttcttttgccttttctattgcctgttcctttgtgcagccctgattaagcggtccaaaacaaacatcttttataactgattcctcaaacaactgatgttcaggatactgaaatacaagtcctaccttacatcttaaacctcttatgtcaaagcccttatccgcaatgttttttccatcataataaacatttcccgatgttgctttctctaaaccgttaaaatgctgtattaatgtagacttgcctgatcctgtgtgaccgataatagctacaaactcgcctttattaatttctaaattaacattatttaatgcctttgtttcagaacttgttccggctccataaacaaaacttacatcttctaattttaatgacatattccttacctgttttcgtttatttgcatcattaattcttccactgtcaaaattccgtcttctatattaagaccactctttttaagcatataagccaattctgtaacctgtggtacttcaaggccaagacttttaagcttttcaacatgtgaaaaaacttcctttggattaccctgcataacaagttttcccttgtccataacaaaaaccctgtccgccttaattgcctcattcatatgatgagttataagaataattgttatccccttttcttcattaagactgtgaagtgtgtctattacctcatttcttccaacaggatcaagcattgccgtaggctcatccaaaacaatacatttaggttccattgctataattcctgcaattgccactctctgcttctgtccacctgacagtttaagtggtgacttatgtctgaaccttgtcatatttacacttccaagagctctttcaactcttttccatatttcagcagtaggcacctgtatgttttcaggtccaaaagccacatcctcttcaaccatagtcgccacaatctggttgtcaggattttggaataccattcctgctgtctgtctgatgtccaaaactctttcctcattagttgtctctatgccgtcaatccatactgaaccttctgttggcataagcaacgcattaatgtgttttgccaatgatgatttacctgaaccgttatgtcccaatatggttataaactgtcctgcctcaacatcaaaacttacattatcaattgccctaaactttgagtcttcttcttcatcaatgtaatcatgaattaaattttttatttttaaaattcccaagatttttctcctgtttttattttaaaatccattactttatcttaactcattcattgtattgtatttgcgtaaattttgcaactttaatatattagtctgtttttgtttatattattattatttactgtatttcttgaacttaaaatacttttatgctattttatttgaggaggtaaatgaagtgaatacgaaaaagaataaattaattaatatactaaaaaaagccggactttatatttctaatcaccgtcagtatatttatccggtcattccattttttcttatggatttaattacccgattatgggcatacaaagtcgactattaccctgcatattatccggtgccaaacttattcaccatattgtggatagtgctttttatgggaataatcacttctttaaaaggaaagggttcaaaaatagcctattggatattttttataataagttttgccctgttccttactaattgcatttactattcaatgacatcacttgttttcggttttaacttattggaattgagggacgagggaagttcttatattttggacacaatccttaataccaaccctttgatatatgtatttgcaatagcattaattgtaatcggaattattacagggaagaagttacctgttaatgacaaatgtaagcctaaacgctttcttaaagtttttgtatttttccttgttttacacactctcacacctttcctgttgggacatgcaaacaacaacctaaaatggaacaattttaagaacgcaagaaatatttataacaactttagtgattgtaacaagagcttgaagatttctggtttatatgaatacagtgttagaaacttttatttcactttcttaaaaccggaagaagaaataagtgatgaagaccagaagttccttgatagtatttataaagcagaggatactaaagaagaaaatgcttatacaggcaagtttaaaggcaaaaatcttattttccttcaattagaaggaatggatacatggatgcttacaaagaagactacacctaacttatacaatcttagaaaacattcaattgatttttctaatcattattcaatttatacaggtggcggttcaacatttaattcagagtttgcagttaatacaggttttacaactcctatttcatacatagaaaatgtttactcttttagcaaaaatacttttccttatactatggcaagattgtttaaggaacagaattacagcgtaaatgctttccatatgaataaaggtgagttttattcaagagatattaactacaaaagctggggctatgataattattacggcttacaggatattcagaagtacaatgatgaacgttatgttcttgacagagagttgattttaaacaaaactttctataataagatttttaaacagcaaggcaactttgttaactatattataacttactcaccacacactcctttcactactgaaaaggaagttggaaaaattcttgctgaagaaaaatatggtaagggcaatattccaaaattatctgaagaagattgtgcgaaaatggctgcatctgaaaccgacaatatggttggtcttcttattcaggcacttaaagataatggcttatatgacaacactgtaatcgttgcttacgctgaccattacttatacacacttgatgataaatcaatacttgataaatataaagaaacttcaaacaacttaatcaaccacactcctttctttatttggagcagtgatttaggccagttaacaagtattagcaaagttaatatgcagatggatattttgcctactgtattaaatcttttcggtattgactacaacagcaataattatattggtcatgatattttaagcaatgattttaaaggatatgctttcttctccgattactcatggtatgacggaaaagtatacgttgagaatcagcagattacaaatggcaaaaaaatgagtaagaacaagcttgattcaatgaacaatctgatttctaatgttataaaaaagaacgatttgacgctaaaatatgactatttcaaatcaaaatagttctttacaataaatttatttaatagacttaatattcaactattgatttctgttaaatgataacataaaaagaaccgatggaacttacaaattccaatcggttctttttatgttgattgttttattacttcttttatttctaataatctcttacgcaataattttagtcttagttcttttactaataattattttaatcctgcgatatatcgtcaattgtgatttcacttttgtgtggaataggtttccattcaactttcttaaacaaagctacgtactgagtatatcttccgataatatcaaatgtaggccatgtaaagcaatacaaaatcttcttccatatgcttatctttggcatacgcttgttttctattataaataaatatacagcttctaatgttttaaagaaatacaaccctattctatagtaaattctaacccataattcaattaaaatggttaatacataggtttccgctcccgcaggcaatgaaaccgttatatctccaaaaatacgagtgattacatgagcaagccatgtgctgttataaagtattcttatattatcaagtccaaactgagaacagaagaacggataaagtataagatatacaataatccatctgaatatattaataatattcttaggcaataactgggcaaatgtatcaaaagacataaatctgtgtctaattgttctccatgtgtaattataccacttgtcatcctcatatctctgggtatgaggatcaataaagatattcttaaacaatccccatccactttcggcaaatgcctgcaaatgacctttagaccatcttaaacgctgtcttaaagctacttttaagcttaccggctgttcatcataaaatattgcttcatcattatatgaaatctcatagccctcaacaacacagtctgctgttaaagctctatcttctgttaatgaagtatacttccatccgtcttttacaatctcactggcaaaaaggaatcctgttccctgaatatttgttgccaaatgtaaaaatgatcttgctctatgtcttgttcgtattgaccttaaccaatgtaatgcatatgttgatgcaatccagttttcactgaaattctttgttgctctgtaagaagttataatcttctcccctgcgtcaaaagaatcattcattcttgatatgtaatctttctttaaaagattatctgaatcaaatataaaatagccttcaaaagatgtaatgccataatctctctgaatctgctcaaataagtattttaaggcaaacccttttgtcctctcatcaggattatgatgttcataacaaatagcacccttctctcttgcaatctgcgctgtgttatcagtacaattgtctgccacaacaaatatagtaattaagtcctgtggataatcctgcttctttatactattaataaggtttccaattacggtttcctcattacgtgccggtattaatattgcatatttatgattatgttctgctcttttaaactttcttgttacgaaaagtcctaaaactttatatggtttgtcctgaataacaaataaggccattaatgtgcctatcattcctgaaatagccaatgccggtccatatgccctactcataatgtctgcaagacttccaaacaaattaactgctaatatatacattcttcaacctctcttaagtaaatacgtattacactatactaagtaaatttacaaaatgcaagcaaattttttaagattacagaattgtaaaagtttaaaaccagtcataatctgtgtaatctttttttaacatcttaatcatttttctcttaactaatcatttttttcaaaaagaaagataggcaaacaatactgtctgcctatctgtatataacattgtttatgattatttcataaattatactaattcaagtaatacttccatagctgcatcacctttacgctggccaatcttaacgattcttgtgtagccacccttacggtctgcatacttaggagcgatttcatcgaataacttgtttgttaagtcaactttctttgtgtctttcttctttccagtattgtctgttactgtgtaaagaactttgttcatctgacgtctagcgtgaagacgtgaaggctgatctttcttaatagttttcttaacttcatcgaaaactgttactttcttaccatcaacaacttctttaactctcttgccatctttgtctttacgagcaaccttagctgttacttcaacttcatcaaaattgtctttttccttaactgctaatgcaataagtccttcagcaactttgctgatttctttagctctagcttctgttgtgacaatcttaccgttatttaaaagacttgtaacctgacctctaattaaagcttttctttgacttgaagttcttccaagttttctataacctgccatttttttacctccaattttcgtaacgccccctactattagtcggcggcatgtcataagtatttattaaggatattaagtaactatccttaacaaactgacatttattagttttcgtcgcttggtctcaatccaaggccgagttcttttaacttagcaagtacttcttctaatgacttacgaccaaggtttcttaccttcatcatatcttctgaagtcttatttactaattcctcaactgtattgatacctgctctcttcaaacaattgtatgaacgaactgataactctaattcatctatgttcatctctaacactttatcaatttcatcatcaaccggttctgcaattacttcaatatcctttgaagtttcagacaaatcgatgaataactttaagtgttcgcaaagaacttttgacgctaagcttacggcttcatcagtatctaatgtaccatttgtgtaaacgtctaatgtaagtttatcaaagtctgtaacctgaccaacacgagtgttctgtactgacatattaactctttctactggagtgtagattgaatcaactgcaataacaccgattggtaagctatcattcttgttcttttctgaacttacataacctctacccttagtaatgattaattccatactaagcttgctatctgcaccaccattaagtgttgcgataactaagtccggatttaaaatctcgatatcagaatcaacctggatatctgcagcagttactacgcagtctcctgttacatcaatatgtgcaaccttaggttcatctgttgtactattgttcttgatttcaagctgtttgatgtttaatacaatctctgtaacatcttcttttacaccaggcactgagctaaattcatggagaactccatcaatcttaatctggcttacagcagatcccggtaatgatgaaagcataattcttcttaaagcattaccaagtgttgtaccataacctctttcaagtggttctactacaaacttaccgtatcttccatcgtctgacttttctactaaaatattgggtttttcaaaatcgaacactaattagcccctcctttattgggaattgcttaaacctattgtaaaataatataaataaataataaatcttatttagaatataattcgacaataagcatttcatctacaggtacatcaatttcatctctcttagggagttctttgatttcacctttaagattttcctggtctacttcaacccatgctgggactgttcttccaccagtaacttcgatgatatctttgtatctctgagaacctttgcatttctctttgatttcgataacatcaccaactttgattaaataagaaggaatgttaacctgcttaccatttactaaaacatgcttatgatcaactatctgtctagcttcttttcttgttcttgcaaatcccatacggaaaataacattgtcaagtctagtttctaatataatcataagattttcacctgtcataccaggtttcttctgtgctttctgataataatttctgaaaggcttttctaacacgccataaatgaatttagccttctgcttttctcttaactgaagtccgtattcactcatttttctgctagatctgtttaaatttctatttgatttcttatctattcctaaataaattggatctaaaccaagtgatctacatcttttaagaacaggaactctatttactgccatttaattattccctcctaaattagactcttctacgttttggtgggcgacatccattatgtggaactggtgttacatccttaatgcttgtaacttcaagaccgcatgtagcaagcgcacgaatagctgcttctctacctgatcctggacccttaaccataacatctactgtttttaaaccgtgtactaaagctgctttagttgcagtttctgctgccatctgagctgcataaggagtagatttctttgaacctctaaatcccagaccgccagcacttgcccatgataaagcatttccttctgcatctgttaatgtaacaattgtattgttaaatgatgcctgaatatgtgcctgtccgtgttcaacgtttttcttaacacgcttttttgtcactttctttgtaactttcttagccattttctaaactaacctcccttatgggtttctactattttttcttgtttgctacagttctcttaggaccttttcttgttctggcattgttctttgtattctgaccacgaactggaagtcctcttctatgacggatacctctgtagcatccaatttcctgtaatctcttaatgtttaatgcgatttctcttcttaaatcaccttcaactgtctgacttgcatcgataacatcgctaatctttttaacttcatcatctgtcaaatccttacaacgtgtgtctggattaacaccagcttcagttaaaattctctttgagcttgtaagaccgataccataaatataagtcaagccaatttcaactctcttttctcttggtaaatcaacacctgaaatacgagccatgtgtataacctccattagttaatttgcatgaatatataaattacgtagcccgtgttaccacgtctgaaatgttgtacgcacccatattattcatatactttattagtttctgtacgaagtataatttcttcgtcatctggcataataagataactacttgacttcttatctcataactatgcccaattggccaacctgtttcagcaatatataagtggttggcaggtaggttttccctacatatttgatagtaacgttttcgttactgcagccgcatcttcataaagttatgactatgcataactatagacgcacaaacaagtgaacaatatctaatcattcactttcaatccaatcactatccctgacgctgtttgtgctttggattttcacagataactctgacaatcccttttcttttaatgactttgcatttttcgcaaattggtttaactgatgatctaactttcacagtatcttctcctttcacaaaaaagtccaggtaatatagtatcatataaaaactaatattacaacatttttttaaaatttttttaaatttattttttatcccataaaatatgggttcgtgagcgttttgttcacaacttttaataaacaacgccacttcgattccgtgcatcgcacttcatctcagtgcgcttacgcgcaacatatcaaaaagtctaaaacgaaaatctcatgcaagcatggatttgtttattttttataaccctttaataaacaacgccacttcgattccgtgctttgcacttcatctcagtgcgcttacgcgcaacatatgtgaaaagttaaatcgaaaatctcatgcaagcatggattttcgatttatcttttcacatgcgttgtttatttatcacgccagatgattcttccttttgaaagatcatatggtgacatttcaattgttactttgtcaccaggaagaatcttaatatagttcattcttaactttccgctaatgtgagcaagtactatgtgtccgttttctaattctacacggaacatagcgttaggaagtttttctacaactgttccttctatttcaattacatctgcttttgacattttttatcctccattttttaatcagttttttataatgataaaatttcaggttcaccctttgtaataaggattgtattttcataatgtgccgaaagtgaaccatcatctgtaactacagtccagtcatcatctgtccacgcaacatcaggtcttccaatattaatcattggttctattgccaatgtcattccggcttgaagcttcataccttttctcttttgtctaaagttaggtatctgtggatcttcatgcatttctgttcctataccgtgtccaactaaatctcttacaacaccatatccaaacttttcggcatagtcgccaattgctgctgaaatgtcatataaatgatttccttcttttgcaaatttgattccttcaaaaaagctctgttttgtaacatctataagttgctgtgcttctttacttatttctccaatagcaattgttcttgctgcatcagactgatatcctttataaataacacctgtatccaagcttactatatcaccatctctaatgattttgtctttgcttggtaatccatgaactacttcatcgttaattgatatacaaactgatccgggatatccttcatatcctaaaaatgaagggatacatccatatcctctgattatctcttcgcaaatcttatctatctgataagatgtcattccggcttttacttcctgtgcaagttcttcgtgaactttcgcaagaatttttccggcttctctcattaattgaatttctctttctgacttaattgtaactgccatagctttatgctcctaaaatttcaactattgctttaaaaacatctttcatatcaactgttccatcaacactctttaagatgccctgtcccttataataatctattaatggctgtgtctgattgtgatatacttcaagacggcttaaaactgtttcaggcttatcatcatctcttacgataagttctccgccacatgtatcacatgttccttcttcttttgttggattatatactacatgatatgtagctccacatccaacacaggctctacggccacccattcttctaacaatgttttcatcaggcacttcaacatcaattgcaaaatcaactttatcaccaattgccttaagtgcattgtctaatgcttctgcctgtggaattgttcttgggaagccgtctaaaacataaccattcttgcaatcgtcttctttaaatctatcaataactaaatctactaccaattcatcaggaactaactgtcctgcatcaatataagttttagctttttttcctaattctgttccatttttaatatttgctctaaaaatatctcctgtcgagatatgtggtatgctgtacttttcagcaatcatctttgcctgtgtgccttttcctgcaccaggtgctcctaacattataattttcatattcttatttcctctcaccaaaacaaattcaactacttttttctagcaatcaaggggatagcctaaaagaaggctgtccccttaaaaaatctactagaaaataccttttacagtactgtaactacgttctgttatcatcgacttaattgtctgaagtgtttctaaaataacacctacgataatgataattgatgtaccaccaaatccaacgttagctcctgtaagacctgacgcaagaattggaataacagctactataataagtccaactgcaccaataaatataatgtagtttaagatttttgttaagtattcaactgttggtttaccacttctgataccagggataaatccacctatatcgttaaggtttttagcaacctctcgtgggttgaatgttattgatgtatagaaataagcaaagaataatacaagtaataaatatacaacaaaaccaattgaatattttaactgtgatggtttgcaccagtgtgactgtgttaaatagttagcccactctggctgcttgccgaaaaatgatgcaattactactgggaactgtaataatgacgaagcaaagataattggaataacaccagctgtattaacctttaaaggaatatttgactgctgtcctcctacctgccttcttccctgtactttctgtgacatctgaacggcaatatttctagttgctgcctgtaatataactactaatactacaataccaactataacaccgataataatcaatgctgataatattctcataccgatagattttccctcacctgttacaaatgttgtaaacaagttagaaatatctgaaggcattcctgagatgatattaattgtaagtacgatagaaataccattacctacacccttttcagtaatctgttcaccaatccacataagaactgctgaaccggctgtcatggcaatgataccagttaggacaacgccccattttctaagagagctcattgatccataactaattgaatctgtgttgaaaataccctgattagcgaatccgataatcattgctgttgattcaataagagctaaagcaactgttaaataacgagtaatttcagctattttctttctaccttcttctccatctttctgaagttcatccaactttggaatagcaattgttaacaactgcataatgatggatgctgtgatgtatggagtaatgttcaatgcaaagattgacatattctccaaagatccacctgtaatagctgataagaagctgaagccaccctccttaaaaggagaagtaacttctgctaccatgtctgcattaacaaaaggtatcgctatctgacaacctaatcttactacaatcagcattacaaatgtatataataatctttttctgatttcttttacttttaatgctttcttcaaggtttctaacatattagatcacctcgcaagttccacctgcagcttctattttagctttagcgccttcactaaaagcgtttacctttacagtaagcttctttgttaattcgccattgccaagaattttaacgccatcgcgtggattcttaattacaccagcttcaagtaaagcttcaactgtaacaactgcatcattgtcaaatctttctaatgctgttacgttaataccaacgatgtgctttgtattaatgtttgtaaagcctctctttggaattcttctgtataatggcatctgaccaccttcaaaacctggtctaggacttcctgaacgagctttctgtcctttatgacctttaccagcagttttgccgtttccagatccgtgtccacgtcctcttctgaaattatcactatgttttgagccttctgcaggctttaaatttgataaatccattgtcgcacctccttgtctaatttagattaaatctcttcaacttttactaaatgtctaactctctgaatcattcctctgactgcagcgttgtcaggcatttctactgtcttgttaagctttgtaagacctaaagcttcacaagtctttttattctttggaactgctccaattgttgattttactaaagtaatttttaatttatctgccatctctaattacctccctattagcctaaaatctcttcaacagatttaccgcgaagtgtagctacttcttccggagtctttaatgcagctaatccttcaattgtagcaagaactacgttctgcttgttgtttgttcctaatgattttgttctgatgttgttaataccggcaagttctactacactacgtgcaggaccaccagcgataacaccagtaccttctggagctctcttaagtaatacttcagcgcttccaaattttccaataatgtcatatggaatactatcgttctgatcgataggaacactaatcaggctcttcattgcatcttctttacccttacggattgcttcaggaatttcagctgcttttcctaaacctgcaccaacgtgtccgtttttgtcaccaacaactactaaagctgcgaaacgcatattacgtccacctttaactaccttagtaacacgtttgattgacactactgtttcttctaattctaactgacttgcatcaattatctcacgtttcatgtgtgttacctcctcaactaaaattccagaccagcttctctagctgcatctgctaatgcctgtactttaccctggtaaatgaagccgcctctatcgtaaacaacttccttaatacctttttcaattgctctttcagcaattactttacctacatatgctgcggcttcaacgttattagtcttttcaagagctttcttagcttcaggttcatttgttgaagctgaaacaagtgtcttgccgactgtatcgtcaataatctgagcatacatatgattattacttctgaatactgctaaacgtggacattcagttgttccacttaaatgattacgcagtctgttatgtttcttaacacgaacttcacttctagatttcttactaaccattttttacactcctttaattatttcttaccagtcttaccaactttacgtctgataacttcagtatcgtatttgatacccttacccttataaggttcaggagctctcttacttctgatttctgcagcgtactggccaactttttctttatcaattcccttaacaataatcttattctgaccatcaagtactgtttcgattccttctggatcttccatttctactggatgtgaataacctaatgaaaggactaatttcttaccctgtttctgtgctctgtaaccaacaccgttaacttcaagcaccttttcgtaaccttctgtaacacctataaccatattgtaaataagtgttcttgtaagaccatgtaatgctttatttttctttaaatcattaggtcttgtaacgacgatttcttcgccgtcttttttaatgtccatagcctctggtaaaactcttgtaagttcaccctttgggcctttgacagtcaccttgttattttctgcaatatcaacagttacacctgctggtacagcgataggcattcttcctatacgtgacatttcgccttacctcctaatttttatttaccaaacgaatgcgagaacttctccaccaacgtttgcctttctagcttctttatctgtaatcacacctttgtttgttgagatgatagctacaccaagtcctccaagaactcttggtaattcatcttttccggcataaacacgaagacctggcttagaaattttcttaattcctgtaataaccttttcgttcttatctttaccatactttaatgtgattctgatattcttaaagttttcttcatctaaaacttcatactttttgatatatccttcatttaaaagaatttcagcaatagctattttcatctttgatgcaggaacatctacagtatcatgttttgcagtattagcattacggattcttgtaagcatatctgcgattggatcactcatagtcatagttaaatttcctccttcaaatttctcttaccagcttgcctttttaacgcctggtatctgtcccttgtatgctaattcacggaagcaaattctgcagattccgtatttttttaaataagcatgtggacgaccacagattctacaacggttgtaagcctgtgttgagaatttagcttttctttgctgttttgctttcatagcagttctagccatggatctacctcctaattactttgcaaatggcatattaaataatgtcaataattcacgagcttcttcatctgtgttagctgtagtaacaaaaataatgtccatacctctaaccttatcaaccttatcgtattcgatttcagggaaaataatctgttctttgataccaagagcataatttcctcttccatcaaatgcattaggattaacacctctaaagtctcttacacgaggtaaagcaagatttactaatctgtctaaaaattcgtacatcttttctcctctaagagttactttacatccgattggctgtccttctcttaacttgaagttagctactgaatttttagctcttgtaacaactgctttctgtcctgtaattgtttcaagatcctttacagctgtatctaaaaccttacggttttccttagcttcaccaacacccatatttataacaatcttatcaagtttagggatctgcatttcgttcttgtattcgaatttcttctgcattgcatccttaatctcatttaaataagtctctttaagtctactcacgtcttggacctcctctctttaattaatcaataacttcgccagttttcttggcaatacgaactttctttccgtcttctactttaaatcctactctagttgtctgtcctttaacaacgagcattacgttagaagcattgataggtccttcctgagtaacgatgccaccattctggttctgtgcacttggttttgtgtgctttgtatgcatgttgacaccttcgactgttacagtattcttcttaagatctactgaagaaaccttaccttcttttcctttgtccttaccagcgataactcttactgtatcaccttttttaattttcatagctgacatttatgcatacctcctataaaacttcaggtgctaaagatacaattctcataaactgtttgtctcttaattctctagcaactggcccaaaaatacgagttcctcttggggtcttatcatcttttataattacagcagcattttcgtcaaatctgatgtatgaaccatctttacgacgagcgcccttaacagtacgtactactacagcttttactacgtcaccttttttaacaactccacctggtgttgcatctttaacagtagcaacgataacatcaccgatgttcgcatatcttctagtagatccgcccattactctgatgcaaagtaattctttagcgcctgtattatcagcaactttaagtctactttcctgttgaatcatgctgtattcctcctttttcctataaagaccttatctagccttttcaataatttcaacaagtctccatcttttatcctttgaaagtggtcttgtttccataacttttactgtatcaccgataccgcactggttttcttcgtcatgagcttttaatttgtaagttctcttaacgattttgttgtataaaggatgctttacatgatcctctacagctacaacgattgtcttatccatcttgtcgctaacaaccttacctgtacgtgtttttcttaaatttctttccacaacaatttctcctttcataacctttccaccggcctgtgccggctgggggactaacctctaactattcagcagcatttgccttttcaactataacagtctggattctggcaatgttctttcttacttctttaattctgcttgtgttatctaactggtttgttgcgttctggaatcttaaattgaaaagttcctttttagcagctactaattcatcgtttaattctgcagctgattttgttcttaaatcttctacatatgtcttaattttcactgttatcaccgccttctaaatctgcacgtgaaacaaccttacacttaattggaagtttgtgggttgcaagtctcaaagcttctttagctgtttcttcaggtacgcctgcgatttcaaacataactctacctggcttaactacagctacccagtattcaagagcacccttacctttacccattcgagtttcagcaggtgtagctgttactggtttatcagggaaaatcttaatccaaaccttaccaccacgctttacataacgtgtcattgcgattctggcagcttcaatctgatttgatttaatccatcccggttccattgctacgataccgtattcaccataagaaatcttatttcctcttgtagctttacctctcatagaaccacggaactgttttctacgtttaactctttttggcattaacattatttatcgctcccttctctagttggaagtatttcgccattgtaaatccaaacctttacacctacttttccgtaagttgtatcagcttcagcgaaaccatagtcgatatcagcacgtaatgtctgaagtggaatagttccttcactatagaactctgtacgagccatatcagctccaccaagacgtcctgaaacagatgttttaattcctaaagcgcctgtcttcattgttcttgacatgcatgacttcatagctcttctaaatgatacacggttttctaactgtgcagcaatgttttctgctactaactgtgcatctttatcaggtctcttaacatccttaacatccataaataacttcttatcagtcattttctgaacttctgctttaaccttttctatttcagcgccaccttttccgattacaagaccaggcttagctgtataaacattaactcttactctgtcagatgatctttcgatttcaatcttagaaacacctgtgctgtataactttttcttaaggtatgttctgatttcataatcttcaataaggttatcagcgaaatcagcttcagcataccactttgagtcccagtccttaataactccgactcttaatccatgaggattaactttctgtcccatactttgcctcctatcttatctttcatcgagcactaatgtaatgtggctgtttctctttaagattctataagctctaccctgtgctctaggtttaattcttttcattgtaggagctgcattagcatagcactctgcaatgtaaagtttactaacatccatattgttgttgttttcagcgttagcaactgctgaatttaataatttcaaaattacgcttgatgcatatcttgggttgtatgtgagaataccgatagcactctgaacatctttacctctgatggcatctaatacgaaacatgctttctgtactgacactctagcatatgataacttagctgatggtctagtatctttattagcatttctttctctctttatctgggatctatgtcctcttgccatagatgagacctcctttcaaaatctacaggatattatctacccttcttttcgtcttttccgtgtcctttataagttctagtagaaacaaattctccaagtttatgtccaaccatatcttctgtaacatatactggaacgtgctttctaccatcatggacagcgattgtgtgtccaaccatctgtgggaaaattgtagaacgtcttgaccaagtctttactactgacttatcgcctgattcgttcatagcgtcaattttctttaataagctctcatccgcaaatgggcctttttttaatgatctagccattagtttctacctccttatttcatgttctttccgtcacgtcttctaatgatcatcttgttagacttcttattcttcttacgagtcttcaaaccaagtgccggtttaccccaaggtgtgcatggtcctgaacgtcctactggtgcacgtccttcaccaccaccgtgtggatggtcattagggttcataacagaaccacgaactgtaggtctgatacccatattacgcttacgtcctgctttaccaatgtttacaagaccgtgttctacgtttccaactgtaccgattgttgcacgacatacgattggaactaatctcatttctcctgaaggaagtcttaatgttgcatacttaccttctttagccattaactgagctgtatttccggcagcacgaactaactgtccacccttacctggatataactcaatgttgtggatttctgtaccaactgggatagctgaaagtggtaaacagttacctacttttacttcagcgttttcgccattcataagtacatctcctacctttaatccgttaggagcgatgatgtatgatttttcaccgtcagcgtagcaaattaatgcgatgtttgctgttctgtttggatcatattcgatactcttaactgttgcaggtacatcaactttgtttctcttaaagtcgataattctatattttcttctagaaccaccaccatggtgtctaactgttattttaccctgattgttacgaccagctgttttgttgagagatactgttaaagacttctctggtgtagactttgtaatctctgcattatcaagctgagtcatagctcttcttgaaggtgtatatgggttaaatgtcttaattcccattttctttctcctttcaaatatcttcttgcgtaaacatttaaagcggagcgcttaatgcttacatactaaaattctatattttataaaccagcgaagatttcgatatctgcactgtctgctgttaactgaacgatagctttctttctcttagctgtctttcctgtaacatatcctcttctacgtgtcttgccgtctaagttcattgtgttaaccttagcaacctttgttccttcaaacattctttcaactgcttctttaacctgagtcttagtagcatctgtgtgtacgtagaatgtgtatttcttatctgccatagcgttcatgctcttttcagtaattactggagcaagaataacgtcataatatttaaggtctgccattatgcatacacctcctcaattgttgctacagctgccttttcaactactactgtatcatatttaagaatatcatatacgttgatagtatttgttaaagcagtctttactgtaggaatattctttgctgacttaactgtgttagcatcgttttcgtttaatactactaatgctttctttgtatttaagtttgccataaccttagcaaattcctttgtcttaggagcttcaaacttaagttcgtcaactacgattaattttccttcgttaactcttgatgtcaaagctgacttaagagcgattctcttttctttcttattcatcttaaatgaataatctcttggtgttggagcaaatacaactccgccgcctgtccactgtggagatcttgttgaaccctgtcttgcatgacctgttcctttctgtctccatggctttctaccgccaccgctaacttctgaacgagttttagctttctgtgttccctgacggttatttgcaagctggcttaaaactgcctgatgtactaagtgttcattaacttctacaccaaatacagcatcgctaagttcgattgtaccaacttcgcttccttccatatttaaaacagatacttttgccatctgtgtgttcctcctttcaaatactacttaccggctttaactgattctttaattgttactaaagatttcttaggtcccggtacagcacctttaactaagagtaagttcttttcagcatcaactctaaccacttcaagattctgagttgtaactttcttaccacccatgtgtccaggcatcttcttgcccttgaatactctactaggagttgaacaagaaccgtttgaacctgcatgtctatggtatttagaaccatgagccataggtcctcttgactgtccatgtctcttaattgcgccctggaatccttttccctttgcaattgcagtagcatcaatcttgtctcctgcttcaaagacatcaaccttgatttcgtcttttactgaatattcgccttcgagtttaaattctcttacatatctcttgtaagaaactccagccttgtcaaacatacctttaactggcttgttgaccaatttttctctgatatcttcgaaaccaacctgtactgcttcataaccatcgttttcagttgtttttacctgagtaacaacacatggtcctgcctgaagaacagtaactggaactaattcgccagcttcgttgaatatctgagtcataccaacttttttagctaatatagctttcttcattttaattacctcctgttaatctacagcggatcgcattccgcgatcatcctagaacagttttcgtaacccgaccagttatctggcccttacttatataaaaccttcaaggataattcacttaattgttttagatgaattatttgtttttcatcttgatatcgatgtaaacacctgctggcatttctaatcttgataatgcatctacagccttctgtgtaggtgttacaatatcgataagtctcttatgagttctctgttcaaactgttctcttgagtctttgtacttgtgtacagctctaagaattgttacaacttccttctttgttggaagaggtacaggaccgctaacttctgatcctgagttctttgcagtttcaacaattttcttagctgactgatctactaatttgtgatcgtaagctttaagtgtaattctcattacttgtgccataaaaaaagccgcctccttttcgtactatttagcacgacaagcggtgaccgtacaacctatccgggcgtgtcgcaatctcttgcaaccttaactcggtgtttccactcctatggtggacttatgttttgtacagtgacttgtcgccagtttcctaacttgacattcgctccacggaaaacctgcaatattctgcagcaacctcacgtttcaacgctatcaatgtcacagcaagagttagtatacaccatcatttcataaaaagcaagtacttttttgaaatttatttatacaatttatttgacttttttttgtacaccttgtatcatttttgaagaaggtatacaaaagtgtattcaatattgatatatactttttctcctctgataatatacagcttaaattttaatttatcaagctttaataaaaaatttgttttgaacattatatataggaaggaactaaattatgtggatagcagataattggaaagattatgaagtacttgatacttcttccggggaaaaacttgaacgttggggtgattattttcttgtaagaccagacccacaggttatttggaatactccaaagcatgacaagaaatggttcaaacctaatggccattatcatagaagtaacaagggtgggggacagtggcagttttttaatttgcctgaacagtggaccattaattacaaggatttaacatttaatcttaagccttttagctttaaacacacaggactttttcctgaacaggctactaattgggactggttttctgaaaaaatcagaaatgccggacgtcctgttaaagttttaaatctttttgcttacacaggcggtgctactcttgctgcgttaaacgcaggtgcccacgttactcatgttgacgcttcaaagggtgttgttgcctgggcaaaagaaaacgccacttcatcaggtcttattgacaaacctgtaagatggcttgttgatgattgtgtaaaattcgttgagcgtgaaataagacgcggcaataaatacgatggcattattatggaccctccttcatatggaagaggaccaaaaggagaaatttggaagattgaagaaagtgtatttcctttcattgaactttgttcaaagattttaagtgatgatcctttattcttccttattaactcatacaccacaggacttcagcctgcagtattaaactatatgattaacactgctattgtaagcaagttcggcggacatgttgaagctgatgaaataggagttaatgtttcatcaaacggactggtgcttccttgcggtgcgtcaggacgttggagcaagtaatagagtttgtaatatagtaaaaataggttgcccgctaacatttttgttagtaagcaacctatttttttattgttttgggcgtgattacgtgtcagataacgtaaatgttgtatgacacgtaatttattaaaaaattctctatcttccctattcactatcttaaactaccagtacttcttccacatcaaatatttcatcactttggtctgcacatactgtaacgatgtatttttcatcgaacttaagttgcacgaacttgtactctttctttccaactatctgaggtgcgtcctcgctaaaatctatttcgaaagagttaagaggttttctaagtcctatgcctatgttctttaagtatgcttcctttattgtccaaatctcgcaaaatctctgctgattgattttttcgtcttcaatttcgtttatgtaagcgcattcgcttggcaaaaagttcttttcagcaattctatgcttgtcgctttttatcttttgaatatctattcctatatcttcatcagaaactgctgcaattacatagcaacctgaatgagagatgttaaaatgaatatccgtatcttcaaagtaaggctttccaaacttgtctaccttaacatctccggcaatattgtacttttcttttatgaaattaatcaaaattcctgcgccggcacttctaagcttatctgccgtaacccttaacctgctaattttttctgcgcgtgcatcatctaaagtttttacaacttctccaaaaacatttctgtttcttaaaacagtaatattaaaatagtaaatattcattatcgtcctcttcggttaattactttctattcaaaattcttctttttctttgccagtcgtctctttggaaccgtccataatcccggtgcaaacaaaataagcaatgggaatatttcaagtcgtccaaccagcatgtcaaacattagtactatcttagagaatacactataatctccaaaattgctagtaggtcctaccaaattaagacctggacctatattattaaatgttgccataaccgctgtaaggttagttgtcatatcttttccgtccagacttattaataatatagaagcaagtactattataacataagcacctaaataacataagactcttcttactgcatcattcgataacggtctaccgtcagcctgaaccttctgtacacttcttgggtgagtaattgacataacctcactttttatagcttttagaaatacaactaatcttgaaactttaataccaccacctgtacttccggcgcatgcacctacaaacataagaagtactaatatggtcttggaaaattcaggccacaggttaaagtctgttgttgcataacctgtcgtacttgaaacagacgccacctggaacaacgctgtgtgaaatgccataaagaaattatcaaaacttcctttaatgttaatggctataagaagtgctgaaccaaatacgattccaagataatatcttaattcctgattcatgaaagcttctttagtctttcttattaataataagtaataaacgttaaaattgattgaacatattatcataaaagtggtaattacaatctgagatgcaagactataggaagcaatgctgtcattcaaaacgccaaaaccacccgtacctactgtaccaaaagttaatgtcattgcctcaaacggagacatacctgttattaacaaagctattatctcaacaagtgtaaacacaatgtatattccatataaaatcattgctgtatgtcttactttcggaacaagttttcctactgccgggcccggactttccgctctcataagatgcattattgagccacctgataatggaagaactgccataataaataccaaaactcccataccaccaatccaatgtgtaaatgaacgccagaacaatgaacaatgtgttaaagcttccacattagacaaaatacttgaacctgttgttgtaaaacctgatattgtttcaaaaagtgcatcttcgtatgcaggaatctctcctgtaataaagaatggcaatgcacctaccaaactcataataatccagcttaaagaaactgccgcaaaaccttcttttgaataaaataccttacttttaatctttctgattctgcttaaagtccccacaagaaggcatcctgctgcaatagccagataaacaagtccctgcttttcaccatatattccacctacaattgcaggaagcataagaaatattccctcaaaagtaaacacccatgcaagaatgtatcgtatcattgaataattcatatttcctcctacattaacgcatcttccaactggtggaagcctgtagttgttgtaataagaataatagtatctcccacgtgtataacactttgaccgttaggaatagtaacctgacctcttcttgttatacaaccgattaatacattaggtttcaatcttaactcacttaatggcttaccaaccataggtgaatcttcttttattaataattccaaagcctcaactctgttgtcattaagtctatataaagtttctatgttacttccaatagaattcttcatagctcttacatacttaataattgattcagccgtaatatatttaggataaataatacttcccacatcaaggctgtcaataatctcatcataagaaattctatggacctttgtgataagttttgcattagtaaggctcttagcataaagggcaagcataatattttcttcatcaaaatctgttgatgcaataaatgcttccgtctccatcaatccttcttccataagtagttccttatcagttgcgtcaccacatataatcattgccttaggcaacatttctgtaaggacctcacatttttcaggatttttttctataatcttaacctttattcccatctcaattaattgctttgcaagataaatagaagttcttccaccacctacaattaaaaccttcctggctgctgatgttggaaccttcatcttcttaaacaaatcaagagttctcggctgaggacctacaatggatataatgtccttagccttaagttcaaactcaccatcaggaataataacctggtcgcctcgttcaacaataggaataagtacgtcaacttttaacttactacttaaatcctttaatttaatgttacaaagaatatttccttcttcaattctgtaattaattaattccactcggctttttgcaaaagaatcaactttcaaagctgatgggaattttaaaagacggctcatctctcttgcagccgccaactgtggattaataatcatagataatcccagttcttctttaataaatgatatctccctgttgtatattggattacttactctggcaattgtatgacagccaccggctttcttggcaatcaggcaacataacaaattaagttcatctgaccccgttaccgcaactagcaaatctgcgtcttcaactcctgcctccatctgaatattaaaacttgtgccatttccaacaacacctaaaatgtcataactgttatatacactctcaacaatctgttcccttgtatcaataaccgtaatgttatgtccttctgtgctaagctgttctgcaagagtaattcctacatttccacagcccactataataatcttcattttctctccagtctatacacttattgtatataaaatatttcattgtaatctaatcatctgacagtattttattataatagaaattatagcaaataatctatttctttaaaacatacttttcatatttttgtgtatttatcccactaaaaattaagttgcataacaaacaatactcttacagccacagtctgtcaacagtaaaaatatttctttaacagattatttattcgaaaccctttttcttataattaaataagctcccataacaagtgttcctgttataacccatgttgccgggtacacattcataagcattgaaaaagtaggacaaatcttaaatactgtataaagccatgccactctaaatccacaacaaccaactacagtaagcaacgccggaactaatgagtatcccatacctctcattgctccacctgaaatctcgtaagttcctgttaaaaattcaagcaacaatacgtgaaccattctgataacagcataatcaaccgcctgtgaatctgccgtgtaaactcctgcgaaaaattccttaaacaatacgaaaataacactcattattcccgtaattgccattccccacacaagacatagtctaaatgccttcttgcatcgctcaagcttttttgccccataattctggcttgtaaaagtaactgttgtctggttaaaggcattaataacatagtatgtaaaatattcataatttaatgctgctgaagaacctgcaattgcttttgtaccaaagccgttaatggctgactgaatgcacacatttgataccgagaaaactactccctgtaaacctgcaggtgcacctatttttataatttttataacctgttccttctttaatgacattttcttaggattaaatcttaccatttcatcccctgtcataagaaaataagtcacaagacttgcactgacacaatctgcaattacagttgcaatagcaacacctgccacatctaatttaaaaacaattacaagaactaaattaaggcatatatttataatgccggacacaatcagggcataaagcggtcttttggtatcgcctatacttctaagcactgctgcaccaaagttgtataccattacaaaaggcatgcctacaaaatatattctaagataaagcatagccaatggtaaaacttcatccggtgtattaattgccataagaattggtcttgcaagaactgttcctataattaaaagaaatacaccacaaataacagccattgccataaccgtgtgtactgcttctttaactttttcttttttgccctgtccgatatagtttccaataactacgttggcaccaactgacaaacctacaaacaggtttattaacaaactaattaccggagtgttgccaccaactgccgccaaagacttgctgcctgcaaaacgtccaacaacggcaacatctgctgagttgaataactgctgcagaatgctgctggctgcaaggggaagggcgaaaattagtatttttttgagaagtggaccattaagcatatccatttgtttgtttttttgtgcagacatatttttctcctttatattcacttcaatccgagagaaaaattggcaacgcaaacacgttgatttttttattttgctccgccgtttattgtaagtcccaaaatcaaaactcgcctacggctcagacagttgatttttggcttacactatgctcgcaaaatttcaaaaatctgcctattgtttgcttgtgtcaatttttctctcggatttggagtatattcaatgcgtttattatgtctgtcgaatggggtaggttttggtgtaaccttttgttttcgacagacggttaaggggatttttcctctttgtgtatatggtatttatatattgtaccttttaatgtatttatatatattgttttttaatatatttatatattagagttatttactttctatttttgtggtctttttatatgttctgtaggcgtatattgctgttacaaattcggctactacgaaggctgcccatacgccgtttgcgtctatgaatctgcttaggatataggctgcaggtattatgattactacatatcttgatagtgatatgaatagtgatggcattcctttgcctaatccttctaaggctcctgagcatgttactgagactgctgatactgcaaaaccacagcttatgtatcttagggctgttacgcctatttttattgtttcaggatttgctgtaaataatcctataagctggtatggtattacccaggcaagtattgttccaagtatcattattgatactgttagtttcattgctgttttgaatattttgtctacgcgcttgtgttctcctgctccatagttgtagccaaccagcggtcttatgccctgtattattccgtttgcacttaggtatatgaatgtttgtagtttgtaatatacaccaagtacaagtacgtatttttctgaaaattcagcaagtattccgtttaatgctgaaattagcaatgaaggtaatgccatatttaatgtggctgggattcctactgaatacaatctttttatcattaatttatcaggtaccatgtatgacatttttatttttacaggcattggtcttacaaaatatattattatgtatacagccagtgaaacgaactgtccaagtactgttgcaattgcagcccctcttattcccattgtaggaaacggacctatgccaaatatcattaaaggatcaagtactatgttggttacaaacccacatatcatactaaacattgaaactttcattctccctactgcctgaaatactttttcaaatgaaattccaattactgatactattgcgaatgtaaatactacatcagagtactgtaatgccaaacttattgtatactcattagatgaaaacattctaagaaaatcaggcatccccaaaaggcacaatattgtaagtactatgccgtgtattacactaagtcccattccaattgttgtggctttgtgtgcattattcttttcctgagcgcctaaataaaaagaaataagtgcgtttatgccgatgccaaatcctacacctattgatgttacaagattttggataggatataccagtgccaatgctgtcattgcctcttcgcttagttttgccacaaaatagctgtctacaatgttatacagcgaatttaccgccattgatataaccattggcaatgacatagacaatacaaggggcaatatgtttttttctttcataaatgtctgatccataataacctctttctactaatctaagcataacgacacaatttgttgatttgcagaattgctattttgtcccaacttaattatttatcgttacgcaaagaaatagtggcaaccaccgttaccactattatctatataaatttttaaatttaaattattttaatttttcacctgttaaaagttcatatgcctgaagatatttttcaatagtcttatctacaatatcctgaggtaatgtccaattgtgaccttcattctgttttaaccagtcacgtgcaaactgcttgtcaaatgatggctgaccgtgtcccggttcatatccatctgcaggccagaaacgtgagctgtcaggtgtaagcatttcatcaccaataacaatgtttccgttttcgtctaaaccaaattcaaacttagtatcagcaataatgattccacgctctaatgcgtagtcagcacatttcttgtaaagagcgattgtgcagtctttcaacttcttagcatattcttcgccttttccagggaactgtttttctaaaacttcaatactctgttcatatgaaatattttcatcgtgatcaccgatttcagccttagttgatggtgtgtaaataggttctggcaacttgtctgattcctttaagccttctggaagcttaattccgcagactgtaccattctctttgtagcttgcccaaccactacctgtaatgtatccacgaacaatacattcaattggaagcatttcaagcttcttacacatcatactgtttccatcaaattttggctgtctgaaaaattcaggcatttcatttacatctactgtaatcatatggtttggaagaatatcttctgttaaatcaaaccaaaacttggacatctgagttaatactgttccttttttagtaacttcgttatttaaaataacgtcaaaacaactaattctgtctgttgcaaccataattaagctgtcgccattgtcataaatttcgcgaacttttccttctttaataggctttaattcatttgcgctcattgtacatacctctcttttatttaatttgcccttttgatgtttaaaatgccccggtgttctacaccttccgacatctgtattgcatacgcgtacattatatcatattttttctacataacaatacaaagatttccacatagctctattttataacaaggaaaatgccat

SEQ ID NO: 12816 - DNA, 378 bp, Unknown
  gut microbiota DNA sequence
gagtgtcatttcaaacaggtcaatggaattacagctgaggttacgatcaatcatgagaaagagagccaggtcatcaccgcaacgggtaatggacgtctggatgcggtcagcaatgcaatcaaacagtatttcaacgtcagctatgaactgagcttttacgaggaacattctctgacaaaaggatcatcctccaaggctgttgcatatgttggtataatctgccaaggaaagacattttggggtgttggaattgacgccgatattatcaaggcatccattgaggcactcacagttgcagttaataagctggaagagattggaaattccaatacatgtaaagacgcacgtatgattgaaattatgaattatattcaggag

SEQ ID NO: 12817 - DNA, 286 bp, Unknown
  gut microbiota DNA sequence
cttacgggttccgcggcttcggtgtggtgtttcagccccggacattttcggcgcaggacctctcgaccagtgagctgttacgcactcttttaatgaatggctgcttctgagccaacatcctggttgtcttagagatcccacatccttttccacttaacacccactttgggaccttagccggcggtctgggctctttcccttttgactgtccaacttatctcgtacagtctgactcccatacaccatctgtccggcattcggagtttgatattctttggtaggcttt

SEQ ID NO: 12818 - DNA, 192 bp, Unknown
  gut microbiota DNA sequence
ccacattgggactgagacacggcccaaactcctacgggaggcagcagtggggaatattgcacaatgggcgaaagcctgatgcagcaacgccgcgtgagtgaagaagtatctcggtatgtaaagctctatcagcagggaagaaaatgacggtacctgactaagaagccccggctaactacgtgccagcagccg

SEQ ID NO: 12819 - DNA, 137 bp, Unknown
  gut microbiota DNA sequence
agtctaatgtgacacgtaattctaagaaaaattcattaaatttaaagttcaattacgtgtcatacaatgaaagtctaatgtgacacgtaattctaagaaaaattcattaaatttaaagttcaattacgtgtcataca

SEQ ID NO: 12820 - DNA, 223 bp, Unknown
  gut microbiota DNA sequence
cgtgccagcagccgcggtaatacgtagggggcaagcgttatccggatttactgggtgtaaagggagcgcagacggcactgcaagtctgaagtgaaagcccggggctcaaccccgggactgctttggaaactgtagagctagagtgctggagaggcaagcggaattcctagtgtagcggtgaaatgcgtagatattaggaagaacaccagtggcgaaggcggct

SEQ ID NO: 12821 - DNA, 259 bp, Unknown
  gut microbiota DNA sequence
gttcttcttttgtgagcacgggcgccaggctctccaacttcaccaacgaagcattggcgtggtggcgctccaggatgtccacctcctcctccaatgagggatatcccatggttattttcatcaggaagcggtccagttgcgcttcaggcaacttataagtcccctcctgctccaccggattctgggttgccagaatcgtatagagttctcccatctgatgcgtggtaccgtcaatgctgacctgccgttcttccataac

SEQ ID NO: 12822 - DNA, 200 bp, Unknown
  gut microbiota DNA sequence
ccggtccttgatgaaagtcaaagtcattggttttcatgttgaagaccgtagtacccaacacgtcactcggcatcaagtccggagtaaactgaatgcggctgaagtccgccttaatcaagcgtgccaccagacgggcaagcagtgtctttgccacccccggcactccctccagcaacacatgaccgtttgccaggacaacc

SEQ ID NO: 12823 - DNA, 241 bp, Unknown
  gut microbiota DNA sequence
ttgagtgaagcattacgtgagttgccagacaagaaacgtgaaattctactgctgttttactttatggacatgagcgattcagaaattgcagacctgttgaaattgaaccgttctactgtctatcggcatagaaccagtggactagccttaattaaaaagtttatggaggaatttgaagaatgaaaacacaatatcctatgattccctttcctctcattgtaaaggcaacagatggcgatac

SEQ ID NO: 12824 - DNA, 305 bp, Unknown
  gut microbiota DNA sequence
atgtatggctgcttctgagccaacatcctggttgtctttgaaatcccacatccttttccacttaacacatactttgggaccttagctgtaggtctgggctctttcccttttgaccacccaacttatctcgtgcagtctgactcccatgcatcatctggccgccattcgcagtttgatattcttcggtaggctttgacgccccctaggaaattcagtgctctacctgcggcagactaacatgaggctagccctaaagctatttcgaggagaaccagctatctccgggttcgattggaatttctccc

SEQ ID NO: 12825 - DNA, 168 bp, Unknown
  gut microbiota DNA sequence
taatattctgtagcttaccggattgctacgtgcttcgcactcacacaatccttcccgtacattcgcatatcgctctgcttcgcttcgcttttttgctcatgttcggggcgcgtctcaaagtcttttctgcacctttgtgcaagcacaggtgcagtaagacttttctac

SEQ ID NO: 12826 - DNA, 1005 bp, Unknown
  gut microbiota DNA sequence
aagcatttgcagacaaagctataattggaatcgtaactgcatcggaccgctctatacccaaggctcgaatggtttttgctgcctggtgtccatccatgtttggcatcataatatccatcaaaataagatcgtatgtgcctcgtggctgatttttaaacaaatccacaacttcttttccgtctgatgcgcgtgttacggtcataccggcatcttccagtatcatcgtagcaagttcagcattcagatcattatcctcagccataagaacatgaatacccgtcaaatctctatgcagatgttgtttttgttctgatggaataacctgttccggcaactccagcgggatctccactgtgaatgtagaacctgccccttttttgctctcaacagcaatcgaaccgcccatcatatccacatatttttttgtgatggccataccaagaccggttcccttatatagggttctggcattagcataatcttcttgtgaaaacggatcgaataatttttttttgaactcttcgctcatgccaataccgttatctcgaacaacataacgagttatgatatgtttctcatccgctcccgggtaactgctgatatccaaagtaatctctccgccgtcctttgtgaatttcacagcattgccaagaagattcaccaaaacttctcggatacgcaaaacatccgcaaggacatatgggttcttcaggttttctcgatgtacttcaaacttcagatcccgattataaagaagtccattcataatcgcctggacgttatctgtcaattgagtaatgtccactggctcgggcgaaatagtaacttttccgctttcaatgcgactgaaatccagaacgtcattcaacaaagagagaagatgattcgaacttttttgaactttctccaagctgtcatgaatatctgaaaccttgttctggtgaagcgcaatgtttgtaaatccaataatggcattcatcggcgttctgatatcatggctaatac

SEQ ID NO: 12827 - DNA, 27304 bp, Unknown
  gut microbiota DNA sequence
gccggcgaatacgccgtccttggaggtgatgccgtgctcatcgtcagccacgatgcagcccttgcggttggtttccaggcccggggtggtgtggcggatgagcgggttcgggctggtgccgatcgccgcgataacgcagtcgaggtcgatcacaaactcgctgccctcgaccgggatcggacggcggcggccggatgcgtcaggctcgcccagctccatctgctggcacttgaggccggtgacgttgaaattctcgtcagacagcacctcgagcggtgcggtcaggaacttgaacacaacgccctcttccttcgcgtggtgaatctcctcgagacgagccggaagctccttctcggaacggcggtacacgatgtaaacctcgtctgcgcccatgcgctttgcgcagcgggccgcgtccatggctacgttgccgccgccgacgactgcgaccttctttgcgtggtagatcggcgtgtcggaattttccttgtaggccttcatcagattgatgcgggtcaggtactcgtttgcggagtaaacgccgttcgcgttctcgcccggtacgccgataaaggtcggcagaccggcgccggaaccaacgaaaattgcttcaaaaccgtcgccgaacagctcgtcgatggtctcggagcggccgacaacgaagttcagcacaaattcaacgccgagatccttcagcgtgtcaatctccttctgcacgatggccttcgggagacggaactccggaatgccgtacatgagaacgccgccggcggtgtgcagtgcctcaaatacagttacctcgtagcccaggcgagcgaggtcgcctgcgcaggtcagaccggccgggcctgcaccaacgatggcaaccttgtgaccgttggacgcaggttttacaggcttctcggtgctgttttcgcgcgcgtagtcggcaacaaagcgctccagacggccgatggctaccggctcgcccttgatgccgcgcacgcagtgacactcacactggctctcctgcgggcagacacggccgcagacagccggaagcgcggaggtttccttgatcttcgcggcggcttcgaggaacttgccctcagcgaccagcgcgatgaattccgggatcttgacctgcaccggacagccggtcatgcagggcttgttcttgcagttcaggcagcgctgtgcttcctcgatcgccatttcggcggtgtagccgagcgttacctcttcaaagttcttgttgcggacgtccggcgcctgctcgggcatcgggcactttttcggattcatattcggcatgattacttgacctccatcttgaacaggttgcagtgctcctcgcggcgtgcgacagcagccttttcctgtgccttgtacatggcgccgcggcgcattgcactgtcgaaatcaacgaggtggccgtcgaaatccgggccgtcaacgcaggcgaatttggtctcgccgccgacggtcagacggcagccgccgcacatgccggtgccgtcgaccatgatggtgttcatggaaacgatggtcttaatgccgtagggacgggtggtctcgcagacgaacttcatcatgatcatagggccgatggcgatgacggcatcgtactgattgcccgcgtcgatcagctccttgagcacctgcgtgaccagcgccttgcggccgttcgagccgtcgtcggtgacgatgtgcagattggtgcaggcgttcttcatctcgtcctcgaggatgatgatgtccttgctgcggaaaccggcgatcaggtcgacctcgacgcccatttcgtgcagcttcttagcctgcggatacgcgatcgcacagcccagaccgccgccgacaacagcgacctttttcaggccctcgagttcgctctccttgccgagaggacctacaaagtcatgcaggcagtcgccctcgttcagctcgccgagcgcctgcgtggtcgcgccgacctcctggaagatgatggtgatcgtgctgttttcgcggtcaaaatccgcgatggtgagcggaatgcgctcgccctctgcgctgacacgcaggatgatgaactgacccggctctgccttgcgcgcaacgtgcggcgcctcgatcaccatcagcttggtgtttgcgttcagcgtttgctttttcaaaatctgatacattggtcaaatatcctttcgccaaaccgaatcggggtataggaaaagccgcataagcggcttttccagcaatatgagaagaaaacttatgggttaaaatatgagagaagttttaagagagaacgttttgaaatggtttaaagaaatgataggggcagaaacgttggagcgtttctgatgagggatcataaggggttcaaaaaaatgcttagaccagagatttcagctttgccagatattcgtctgcgttgtccgaagtaatgaccttacagccggtatcgatgaagtcatccagcttttcgccttctacaacgtcgagcaggctctcaacgcactggtagcccatgttgtacgggtcctgtgcaacggtgcaggagatttcgccgtcaacaactgcctgtacgccggaggaaatgccgtcgaagccgcatacgatgatgccatcaccatcacggcctgcctgcttgatggcacgggatgcgccgagcgcaacatcgtctgcgcagcatacgatcgcatcgatgtccgcgaaggactggagaacaccatcggttacggtaacagccttgtcgcctacgccgtcggtatactgcgtggagataatctcgcagccaccttcttcaagtgccttcttgtaaccagctacacgagcctcagaggtggactcgccctggatattcgccagaataacaaccttgccgcccttaccgatcttctcggctacatacttgccgccctcgtaagcagcgtcctcgtgcgccgtgccgataaaggtttccgcctgatcaaaattggtgtcgatcgccagaaccgggatcttgacgccggtcagtgcatttgcgatctggtctgcctgcagcggtgcgattgcaatcgcctcgcacatatctgcgtttacaatggtctctaccatgttcagctgaccgtcgaagtcggtatcgctgtttgcaccgcgtacgtcaacttctacgttgccgagatccttttccgcctgctcgatgcctgcgataacgtagctccagtattcggaagaggtggtcttgagcactacgctcagcttatgggtgtcgccgctgctgcttgcctgggaatcgccggagtcgttgccggatgcgctgctgccgccgcatgcactcatggaaactgccatcagtcctgccagcagcatcgctgcggaacgcttaaaaaggttgcttctcttcatctttctttcctcctgttagacaagttgtctattggaatcatattaccgggtaatatgaccttctttatatcaacaggagcggtttcacacctatccccgcccccggtgtataccattcgcgggggattatgcctctaccttttcccactgaccggtagtctgtgccttgatcagtgcatcggagatcttgcaggcctcgtagccgtcctcagcacccgggcccggaacgtcggtcttgccctgcaggtaatctacccagtgctgcagctcttcctgatacgccactacgaaacggttggtccagtcctccgggatggcctgaccgcactgcaggtaagaacggacgatcggctctgccgctaccggcaggcggatggtgcccttctcgcagaccagctcgcacaggatctcatagccgtagtagctgttgccggaaacctcaacgtcgatcagtacgccggagtcggactgcataagtaccagctgcgggtcctggcaggtgccttctgcgaagcaggtagcacgcgggaaacgaacagcgacttcgttcaggttctcacccagcagccagcggcagatgtcgatctcgtggatggcaatgttggtgatgtgctgctcggtggtgtggttcttcggatggctgcgggtacggctgatgcagtgcgccatcagcggagcacccagctcgccggagtcgaggatcttcttcatcttgatgtagtccgggtcaaagcgacgcatgaagccgatctgcagcagatgcttgccggaagccttctccgcctctacgaccttcttcgcgtcctcgagggtggtagccagcggcttctcgcagaataccggcttgccggcctggatgcactttaccgccagatcagcgtgggtgccgtcccaggatgcgataacaacagcgtcgatttcgggagaagcgatcagctcctctgcgcttgccattacctttgcgccgtaggccttagcgacctcctcggcacgctcggtgttcagatcgtaaacagcagccaaacgagcgccgtctacataggttgcaatgttctgagaatgggtgtggccgatgttgccgcctgcgcccagtacgccaatagcgagttccttcttgctcatgatgtgaatctccttttttcctttatctaaaaagcggttgtaatttacttcttcttaccgtccagatatgcctgatgcagctgcagacagaacttcaggctcatcgtgccgtcgtgtgcagtggtctccggcttgcggccggtgcgtacacagtcaacgaagtcgtcgatctccgcctggaacgcctcgccccagcgagcaaggaagctctcctggcactcttccacgaagccgttctcggtgaactgcgagaggtaattcttgcgcggtaccgagttgacacgcagcgtgcccttggtgccgacgatttcgctctcaacgtggctgcaggtcgcggtgcgtcccacctgaatgtacgcggtggtgttgttatcgaacttggtcagcgagaaaccgttgtcgtagtcattgtaatctgccagaccggtgcagacataagcatcgccggttgcaaaggaatcgaccggatcgccctcgaggaaccagcgggcaaggtcggtgtcgtggctgcccatctcgataaaccacggaacgtaaatgcccttcttgacgccttccagatgtgcctcgagcacgctggacgggtcgagcgatacgcctttgaacaggatcggcttgccgatcgcgccggcgcggatcttctccttcgcctctgcataggacgggtcgaagcggcgcatgaagccgaccgtaaagcacttgctgccgttctcggctacggccttctcaatctcctcacagtcctcaagggtcttagccagcggcttctcgcagaagatatgcttcttggccttgcaggctgccagacacggtgccttgtgagcatctgcgccggttgcaacaacgattgcgtcaacctcgggattgtttaccaactcgtctacattggtgtagccatacggtacgccgaattcctcctgaaacgccttgaccttgctctcggtgcgggcgcaaaccgctacaacctctgcgtgaggattacgctgcaggctggtggcgtgcattctgcccatcataccgatgccaacgataccgaaacgaatcttctccatttgtgatcctccttatcagatacctgcggtcttcttgatgtactcgcgcgccatcttggcatactcgagcggatttgcctttgccgggtcctgctcggcctctacgatgaaccagccctcgtagtgtgcatcgtgcagagccttgaatacgcccggatagtcgacgcagccgtcacccggaatggtgaagcagccttccagaaccgccttgcggaacttgaagccctcggcgtaagccttttccatcatgtcgggacggatgtccttgaggtgaacgtggccgatacgcgggccgaactccttggctgccttgacggcgtcctcccccgagaaggtgaagtggccggtatcgaaacagaggtaaacatagcgcggatcggtgttgtccatcaagcgcttggtctcctcgaaggtctgaaccacggtcgccatgtggtgatggaagcacagcttgaagccgcggtcagcagcaatcttgcccagcttgttcaggccgtcgcacagcttatcccactcttcgtcggtggcgatcggcttgttgtcaccgaacatcgagcactcctctgcgaacaggcagcgggtcagctcgcatacgttgatgcggcttgcaccgacagcctcgaggaagtccagctgctcgataaatgccttttcgttctcctcgtagggggtcgagcacaggaagctcgagaaccactgagatgcaatcttgatgccgcgcaggtcgagtgccttgttcagtacggccgggtcggtcgggaacttgccgccgacctcggtgccctgaaagcctgccagagccgcttcggaaaccatctgctcgaaggtgagctcaccgccgagctgcggcatgtcgtcattcgtccagccgatcggcgcaatgccgagttttacattattaaacatagccttgaacctcccttagcacttttcccaagtgcccgacttaacggatttgagcactgcgttgataatgccgtcaaccttagcgcccatctcgaagttgcagatgtactcgccgccgtgcatagcctgcatgagtgcgtgagcctgcaaggtcttcatatcgtcgaatgcgattgcgatgccgcctgccggctggaagtacttgaagccctcgtgctgcgggttgagcagtacggtgcggaagccgcagtcacggccgttgtccttgtctgcatcagccttgaagtaaacctgaacctcgcacatacgctccagatcgtataccacagaaccttccgtgccctgaatctcgtagtagaagtagttcttgcggccggttgcaacacgggaggacgagaagtcgccgattgcaccgttctcgtacttgacgaggaaggtgatgaggtcatcgttctcgaccttgcccatctcggtgctgcctgccttgaccggacgctccggaataacgatggactgaacgccgagcacctcgctcatgtcgcccatgatcatctgggaaacgctcagcaggtggctgcacaggtcgccgagtgcgccggaaccagccagcttgttgatgtggcgccatgcgatcggaatggacgggtcaagcagcatgtcctgatcgtaggtagcgtgtacgcgcatgatcttgcccagcttgccggacttaaccagctctgcaacgtactggtttgccgggttcatgatgttggagaaaccgcagtagttgactacgcccttttccttagccagatcagccagctcgcgggactgctcagcagacagagacagcggcttctcgcagaaaacatgcttgccgtgctcgagagcagcctttgccatctcgtagtgcatgcagttcggggtcgcaacgtcgaccagatcgatttcgggatcggtaacaacgtccatccagttggtggtgtagcggttgtagcccatgttcttcgcgaactttgctactgcatcctcgctgacgtcgcttaccagctcaaataccggcatatcatcgccgaagatcatgcgtgcattgtggaatgcggtggtgtgggccttgcccatccagccagcgccgatcagaccgattttaatttccttgctcataagtttttcctcctcaaaaaattgcaatacctttgttggattttatcgaaaacgccttgtgcgtttcttacaatgtgaatagatgaatggtttccggggtccggctcattatcgagccagaccgatcggagagaacagcgcgtagacgcaaagcatcaggatgaagcaggtcagcgcggcgggttttacatacttccacggggtcaggtcaacagccttggaatcctcgaggataaagtcggtagcacggggcttgaacttgccgatgagcagcatcagtgccaggtctaccgggaacagtaccgaaagaacatacaggtaatgcacattcagcggcaggaacttggagatcgagtacaggatgacgtgtacgaccagcgtaattttcggtgcacaggccggaacgcgcttggtgtagaagcctaccagcacgatcgcgaggatcggcatggagtagaagccgaaacactcctgcaggaagtcatacagaccggacggtgcattgctgacgaacggcgctacgcagatggatacgaccgcgagtccggtaccgacgcgcttgcctacgcttaccagatgagagtcgcttgcggtttggttgaacagcggacgatggaagtccagcgtgtaaagcgttacacagctgttcagtgccgagttaaaggacgacaggatcgcaccgaacagaaccgctgcgatgatgccgagcagccagttcggaacaactgtggtgatcagagacgggtatgccaggtcgctgtttgccaggccgtctccgaagaagcggtaagccagcagaccgcagatggtgatgaagaacgggtccagcagcttgaggaaggcggtgaatacggcgccgcgctgtgcctgcgccagattctttgctgccagcgtgcgctggatgatggactggttggtgcaccagtagaacaggttgttgaacagcatgccgaggaacagaaccggccacgggatcatcggaggcagggcgttcgccggattgaccgcgttgaacttttccgccggaacattggtgataaagtcctgaatgccggcaagaaagctgccgtttccgaggatgcagatggacaggatcggaatcaacagaccgccaatcagcaggcccacgccgtttacggtatcagataccgcaactgccttcaggccgccgaagatcgcgtagatcgagccgataacgccgatcgccacacacaggatcgcaatgctctgatatgtggtgatgccgaacagctgatccagatggaaaatctggttgaaggccagcgcgccggagtacagcacggtcggcaggtaagtaagcatgtagccgagcaggaacaggaacgagatgatctgcttggtggtgcggtcaaatcgaacctccagaaattccggaatggtggtgatgccggctttcagatacttcggcaggaagatcagtgccagcgccagcagcgcgatacttgcgtttaccgaccagctcatggcgcccatgttggtcgaatagctttgtccggcctgtccgaccagctgttcggtggacaggttggtcatttccagtgaaccggcgatgaccagaccggtcagtccgcgtcctgcaaggaagtagccttccttggtggacaggttctcctccttggtcttgtaccatgaaatcagagctacaagaccggtgaaggcgatgaacgttaaaatgataatcacaaatttcaactccccttatcgataagaaaattttatatttctataaaactctcctatctttttgtttcttttcccttttctcctaaaatgaattttcaggaaatgtttcgcttgtttttcgcgtttttcttttgttgaatctatcatatcgtattttccgtcgcttggcactatacagagtgataataaaatatcaaaaaataatacttttcaaaagtacatttttttgatataattgtacaagaaaaggagatgacggtcatcatgctcaatgatatgggtatcctcgcggactcggtccgctattaccatgacgcggacgccttcaccgcggcaaatctgtattatgtaccgcacgccggcagctaccactgtgacgaaagctatggcatgcagcgcgattatctggatatctgccagatgctcgtcgtggacgagggagaattatctgtcacctaccgcggcgagacccgcaccgccgggccgggcagtctggtgctgctcgactgccgcgaggcgcacagctaccatgccgtaacgcccatccggatgcgctggttccactttgaaggcagcggcagcaccgcctatacgcagctcatcctgaatacgcacgggttcatcctgcccacaggacagaatgccgagatcgacgagtgcatccgccgcatcatgatctcggtgcaccagaaccagcccaatccacacatcgtttccctgacgatcaacaagctgctcgttctgctcgtgatcgtgctcggcgaaaagaaaaaaagcgatctcgagatcgcgatccaggcttccgccgactatatgacgtacaatttcgcggacaagtcactctccatcgagcacctgtcgcagcgcgctgcgctcagcacctgctactatatgcgcaagttcaaggaataccagtccgttacaccgcatcagtttttgcagaccgtgcgtctgagcgccgcgaagcagcagctgctcaccacctcgcagagcatcgagaccatcgcggataactgcggcttctcgagtgcatcgcacttcattatggccttccgtaagagcaccggcattaccccgcatcagtaccgcacccagtggaaataaaaagcacactctccgtactgcgtccaccggatgaaacggtcgcgtgtacagacaggcaagcgcagcacagccgggctatccgaacggtgatattcatcagattgctgcacgaaatatcatttttatggcatgaattgtatagctgtcccgttgcacgcctatacaaatcatggtataataatgaaaaaatcaggcacagtgcctgagaaataggcaaacccgtcgaaagacggggacgcaaagccagaagggtctaaagcggcaaaagccgcaatgacagccggttgcaagcatcagcgaagacgctgttaacctcttctgcgctttatttggcagaaggaggtgtacgccgtgaaaaagaacttgacaagccgattcgcggtgcaatacactgacggcagagcagagcagagcagagcagagcagagcagagcaagtaaaactctgcccttttgtgctgttcaaaaaagatatcaaaacgcttttaggtcatgggtagccatgtcttgaaagcgttttttatttatattgaagccgttaaggcagataaaataaggaggaaaagttatgaaaaaacgattgttatcggcaatattgtcattttgcatgctgttgacaatggcgccgacggtcgcatttgcggcgagcaacggcgtgaaaacagaagcggaattgcggacggctattgagactgcggatggaactgtggacaatccaacggtaatcgagttattatcgaatatcgttctgaaatccaagttagtaattgatgaaaatgcaaatatttccatcgaaggtaataaccatattatttcaaggagtgagacaaactggaaagaagcagataaaaatatcttcgaggtaaagggtaacctgcatacggccaattgtacgttggatgcaaaaaaggcgtacatgtaatattggttacgggcggctatctatacgccgaagacacgaattttacgggtgttcttaataacaattcgtatggtgccattggcgttaaccagagtggtcgtatggatttagtaagaggatctatttataataatgaatcgctggatcgagttgcggttgtatctgacgctggtgctaaatgcacattatccaatacgtcgatttataataatacaacgtggagaggcgatgccccagtttttgtaacttatggtacgggtactttgacaattactggtggagaaatttacaataataaaaaccactacaatactcaaaatccatacaatttttctaatcctaacgatgtaaacggcgtaattagtgattctaagcaaataaaaatctcgggtgatgtatatattcatgataatacaattcaaattgacaacgaaacacctgtgcagagaaattacggatgtggtttaggaaacagcagttacagaagtgatgaccttaaaggtatatgtgtgacatcgccactgactcatgatgttgttgtagcgattacagaatggactgatcctactattgaaagacgtactctttttagaggtgtggacggctataaattgacgaaagaagacttggaaaaagttaacataacaatcggtaaatggttcggcaacacaacatatagttacgataaaaatgatttaattatttgcttaaatgaagaagaaaatactattgaagcatgtgcaaaagtaaatatagtgttaaaaaatgaatccgaagaacaaatcattgtctttcctaaatatgtagcgactgccattgctaatcctttttcgaagaacggatactcattaagcggttggaaagatgcagaaagtgaaactgtgtatgagagtgataccaagtttacactgacttctgaccacacgttctatgcgcaatggtatcacccctctacccttaccacgaatattgataagcagaaatttgtagttggcgaacccaccgagtttacatttaccaccactgcaaatgatgatgcaaatagcatggttatcggcacttccaatttcagtgatgcggatgcaatcgaaaaactggaatacctggaatccaaggatggcacgtggcacgaattgaagggcgattttggtccttctaccggcttcccaatgtcgaatgctaccagcacgttccgtgcaaccttcaaaaaggtcggcaattacacctttaccgcttctttgaagaaggttgacgacgatgaggtgctttgcagcaccaacgtagagtttgcggttgaaaagaaaacgcaggacgcgccggttgctcctacactgaaagaccgcacttacaccagcattacgctgaacgaagttgcagacgctgaaaacggcgcaaaggctgaatacagcaaggatggcggtaagacttggcaggattcgcccgagtttaccgacctgacctctggcacgacctacacatttgcagcacgctacgccgaaacggacacttacaatgcttctgaaatcgcaacggctaattttgctacactgcgtcattcctccggcggctcgtcctcgagttccaccccgaccaacaccgtttctgcatccactgcatcgaacggcaaggtttctctggacaagagcacggcgaaaaagggcaatacggttaccgtaactgtcaccccggatgcaggctatcagcttgacaagctgacggttaccgacgcaaagggcaaaaccgttgacgtgaccgacaagggcaacggcaagttcaccttcaccatgccggacagcaaggtaacgatcacaccgaccttcagtaaaattgaggacgtcaagccttcgaagactaactttgatgacgttgcttcttccgcatggtacgctgacgcggttcagtacgtcaccgacaagggcctgatgaacggcaccgacgataaccagttctccccgaatgcatccaccacccgcggtatgctgatgacggttctcgcacgctacgcaggcgaggataccaccggcggcgctatctggtacgagaaaggcatgaattgggcgaaggccaacggcgtgtccgatggtacgaacccgaacgctaacatcacccgcgagcagctcgttaccatgatgtaccgctacgctggttctccgaaggcagacggaaagctcgacagcttctccgactctgcaagcgtcagcagctacgcagcagatgcaatgcagtgggcagtagccaacggcattgtcaatggctcgaacggcaagctgaacccgcaggataatgcaacctgcgcagaagtagcagcaatcctcatgcgcttctgcgagatgagcaagtaaacctcatacagacaaaaagcacagcttcggctgtgctttttctgttttttctccatttcaagctatatattataaaggtagaagctcctgggatattctcaggagcttactttttgtccaaaaggaggaagcgaaaatgttcgacgatcaaaaatttctgacgcgcgggatagaaagcgagattcccgcatggcttgttcatcttatgtggcacatggtgctcacgatggaggtcgaggaaaaagactacctgcaggtattcaggctgacgaaaacgccgaccggtcagcacatcgtccacgagcaggagcagccgccctatcgttatgaactcgatgtaccgtgtgacgatgccgtaagcgcgaaggtgttcgtcatcgacgatttaacgcattccactatgctgcttgccgaagagtattgatattaaccaaacgaaatggaggactaaccaatgagtgaaacaagaatttgtgcaaactgtggtgcggagcatccgattgacgaaatgttccaagtagagaatgactggctctgcgaggattgcgccgaccggttgaccgtaatctgcgcccactgcaacgaacggatttatgaggaaaatgccgtcgaggatgacacgcacatactctgcgatcactgctttgatgagtactatgttcgctgcgatgactgtgggcgtattatccaccgcgaccgcgcgtactgggacggtgatgacaacgcttattgcgcgtcctgctgggatgaacactgtgacattatccatgaatacagctatacgcccgaccttgtattccacggaaaaggtctgcggcatttcggcgttgagctcgaaatcgacgacggcggtacggtaaacagcaacgcgcagaagctgcttgacatcgcgaacaaggacgcagaaaatctctacatcaagacggacggcagtctggatgagggcctcgagcttgtcactcatccgatgacactcgagtaccatttgaatgaaatgccgtgggcggaagtccttcgcaaggcgcagagcatgggatatttgagccatgcggcaggcacgtgcggccttcatgttcacatctcccgcttggcgttcggctgcacctacgaacagcaggaggccgcgattgcccgtttactgtatttcgtcgagaaattctgggcagaattgctgcggttcagccgccgtacacagtcgcagatgaatcgctgggcggcgcggtacggtatccggctaaccccgtccgagcagataaaccacgcaaagaattcctgcgcggggcgatatacggcggtcaaccttacgaattcggacacggttgaaatccgtatgttccgcggcacgctcaagctgaataccctcaaagccaccttgcagatggtaaatcatctggtcgaggtggctgttgctatgtccgacagtcaggtgcaagacatgagctggttcgattttctcgatgacatcaccgaaccagaacttatccagtatctcaaggagcgccgcctttatgtaaatgaacccgtaaacacttcggaggaggagtaatatgtgcagtcttttcggcttaattgattttaaggagtgcctcagcacccacacgaagaataaaattttgaatacgttagcgcgtgagtgtcaagttcgcggcacggacgcgaccggcattgcctacaactttaacgaccgtctgcggatttataagcgtccccttcccgctcgtaagatgaaaatccatattccgcacggtgtaaatgtcgtgatgggtcacactcgcatgacgactcagggcaacgcgcagtttaatcagaataaccatccgttccttggtcacgttgacggaaatagctttgctctcgcgcataacggcgttctctggaacgataaagagttacgcacggaagaaaatctgccgatgacgagcgtcgaaacggacagctacgttgccgtgcagcttcttgaacagcagaaaaccctcgactttgacagcctgaaatctatggctgaaaaggtcgaggggtctttcgtctttacggtactcgataaagataactccatctggttcgtagttggagataatccgttgtgcgtgatgttctatgatggcttcttaatttacgcttccacgcaggaaatcctctgcaagacgctgaaaaagctgcggttaaaagcgcccatcgacattctcgaaccacaggagggcgagattatgaaaatcaaccgcaacggccgtatcactaccgagacttttacgccccacacgacgtacgagcactggtggcgcaaatatcccttttatcgtagctactacgaggacacgtccacaaactacgacgacctgttcagcgttgccaaatcgttcggcgttaccgctgatgaagtgcaggcgctcttggactacggctgctcggaagaggaaatcgaggaaatgctgtacgacccggaactctttcacgagatgaccggcgagctgctatatgcatattgattgaagggaggcgatgcgcatgattgcactcggcccgatctttcaggccgtcggcgcggtggttgacctcatcatcgaggccgtcgagaacctttcagatgactgaaacgaggtgaaaggttgaacccaggcaaaatcattctcagcgtgctgaccgttatcggcctgctcgccgacatcatcgacgatgattgaacgcaaaaataccgactcatcaagagccggtattttttgagcatgtcaatagggtatgcccatctgaaacaacgaaaaactatgtcaatagggtcgctttcggacttttgcaatatgtcaaaatgtgcgatgaccctattgcaattaaccacgtttcaactgctcgataagcttgtcaaacagcgatacaaactcgctctcaatctgcgagtaaatttcctgtgcggttgcatcatcataaaggtgcgaggtttggttgcgagcattcagcaatacaatccacgcctgttcatcatcaatcaggccatacgagaacgccttgcgcatcgttgctttcgggctgtttagttcagtaaaaccttgatcgagcaaaaactcgtgtgtggttctccacgccagttcgcaagtgaactcaaagcgctggattacaccatcgcgaatgattttggcaggattctcttgatacgcctgcacgccttcacgtaagcgttcaacagcgttggtgagattttcgaaattcgtattgtaacggtccagcaagcaaatcccgtccttctctatattttgaagcaatgctgcatcggtgtgttcgctgacaaacaccagatcaaccgaatacagcgagtccaaatcgttttcgacagcatcgctgaattgcgcacgctgctgcgctgtgcagccccagaccgcaaaatcgtagtcgctacgggcgcgataatcgccgcgggcacgcgaaccgaataataccaatttcggcactccataacggtgcgctaactgttttacctgttcgattgtcttatccatcagcgtcaccgtccttattattttcattataccatacttaaaggagagatacaccatgaaaattggctacatccgcgtcagcaccgaggagcagaacaccgcccgacaagaggtcctgctgcgcgaactcggtgttgacgaggttttcatcgacaaggcgagcggcaagaacgccgaccggtcggagcttacccatatgatgaattacgtccggcgaggcgacacggttatcgttgagtcaatcagccgctttgcgagaaacacgcgcgacctgcttgaccttgtggaacggttgaccgagaaacaagtagaatttgtcagccgcaaggaggcaatcgacacgactacgcctaccggcaagtttatgctgaccgtgttcgcggcagtcgcagaacttgaacgcgagtatattttgcagcgccagcgcgagggaattgctatcgctaaaggacagggcaagtacaccggccgcaagccaatgcctctgccggacaatttcgagcgggtggttgctcgctggcgtgccggggaaatcaccgctgcggaagccatgcggcagaccgggctgaagccgaatacattttaccgcaggtgctcccagacttctcttgcgcttaaacgcatcaaatccatataatgcgaatacgagtaagcgctatagaacgagcgcagacatttctgcctgcgctcgtcagatgttgtattggaattttactgaatcagccattgataatcctgccgtccatcaatcacgtattcaacaaaaactcgttcgcctttaatttgataaatgagtagataccatttaccaaacaccattttgcgatacttttctgttacgaagacactcgaacgcaagattgggtttcgatatggaaagctttgcagagaatctgccgctttccagaagtcagctgccaattggcgtgccaatcgttcttctaaccgtgccatgaatactgcatgatcaaccagctgctgcgctgctcgcttggatacgataacctggaatttgttttcaagctccggcatggcaggtctcccgaattgcctgatccatcatggaagcgacttcatccaccgagtagtccggtgcaccgtgtaagcggtcttcctcaacagcaagcagttcctcgcgtagctttagcattttttcgcgttttgtaaatgaattgatatccattacaacgagatcaccttcgccgttcttggtcagataaaccggctctccggtggatctgcacagctcggcaatatcattgtaattctgacgaatacttgcactcggcttgatattcataaaagcacctccatatagtaatatcataattatattatactctaatagtgctatgatgcaatagctgttatctcgaatctcaggataaaataccgccgggtctcccaaatacggggaacccggcggctgcatgttactgatttactttttcagtttttacttgctcatctcgcagaagcgcatgaggattgcggcaacctcagcacgggttgcgttattctgcgggttcagcttaccgttcgagccattgacaatgccgttggcaactgcccactgcattgcatctgctgcataggtgctgacggaagctgcatcagagaagctgtcgagcttgccgtctgccttcggagaaccagcgtagcggtacagcatggtgacaagctgctcacgggtgatgttggcattcgggttggtgccgtcggacacgcccttagcctttgcccactccatactcttctcgtaccaggtagcgccgccggtggtgtcctcgcctgcgtagcgcgcgagaaccgtcatcagcattgcacgggtcgtggttgcgctcggcgcaaacttgtcgctgcccgtgccgctcatcagacccttgtcggaaacgtacttgaccgcatcagcataccagtcgccggtcttgacgtcagagtaagacttgctctcggtctgactgccgttgtctgcaacgaaggtcggggtaaccgttaccttgccctccggcataacgaaggagaacttgccgttgcccttgtcggtcacttcgacggtattgccctttgcgtcggtaatcgtcagcttgtcgagcttgtagccgtccttggcctttacggtaacagtaaccgtgctgcccttggaagccgaggtcttgtcgatcgaaaccgaaccgttatccgacttggaagtggaaaccgtggtgctcgagccggaggacgagccgccgccgctgctcgaatgatgcacggtaaagtttgcggtgatggtggtgttgccgttgatggtgaaggtcttcgtagcgccgccctcgactgcctcgccgtttaccgtccagccgctgaagtcatagccgctgtctgcggtcgcggtgagggtgacaagcgaattcgcctccatctgtgcgccattttccttatcagcagttaccgtgccgtttgcaccggcagaatagttcagcgtatagaagctgttgaccggaatttcagcgtaggtttcggcgttctggaacgtataaccgtaattctcggaataagaagccatattcgggtcataggtaaacagaaccagtgccagcttgtggcctgccttgaccgtatagtgggtcggctggagatacagagtataatcataatacttgccgtcctgcagttcaaccttgtttgccgcagaagcggagtcaaagcctgcatccgggtttgcaaggtccatccagccctgtgcaattactttatatttagaattgcttgttacaaagttaatgacctcataatcctgtgcaccactgccgaaccagttgatttcacccgttttctgtttagtaacgctagtgggataggtcgtgaattcagtatcagacatatcaaccagcattgcgctcatcatcagcgcatcgcggctgccgctgtccgcgctcataacggcaatatcagagtcgtcattattcgcgcgcttaagcgaattcatagcttcctcatggttaacaccacgcggagcaactgccctcgtattctcatcagaagctacagcagcctgctgggtcaaatgctgaatcggggttgcctttacatgaaccttagtcgtgccaacaataacagtgtcagtatccacatccatcgtgtaaatagcacgtgccgaagaagattccgtattcttcaggaaatcagcagtccaattatcacgtctaccatatctgtagctgctgtcaacggtggtttcgccatcgtcgccgcaagcaagacgcagagtttcggtatttccatcccaatcgctaagagtagtccaactgccgtccgtattgttctgaaccgtaacagccgccatgttctcagcgccgttgctctggccatacagataatggctgaaccatttgttcagaataccgttataagactctccatcaatcagcagagaaaccttagacgagtcatagtccggagtgatatgtgcgccctgatggagcagcagcttaacattctggcctgcattcttaaacgaattatacatcagctggaactgcttagtgcgaacgttcgtatcgttcagaccatgaacaatcagcgccgggcagctaaagttgtcataggtcagaccgttatcggtcttcttgcccttgttgcctgcagtatagtcacgggttgcccagtgcgtgccgtagtcaccattcagcgcaatctgatcattgtaaatacggttgagatatgccgggtaaatatccttgatggggtcccattccgtatcattcgcatacacaccagcgttgatatagcgtcctgcacacatgaacgccagatgatcactatatgctacaccgccggtggcaataccctgcgaattggtgtactcgtaccagcttgcaatgcctgcaaccggaacgatggtcttaaggcccttaacaccggtggaagcgactgcgaagtcagtcgtgccgccgtaggaacggccggtcatagcgacattgccgttcgaccagtcggctttaattgcaatattgctggttctgtcggtataagcagcacggtcaccggtcagccactcgataacgcacttgaatgcgtcggtctcaacgtcagcgccgcaagtctccaggccctcagagccgagcgtgcccagaccgcctacctcaatcgctgcatagccgcgaacgaggaagtagtcgtaccagtcaaggtcctcgtagtcgtagaaggcgccccgtgtgctttcatacgggctaaggtaataccactcttctgccgttgctttcttagcagtgtccatggtatttgccgtgcctttagcctcgcgtgcagcaggcttcacatacagattgttcaagttatagccctgatcgccattggtataatcgatgccgcgagccttgccgttatccgtgcagccggtgatgtacggacgtgcatcatagatggccgcagccttgtacttgccctctgcggcagcacggggaagctgcaccagcgcctttacgagatcgagcttgccatcgccgtcggtgtcgtagttggtctcaacgtaaaccgagtagcggatgatgtcgctcttatcgttgctgtagccgtccttggtcggaacgccgcttgtgtacgggaaaatcggctgtgcaacgccgtttacgaacagcggagtgccgttctttactgcattgcgcaggttaacagctgctgtgctgtttgccatcgtgtgcagctcttccagcgagcaggctgcggaaccgtcgaacttgtcatctgcgatgcctacgctcttcgccatagcgatgtagtcgctgtcgccgctcgggaactgcgtttccttcatgccgcaatccagcagaatgtacttgaccgcattcagcttggtcaagccgccgctctgtgccgaagcttcgagcgccgcataggtcgatacctgctgtccgtcatcgccgctgtttgcatcaacagcgcccgcctgacaggtgaacgacaggatcatggaaagcaccagcgcgaggctggccgctctcttcttcatgtgtactccctctttcgtggtaaatataggatttctgcacctgtctttatcattcaaagatggatattttaccgctccttcgaattttaatacaaatgctttttaagcatactcgtttactatggaaaagtcaaggaattttgaacagaacaggtgaaaaatgtctaaaaatttcacccagaaaaccaaaacaagagccgacagaaaatccatcagctcttgcaagaggataaatgtaagcgtatccggcaatgactcaatcagtcgttgtagaaatccagacggtcggtcagcggaatagcctcaatcaggccggacttctggctcttcaggcaggagtccgtagtaacagctgcacagcagccgtcccaagcagaagcagcagccttgcagtgaattccctgctcacggcatcaattcgtcaattttcttcagcagaatgtcgcgtgcgtcctttatcaatcgctgctggataatcgtttccatcaacacactatacaattcgtcagaattcatctcgcgagtcagccagtgttcgccgttcctgctctgttcgttccatttctccatccacgcatcgatattctttcttccgttgttttctgctgctttcaggcagatctctttcatatgcgttacatctggacatccagagtcccactcttttaagtattctgctatcgtttcgtctgaaatacgaatttgtctcgattcaccactaatataccgtgcaaaatctgcattattcatcattgcccagaaaccatcaatatgtacgggggaagccgcctcgcagcaatataattcgctcggatcgaattgcaggcattgctgagcattttcgtaatacctccacgcgaggctcaccggatcatccattaacctgtacttttcaagcgtcgttttccagagctccgcctcttcctcagacagaattctgtagccatgcaatttaagaaaatacagaaggttttctcgcactgtttcttcgttatcatgaaggagctcacaaacgtcgagcagcagcagcagccgcgctttccgttgtttttcctcgctcggttccttttgatatacatttgcaggaaatgatacttcatctaggttcaaatctcgtttcccatctttacgagcggcaatacagtccctcttttgaatacagatcagcaagaacacgaacgcggtatgcttagcagcatgtcgagcaagctgcagcgcctcttttatattctccatatccggaacatttttacctcgtgtcgccttaagataagctgtcacgctctttttcagatactcagcatcacaaacgttactgcaatcactccattcgcctataacctcgaacgtagttttgctgtggctgttccattctgtgcagaattcccgatattcgttcagggatttctgacgttccagatactgtttcagcgcctctgcgtcgcgcttcatatattgaccctcgaattttttgtgatccttctctaagcgccggtgctcccgataagcgctcataaacgccgaaaagtagcgcacatagaaatccacggcccggttttccgtcaacacagcatccggaacccactgcttaatctgcgctgtaagcgcctgcgcctcctgtccgtcgggcgcgttctcgttggcattatgcagctctcgcgcataatactgcatgccgttccgcgtcgcgcgagcatattccgccagcgctttcagcgtgctttcatacattggacgaaccatctgctccagtttgtcgatttgttcctgtttctttgcgctgcaatatttgtcccaagctcgctcgacacaaacagcatatgcctgctgcgtgccttctccatactgcttcaacagctcatgcaaatgcgaacgattgacccggtcgtcttcatagttgctgctaaagagtgtgctgcgatccgcaagcaacgcatctacgattttcatgtccgtaatattttccgcatagctgttgatgaaggccaccttatgtcccagcacccgataaacttcgttgggtcggctgtgcggcaaaccgcatgctgcggcaaacgcagtgcgcgcgtcattgacggcgtcttcctgctccacactcgcgcagctcatatcgtccgccagaattttccttttctccaacgtgtactgtctttggctgccccttggcctgatttcaacgaaatgattgtctttttgcattctcatattcccctctcatcggctattttcgatgaattgcgtgctccgtcgtatgcctcatcaaagtttttcgaactttttcgtctcataaatctatattttcctcgcaaataccgaaattcgcattaaaacaacgtctgaatagtgctttttatttttctcccttataataaatccatcaagcaatttttcgagcagcaatgctggaaacagcggaatttccgggaagttttcccggaaaaacgcgaaaggagtaaagaccctatgcaacatgttaagcatttcaaccgttggtcagacccaccgcacgacggcaagaagaccgcacgccgccgcactatcggcaacgtcaaccttttcattgtcccctccctgcatccgaagcaggagtcggacaagactgccgtcgaggcgccgcccgatgtgatcgctgctgacaccgcaatggaagagctgaccgagtgtcctgcgcttccggcatccgctgaggacgaagcagcaggctgggactaggacaaaaccaatattgacgaattcgaggaggaacaataaaatggaaatttacaacatcgcctacaatctttatgttcaggacggcgagcatgagcccaagcagatgactaacttcaccccggtgattgaaaccgcgtactatcctctggagagttcacaggacgacatcccggcatacctgggtatccagctgattttagaggacggttccgtgcgcagccttaccctgcccatgacctcaaatctggcacgcacaattgtcgccgaagagccgcgcgctgtgctcctcaagaccggttatgcacctctcgtccagaagtacatcgtcgaccagctttccaaaactgggcgctccggtgagtgccagcgcggcgtttacctgccgggcaacggcacctaccgtctggcggatggtcagcatgtcaccgtgtggaacggacgtgtcgcaggttcgaccaagctcgaggttccgtatatgatcaagccgaccaacacctatcgcattacgaatagtatcgacagaccggtgccgactctggtcaggacgttgcttgagaacgatgcagctctggttttgcctgtggcctatgccctgcttgtctcgcgtcgcgatgttctgactgccgagcagcatccgctgcagggcggtctgtacataaccggcgttcagtcgagcggcaagacgacgcttgcccgtcgtgtcttcggatacacggaacgtatcggaatccctggcaaggcggctctcgtgctcgaagcggtgagcacagaagcatccgtgcgcgacacgctttcggagaacccgggatgtgtggtcatcatcgacgacctcgcccattcctcctcgcgtaccatcgaagcgcatcgcaagaagctcggcggtgccatgctccgtctggctgccaacgaaggcgactctaccaagaagggtaaaaccgggaagaccgatcatcgcgattgcacctccggaattgccttgacagctgagttcgtgctggacggcgtttccgagctcacacgcagtattttcgtgtaccttgaaaaaaagttaaatctgaccgaggacgtccgtccagctctgatcggggcaatccttgaagattttgccgactggttcgcggataactatgagcatgccatcgaactgcttcataaaatcgctgactcgccggatattctaaaaaatcttcgagttgatggtgcggatgagttcactgaactgcttacgcgcgagcgccgcattcaggacaacctcgctctgctccagtgggcttttgtatgcatggtcgagatgatcaaatcgaccgtcaagctgtcccctcaccgggagcaggcgctctatgaaaagttctggatggccgttcatctctctgtcagcaaacaggtggatgaattcgccaaaatccgtacgcatctcaagaagggtaatatcgctcatcttctctgcgaagcgattgactgcgatgaatttcagctttgtcgtaaaaaatcgaaacttttcaagagaaacggtatcgtctggaaagaaaagaatggcgtcatcaaacaggtcggcatcaagcagaccgcacttgtccagtttatccgcaaccagaacggctatcagaactactccagtcgaaagattaccgactatctaaaggatatcggctgtctgaccataaatgaggataagagcaataccgttcacctcggcaagatcaaggacggcaaacgttccctgcctcgtgttctgctgattgatgtagagacgctgcgtgacaacgccgagaaatatgaacttttcgcagaacaggcgcgcgagtaatcccgttctcagtatagcacctgcggcatcgagccgcaacacaggcgcggttccgcaggtgtctgatatggcgaaatccgattatcctccaccagccgtatatatagtataacagtggaaagaatatacaatgtctccgttattcacccaaaccaaaggaggtcaccccatgctcaagcccacacccacctgtccccttcccgacatccgcgaggcgcgcattgacccgaccctgccggtgaacgagcggctgcgcctgttcgccgccgccatcggcgatccgcaccgcttccgcgtcggcgacactgaggtcgaggtactgttcgacgacagcgcgcccagcctgcaagcctgcctgagccgcatgtgcaggcagctgcaatagtgtcaaaaaccggatattacgtcccgaaacttgcggtacgctgcgcgctgtggtacaataaatgtgcaaacacagccatcagcgtgccgcctgttttttggaaggaggcaccccaatggctcgaaaaagtaaatatgagcattcatccgcaaaattatccacaaccctgtggacacccgcactctatattcgtctctcacgtgaggacggcgaccgcgaagaaagcaacagcatcgccagccagcgcgaactgctgaccgagttcgtagacacg

SEQ ID NO: 12828 - DNA, 64209 bp, Unknown
  gut microbiota DNA sequence
ttgatccaatttacacctaatttgcacttcaaaacgcagaaaaagaattgagaaaagcaatagctatttccgcaaaagtgtggtagttgtttgtgttacaaaaagaaaatgaatccaaaggaagtgaaatacatggcaaaacgaaggcctgccggtgacggcatggtgcgaaagcgggaggacggacgctgggagggccgcatcgtcatcggccaccgggaaaacggcgagccgctgttccgtcatgtctacgccaagacgcaaaaggccctgctggacaagctgcaccagaacatcgagtgctaccgcgatgtggagctgaccgaggacagccggatgacgctgggccagtggctggatcgctggctcacggagtacaaggtgggtacggtgcggcccggtaccctcgggggctaccgccgctacatcgaatactacatcaagccgcagctgggcgacaagcagatctccctcctctcccagcaggacatccagcggatgtaccgccgcctaaaaacagaggggcgcatccacgagcatcccgagatggggcaccagctctccgactccatggtgcgccacattcactccaccctccacgccgcactgaaagacgcagtgcaggcgcacatcattccaagaaaccccaccgaaggcacgacagcgcccaagcccaactacaagcccaagcgcattctcacccgtgcagagttggatgccttccttacagtggtggagcaggatgaggtgtggcgtgacttcttccaaacggagctgatgaccggcctgcgccgcggcgagatctgcggtctgcagtggagcgacttcgatgggaataccggtacgctgaaggtatgccgaaccctccacagccagcggaagggcgaatacaccgtcggcgagacgaagaccaatcaaggcatgcgcaccatcatcctgccgcacagcgtgactgaaatcctacggcggcgaaaagtggatgccatcagccaatggatattccctgacccggtgaagccggaagaccccgtcgatcccaacgcggcctatcgccacatgaaaacgctcctccagcgggcaagactccccagcatccgtttccatgatctgcgtcacaccttcgccacccacgccctcaccagcggtgtggacgccaaaaccctgtccggtatcctgggccacaccaacgcctccttcacgctggacacctacacccatgtcacaaccgatatgcagaagacagcctgcggcatcgtgggcggcttcatggaagatatcttcggaaaggagttgaaaccgtggcaagaaagcgaaaagccggcgacggaaccgtaagacagcgcaaggacggtcggtgggaggggcgcatcgtcatcggctacgatgacaacggttatcccaagacgaaaaatgttctcgctaaaacgaagaaggaatgcgttgagaagctccaaaagctcaaggaggaatgcagcgggctgaagccggagaaggtgcggtctgagatgcccttcggggactggctgacatactggtacgagaatcactccaagcctaagatccgcccaactacgcaggagacctatgagagccgcatccgcctgcacatcatcccggagattggggacattccgctgaataagctgacacagaacgacctgcagcagttctacggtcgactcaagaaaaacggccggaagcggttcaccgacaagtacggcgaagggctgtccgaccgaatggtgcgtatgtgtcacgccacctgccgctccgcattggagcaggcggtgcaggatgggctgatccgtgtgaacccggccctcggctgcaagctgccgcccaagaaagcgcgggagatgcaggtgctgacacgagaagagttgcagcgattcctcattcaagcgaagtttgagggctactacgaggtcttccttctggacttggccaccggcctgcgtcggggcgagttgatggcgctgcaatgggatgacctgaacttcaaaaccggtgtgctgaatgtgaacaagcaggtctacgatgtgcgcggtcagctccagatcagcacgcccaagacgaagaactccatccgcaagatcgtcctgccgcctgcggtggtggcagtgctgcgggagtacaaaaagacggtggactcccgctggatgttcccgtccccggtgaaagaggactgccccattacgcccggcgtggtgcgccgcagactgcagctcattctggagcacgcagaatgcaagcatgttagatttcatgatctgcgccataccttcgcgacgctggcgctggaaaacggcatggatgtgaaaacactctctgctatgctgggccatgtgtcggcggccaccacgctggacatctatactcacatcaccgacgatatgcggctcacagccgccgccaacatcgaccgaagtatcggcaaagcggtgccgcaggaggacgcttcagggccggggcaggaaactgccctggcccaggcggaaaagccgcgtatgaccgatttcaagccctatgtgggccgcaagcgcagatccggcaccggctgcatcagcgagatcaacgaccatctcttcgaggggcgctactctcccaagtggcccgatggtaaaaagcacgcccgcaatgtctacgcccacacccgcgaggaatgtgaggagaagttgagggtgctgatcatcgagatgaaaaccgagctcgcggagctgaagaagcaaagggcggagggaacactgcctccgcagggaccagagggcaagaaaggtcggaggaaaacgaagaagagtaagtaaaaaacaccgacatgggtgccaagtaaccggtgcccatgtcggtgttttcctctttaactatttgggttgcttatttcggtcaaaatacagttttactgtaaatgttccatatgtaacgccatggtctttgcccagatatttacttgaaaattcgatggaaatgttatgctgttcgcaaatccgtttggcaaaatgaagaccgatgccttgtcctgtcgaatcaaattgttgcgcactctcgccgcgaaatccttttgtgcctaacttactcagttcgtctgttcgacaatatgggcctgttgattgaattgtaactgtaagacaatccttgtcaggctcttcaaaattcactgtaatcggcttattatcaggagaatacttaatggcgttttctaagataataaacaaaagggtttcgaaactctggtgtatacgataattgtatgtgctctgagtgtctaaggaaatccagacattctttctactatacccttttaagagcttccgcatcttatcaagctttttaaaaataacagcattataggacgcaccaacagatagtgcagggttgagaacagtatcgaaatattggaagcggttataaacaataaaactataaatatgaatattccggatgattccaagcagctcatccacgctatatcctgtcccggacgcagaattctcccagataatatcacattcagtcttaatttggccattcaattttcttgcttcatgcaaaagctcattaacttcttccatcttttgagagagtccgaatttttcttgctggtattcgcactcgtttttagccagagaaacaagttcttcagcatcaagaactggattgaaaactctattgtctgattgagctattgctgcttgcttttttctatatgtgcttcgctcacgcaggccagaaaaaataaaagttgtatcgcaagaaacattataaacaaaagtagaaagaccatacggacaagtgtaaaatcctgtggttttactaatcatatttctgtagtgcgctaaacatttatcgtttttacaatttttgagacaaaacggcaacgcatggatgaagctaccgtcaaaaagcatttcatctttgtatattggtaataatgccatcttaaatactccccaaaatcaccttagcacaaacagatgcagtaaaatcagcaatcaacccacgtgctttatcatttgtcccgtcagccaacttggttagatcctcgaaattttttgctttaatggctctaacatatttatcttccagttttgcaacatatgcagtgctgacgccgcattcaagtaaatgtttgcggagtcgttcccattgatagataggatccactgctttttgaatttgttcatcaaccagcgcagtccagtcttcaatggaaatgcctttactaatgactgcatcagcaagattcatatattcattgtaagcgggatcataactacttccggtataagcaataacctgtttggcagggtaatgggctttaatttccttgatgacaaaggcaccttcctttgtagaccccaagttcttcccgaccccacgaatatcacataacacaacggcataggcagagacatctctgatattatctatatcccttttatgaactatacgaaatccgtttttaataagatattcttcggcagcgaagtcttggtcgtcgataacaagaatctcaaccttattgcgcagttcagctatagtcatattttgcaatgcagttacctcaactaaatctgacaacttatacttaataaaaaagaaactgggaaaacccatactaatatacgctcctttcttgggaataattatataatcgagtagtgaaaatgttttttattataagcgtaccgacaacaaattacaagaacgcgcaaaaagtctgcatccccctcaaatcctgcgccgcaataaacaaggaaaaagcccccagaagcgatgctcctgggggctttggtccgagtggcgcgactcgaacgcgcggcttccacatcccaaatgtggcgccctaccaactgggctacacccggatattcaatttctatcattataccacggcggaggggaaaatcaaagatttttctgtctgtggtcattcctgtggtcaaatccgcttttatgccgctttcgacaatcgtgaaaaatcccgcaaacacaggtgtcacaaggctttgcggcgtttcgccttgccctgccccggatagcgccacggcactcccaaagcaggcgcgctaccaactgcgctacacccggaaatatcggcatttaacactatagtagtatatcaaacaggacgcgcttctgtcaagcatctgatacgattgggtaaaaagttttctccatgcggcaaagatgattgacatttattataaaaaagaatattattttatgtatatttcccacaacgggaagggaggaataatatgagccgtttatcaattgagacaccgggacgtgctgaaaccgttgtcgaggggctttaccgtgacgtagaaaggcgtatcagcgcaagtcctccggggctttgtccggtggatatggcgctttcgttcctgcgcctgagccatgcacagacctgcggcaaatgtgttccgtgccgcattggtctgggtcagctgaccgagctgttggaaagcgtgctggactcgactgcaacgccggagacgattgaccttattgaaaagaccgcgcgcgttattcaggacacggcggactgcgccatcggctacgaggcggcgcgcatggtgctccagggcgtgcagggcttccgcgacgactatatgtcgcatgttgagcacggccgctgcctgttcggctgggaccatccggtgccctgcgtggcgctctgccctgccggcgtcgatattccgggttatatcgcgctcgtgcgtgcgggacgttataatgatgcagttcgtctgatccgcaaggataaccccttccccacggtctgcggctatgtctgcgagcatccgtgcgaggcgcgctgccgccgcagcatggtggacgacgcggtgaacatctgcggcatcaagcgctttgcgtgcgatcacgcgaccgatatgacgcccccgccctgtgcgccgtccaccggaaagcgcattgccgttatcggcggcggtccgggcggtctgtctgcggcttattttctgtcgctgatgggacacagggttgttgtatacgaccagcgtccgcagctcggcggcatgctgcgatacggcattccggactaccgtctgccgcaggaaaagctggatcgcgacatcgagtttatcctctcgaccggcatcgaggtacatactgataccgcgatcggccgtgatattgagttctccgagatcgaaaaccagtatgacgcggtttacatctccatcggcgcacataacgacaagaagatcggcatcgatggagaaaacagtgtcggcgttcatgcggcggtacagctgctgcgcgacatcggcgagggccgcgtgcccgatttccacggaaagcgcgtctgcgtcatcggcggcggcaatgtctcgatggacgcgacccgtactgcgctgcgtctcggtgcggcgtctgtcacctgtgtctaccgccgacgcatctcggatatgaccgcgctgaacgaggagatcgaggacgcacaggcagagggctgtcagatccttcagcttcaggcgcccgaccatatcgaggcggacgagaacggtcatgttactgcgctctggactcgcccgcaggtcatcggcccctatggctcggacggccgtccgcggccgtatgacgccgatgcaccgctgctgcgcacgccgtgcgacatcgttatcgttgcgatcggtcaggcgatcgacgcccgtccgtttgcacaggtcatgccgctcgagcgcggcaagatcaaggcctcctcggatgccttcgtcccaaacacgccgcacgtattcgcaggcggtgatgcggttaccgggcctgcgacggtgatccgcgcggttgcagccggcaaggttgcagctgcgaacatcgacgcacatctcgggttccatcatgtcatccagtctgatgttgaaatcccggcgccccatctgaccaatctgccggcctgcggccgcatcgagctgcacaaccgtccgtctgaggagtgcgtgggcaactttgagctggtcaagtgcggcatgaccgagcaggaggtgcagcaggagacctcgcgctgcctgcgctgtgatcatttcggctacggtatttttaagggaggtcgaacgagcaaatggtaaacctgacaatagacaagatcgcggtatccgtacccgaaggcacgaccattctggaagcggcggcctctgtcggcattgaaatcccgagcctgtgctatctcaaggacatcaatgaaatctccgcctgccgcgtgtgctgcgttgaggtcgagggcgagggcaagctcgtcccctcgtgcaacaatgtcgtgcaggaaggaatggtgatccataccaatacgccgcgcgtgcgcgaggcgcgccgcaccaatgttgagctgattctgtcgcagcacgacaataagtgcgcgacctgtgtccgttccggttcgtgccagcttcagaagatctcgaatgatctcggcgtgctgtccgttccgtacaagagcgatctcgcggccggcaaaaagagcttctggacgacaacgttccctctctatcgcgacgtcaacaagtgtattaagtgcatgcgctgcattcagatatgtgataaggtgcagtcgctctccatctgggacgtcagcggttccggctcgcgcacgaccattgacgtttccgaaaatcgctttatcaaggaggcggactgttcgctgtgcggtcagtgcatcacccactgccccaccggcgctctgcgtgagcgcgatgacaccgccaaggcgtattccgctcttggcgctgagggcaaggtgacgatcgttcagatcgctccggcagtgcgtgcagcatggggtgaagccttcggcatgccgaccggcagagccacggtcggtcagctcgttgcggcgctgcgcagtctgggagcggattatgtgttcgatacaacgttctcggccgacctcactatcatggaggaagggacggagctgctccagcgtctgaatgccggagacctcaaggaccagccgatgttcacctcgtgctgccccggctgggttcgttttctcaaaagccagtacccggaaatgaccggacgcctgtctacggcgaagtctccgcagcagatgttcggcgcggtggcaaagagctggctggctcatcacctgggcattgaaccggaaaacgtttacagtatttctatcatgccctgcattgcaaagaaagccgagcgcgagctccccggcatgcagtctgccggcgcgggcagtgatgtggatctggtgctgacgacgcgagaacttgcccgtatcgtgcgcgccgagcacattgatgtggagcagctggcagattctccgttcgacgatccgcttggcaacggctcgggcgccggcgttatctttggtgcgaccggcggcgttatggaggccgcgctccgttccgcatacttcctcaccaccggtgaaaatccgtccgcagatgcgttctgcgaggtgcgtgcggcagaaaatgagagccgtccgtggcgcgaggctgcgttcgaccttgcaggaacgaccattcactgcgcggtggcgagcggtcttgcgaacgcgcgtcatctgatccgtgcgatcaaacggcgcgaggttcactacgaatttgtcgagatcatggcctgccccggcggctgtgcaggcggcggcggccagccggtagatggcagcgaccgcgaaaaagcggcttcgcgcggcgatgtgctgttctcgctcgacgaaaaagcggaacttcgtttttcgcacgaaaacccggctgttaaggcgctttataacgaatatctgtccagtccatgctctgaacgggcagaagaactgctgcactgtgatcattttgcatggcagatgccgcagacaggaattcacgtttaatcaattatatagaaaagccctcgcagagagaagaaagctctgtgagggcttttacgacttgcaaggagggtatttcgcgcaaaggcatcgtcatgtaaatgcggctgcggtcaaaagaaaaaccgctcatttcaacgaaacaagcggtttaatttggtggagacggagaggatcgaactcttgacctccacactgccagtgcgtattcgttgttgcaatatgcaactgaatagcttttaatattccggaataacgttggatatgcaattgtttgagaactttattgtgagttaatgaaaatgagctttgtctgtgtaagcaccaaataagcaccaaataaacaccagaataagcaccggattttccgcagcaaactacccgctcgaacgcagctctgcgccggtctgcaccgctgttttaccgaacgcttgtgtgcctgctttcacgctctgtaaacggtactgagtgtgcgctgttaaaccatctgccgagcgggcaaaacgcgcacagcgggcattacagccgccgcacagctctgccgttctcaccggcaaacaacggcagagcaaaccgaaatcaaccatgcctctatcattcatcgtttgtcttgtatcggtcgttacgagaactcccgaagaaattgcagaatttcctcgtccgacgtcccctcgtcccggaactgattaacgattgtctgctccaacggcagataatcctgttcgataatctccgttgccgtccgattatcccgctcgagctgtgcatctatcgcgcggttaatgaatccgttcaggctctcgttccgctgttctgcgtgcgcctgcaattctgccttgtgtcctttgggaacgcgcaccttgatctcgtcatacgctttcgcgttatagcgttcgttcgccttgcggcgtgcttcactgattggcatatataccatctccattctaccttgattataccgcaaagtctacactgggtacagtacaaatatatacgaattttactgtgcagattcatacagcctgaccattgaatgtactgggtacagtgtattataatagcgctgtaaacgagctgtatgcgctttgaatcgttcggcatgaaatgatataccgagcgggagagaacgcacataacgcccatcatagagcaaacaggaggaacattaccatgaaagaaaagctgaccgacaagcaggttctcgaaaagatcgaaaagtatatgcgcttgaccaagatgccggaaacggattactacgatatttcaatcggagagattaccgcccttgtgcatatggaggatgtattcgctgctattgcacgcgcatacgattttggtcgcgctcgcggctaccgtatgcacgccgcccgctcgaaagcgtaacagaaatccgacagcaaaacagccgccccgaaaatggagcggctgttccaataagtgctgatattgattctgaaagcaggtttccgcaagtaaaaaccaagtttaaccaagtcaaaagctaagttttgttaagtcgttgtcctcgtgtgttccccgcaattctgtacattaacggcaatctgcgttctttttgctgcactctctgcaataaaccgctgtgctgaacagatcaaaatccggtaactcctgtgccatctcgataagatcaacagtatgtactttgccgcactgcgggcaataggtgtatacctcatgctctgccaaatctacgcgctttccgtggtgcttgataaaaaacataatagaaactcctttttatgttactacgttaattcttctaacttcaataagatgcgttcttccacgctcccgccgtatttccacgcctgccagcctgtgccgtgatatgcgccctcgcgaatgatacgctcccggaaacgcgccagccgcggcgaacgcccaagcaggaacagcgcacggcgtgtctgccgccttgcatagtccgtgctgatggacagccgctcactggtctgcgcaagggtcaaaccatcatagaaccgcgcacgcacaacggcctgctgcagcggtgtcaggcgggcaaattctgtgtccagtacgcgccgcagctgttcctggtaaacacgctgttccgcgtcctcatacgcccattctgctgtgctgtccggtgtcagttcccctcgcggtgtttcgctcccgtcctcgccggtgacaggctcgtccagactgcacgcgcagttcagcggttcgcgtctggttcgttccgtccggtatccgatcagctcgaaaaacacgctctttactgcatagctgaggaacgacgcgaacagcacccctcgttccggttcaaaccgctgcgcagcctgcacgatggcaagaaagccgcattgctccacgtcctcccatgtaacgcctgcctgcgccatcctcgcgcccgctcgaacatacagccgccggaacagaacggcaagcagtcccctgttctgctcccacagcgccgcccgcgcggcacggtctcccgtctttgccagtgcggctaattcttcgtttgtcaatttgggtaatacctccccgctgtggtataatgtaaacacgagcgggaaggcgaacccggccactttcgaccgggttcggttacggtcaaatacctaaacgcgcagcaagcagacgggcggtcttgtcggcaacatcgggagacggcgacagtgcatccagtgcgcgggcatactgccgcagccgttcctcctcgtcctttgcgacaggaagaatgccaatcagtgcggaaataagtttaaagctcataaaatcacctctgaatttcagctaaaaatccggttttcaagtcaagcgccagcgttaccgtaccaaccgcgccgtgccggtgctttgcaagaatacactcgactgtcaccggctgtccctcgtccggacgctccgcccagtacatatcctcccggtgcagcagcagaacgccgtctgcatcctgctcaatcgcgccgctgtcgcgcagatcagccaaagagggacgcttgtcctgccgctgttcacttgcacggttaagctgtgccaagcacagcaccggcacacccagcgagcgggcaagggctttcaagtcgcccgaaatcgcggttatttcttcataccggcttgcgtgttttccttccggtttcaacaagccgagatagtcgatcacgacaagccgtagttctttgacctgccgcgccagtgcacgaacatcgctcacagagcaccgaaccgccttgttaagatagaacggactgcggttcagccgtttgaactcctgtgtcacacgttccatttccctatctgtcagcgtccccatcaacagacggtttgacggaatacccgttgcgcgcgcaacgcgccgggcagtaagctgcgtcgcgtccatttcgagagtaacgaacagcacaccacccatattctgcgctacggtatcagcgatttgcagcgcaagcgtggttttgcagcagccgggacgtgccgccatgatgtacaggccattgttcaacataccgccgccgaacaacgtatccagtccgctaataccgactggcacgtaaaccgagcgcccgcttgtacgctggtcataggcgttgtaaaagtccagcgccgccgctgttccgtcgatcagttcaccgccgccgctgctgtcgagctcgtcgagcacctttgccgcatcacctgcaatactgttcggttcatcaccgctgtgcgcccgctcgaccatgctttctcctagctgcgccaatgcccgcaagcgagtactgcgcttgatggctgctatgttctggtcgagcgcagcaggagcacaggcaacgtccatcagctgcatgagatagccgcgttctacaccgtcctgctgcaccagatcggccacagcgggcgcgtcgggtgtcttgccctctgcgtccagcatacgcgctgcgtgcaggattgcacggcttgcatcgcctgcaaggtcggtttcgtgcagcgtgttcagcactgtgccccacaagggcgcgtcacacaggcaagcgcccagcaccgcattttccgcggttagaatatcttcattcgtcataaacagcctccctttctccgttctcattggtagaccagcgcagtttaggcgtatctgatcgagcgggcgcatcgttctgcggcggttcatcctcccagcgccgcccgttgagatagcttgacgcatagggtacaaactgcccgccgttttttaaccagtccggcgactgcttttgccagtcaagcgccgcaaggatttctgcaagcagctgctcattagggcatagtttgctgaacgccttttgcgccttagctttgtctttacgcttgggatacgccgcccagaattgggcgaataaactctccttagctttttcgttctccttctctttggcagccatcgtatgcgaacgcacattttcgcatacgatggcattgcgtttgtcccagcctgcaagggcgttttttcgatttttctcacagcgatctgtataattagcaacatctcgatcaagttgagcgcgcatacaggagaacagcatagccatcgcagatgctggcgcaaaagcaggcagtgcgccggtttgcgcgtactccagaagcgcaagaatcagtcgtccgcgttcatcatcggggagcatagcaagctgttcggcataggagaaataaagcggcacataagcacgcgccatcgaatcaccaccgttcgcttaccgggcgaatcccgcgcgccgtctgcgcctcgtccgcaggcgggttctccagataggcgcacagcgcatcgaagttcaccagccgccgcttgcccgcaccgacagggacagacggaacagcgccggttttgaccagccgacggatgaacgacaggctgaccggcgtttctgggtcgagctttcgcagctccgtcagcgcatcggcgggaaagcgcatgcggacagcattcattcttgcacctccttccgcagaacctctaaaccgcgcttgacacgttccagccgttcgccctcgagcgggtgacgcagccagcgccctaaagtcggctcagatactcccacagcctcggctaaacgccactgcgtcgcatttaactcaaataaaattttcaacacatcagactttttcattcttgacaactcctctcgtgtgctgtatgatgatcgtgacgaattaccttacatttcgattatacgacggtaattctacgttgtcaaataaataagaccgatatatgtaaaacgcaagtaattcgacgtaaaggagcgaataacatggctcgtgtaaagcaaaaccccgcagagaacttcaacaagccgttagcggtacgtctaagggcgcttattgatgaaagcggacattccaaagcggatttagggaaagaaattggtgtttctcgacaggcaatcaatgattataccctcggaaacagcgtaccggacgcaaataatcttctgaaacttgcaaagtattttggcgtaacctcggattatctgctcggattagagccaacacgcgcccatgaacaagcgggatttgctgcaagtcttggcataacagatgcaactatgcaacgactgcaacaggcgattggctatttacatgagggcaatatggatataaacgatgcactaaacgctttacttgcgagcagcaaactgcctgcttttttagttgatcttagtaagatagcggaaatgaaaaatgagcgacagagaatggaaaaatcgcaatctgctgaggaatattataaacacataattatggcaaacaacttaactgccgccacttataaaaatgagaaagcggtatttttgcaaccgcaagcctatgttgattaccgaatgtatcttgcaaaaaaatcttttgatgagatagcagacgatattctgaaccgactgatcgaaaaggaggtctgaccatggcaaccatcaagcagcgcggcgacagctacaagataaccgtttcctgtggctacgatctgaacggcaaacagatacgccgtcacctgacatggacacccgaaccgggcatgaccaagcgccagctgcaaaaggaactcgaccggcaggctgtgcttttcgaggaaaagtgccgaaacggtcaggttcttgacggcaatatcaagtttgccgagtttgcggaaaagtggttcgtggactatgccgaaaagcagctgcggccgcgaaccgtcggcagctatcgtgaaatgctcccccgcatcaacgcggcgctgggtcatatgcgcatggacagattgcagccgcatcatatcatttcgttttataacaatatggctgaaataggcgtgcgtgaggacggcaggcagcattgcagagtggatttgaaagtgctgctgcgctcccgctcgctgacgcagacgaaatttgccgagcaggcaggcatttcgattgccacgctgtacagcatcaacaaggggaacaacgtttcgaacgaaagcgcggaacgcattgcacgggcgcttgaaatgccgctgactgacctgttcgagccgacgaacaaggacagaaaattagcaggaaacaccgtgctgcattatcataagctgctgtcctctattctaactgcggcggttcgctggcaggttatcccgtccaatccgtgcgaacgtgtcgcgccgccgaaagtggagcgcaaggaagccgtctatctggatgaggaacaggcggcagacctgcttgcagcgctcgataaggaaagcatgcagcatcaggtgatcgtgaagctgctgctgttcacgggtatgcggcgcggcgagctgtgcggtctggaatggaaagacattgacttcgagcgggcggttatctttgtgcggcgttcgtcgctgtatatggcaggccggggcgtgtttgaggacgagacaaagaacacttcgtccgagcgctgcatgaaggtttccgctgacgttgtgagtatgcttagggcatggagagccgaacagtcaaagcagcgtctgcgcatgggcgaccagtggcaggacagcgaccgcttgttcactacatggaacggcgcacccatccgaccggacggcataaccgcatggtttcataagttcgtgacaaagaacggattgccgccgattcacattcattctctgcggcacacgaacgcaacgctgctgattgccgccggtacaagtctgaccactgttgccgcgcggctgggacacgcgaactcaaccaccaccagtaagatttacgcacacgccatcaagtcggcagatcaggccgccgccgaggtcttgcaggatattcttcacccggtcaaaaagcaggcataacaaaagggcgctccccatgcgggaacgccctcgttttttgcaccataagcaccaaataaacaccaaacaggatttcagaaaatctcaaaccaacgaaaaagtaaagaaaaaccgctcgtttcaacgaaacaagcggtttaatttggtggagacggagaggatcgaactcttgacctccacactgccagtgtggcgctctcccagctgagctacgcccccaaatcatctgccgataatgactatcaacacgatgattatataccattttttacagtctgtcaacacaaaaaggcaaagttttttatacgatgccgaacaggcgtctgccgttttcggtcgtgatacgttcgacatcctcgaccggcattcccttgatctctgcaatcttctcggccattcggtaaatgtaaagtgacgaatttcggcggcctcggaacggctcgggcgccatgtagggcgagtcggtctcgaccatcagccgctcgatcggcacctcgcggatgacttcgatcgcttttttcgcatttttaaaggtgataacgccggtgaaggacagataatagccgcgctcaagcagctcacgcgccatttcaacgtgaccagcatagcagtgatatactccgatcacatcgggatagcggcgcgtgatctccatgcagtcggcgtgggcatcacggtcatggacaatgaccggcagcttcagctcgcgcgccagctccatctgacgagcgaaaacaacctgctgccgtgcgcgcgcacgctcttccttctcccagtaataatccagaccgatctctccgatggcacgaacacgaggctcgctctgcgcgagtgtgcggatttcatccagtgcctgcgtccatccatcctcgatattctccggatgcaggccgaccgcagcataaacaaacggataacggtttgcgtagctgactgccttacgtgaggtttctgcatcgcagccggggttcaggatcagaccgacgttgttttccggcatggacgcgagcagcgcgtcgcggtcctcgtcgaagcgttcgtcatcatagtgcgcatgggtatcaaacagcatattgttctccttaaatccagccgaaatgcttgcaggcattccacaggccgtccttgtctacgtcggtcgtgatgtagtcagcttttgccttgagcgcgtctcgcgcatttcccatcgcaatggacagccagccctgaccgaacatacacaggtcgttcatgccgtcgccgaacacgacaatatcctcgtctgggatatggtacagcttctgcacctttcgaatgccgcgctgcttttccttcggctcgacaaaaacgatttcggggttatagcggacgagcggcagctcgcccgactgcatctgttcctcttcgccgatcggacagcggaaatagaccttgtacagatggtcgaggacgtggtaatcgtatctcggatcccagagtacgggaaaatagttttccggcgcgagggacagataattcctgtcgctcgtcacgcacagcttttcgttttccggtgaaatcgcccacggaatgccgttgccccgcagccagtccacgaagcggatgcattccgacgccggaagcgactgcatctcgagaatttttccgtcaatggtcacgctccagccgccgtcggcgacgatattggtaaagccgtagcgatccgcgaccgttttcgcggaggcctgaagcctgccggtggcgatagcggtgaaatgcccggcctgccgaagcaggtcaaggcatttcaccgcactctcgggcatcgtcgtggtaaggccggtggataatgtgccgtcgatatcgaaaaagaaatattttctgcgcatatttcctctcgaatatcagacattgaagcggaacagcacgacatcgccatcctgcatgacatattccttgccttcggagcgaacgagacccttttcgcgtgcggccgcgagcgagccgagctcgatgaggtctttgtagttgatgacctcggcgcggataaagccgcgttcaaagtcggagtggatcttgccggcagcctgcggcgccttggtgcccttttcgatggtccaggcacggacctcctgctcgcccgcggtcagatagctcatcagaccgagcagatcgtagcagaccttgatcaggcggtcaagaccggactcgtgcagaccaagctcagaaaggaacatctccttctcctctgcgtccatgcctgcaatatcctcttcgagctttgcgcagatcggcaggaccattgcgccctccgcgtctgcgatagcctgtacagccttgagacgctcgttttccttgtcgttgccggtaaagccttcctcgtccatgttggccgcatagatgaccttctttgcggacagcaggtcgctctcgtttacgacgcggtcgacatcctcgtcctcgccgaagccctcaaaggtgcgggcggtcttgccctcctccagatgtgccttgagcttttccagaatgtctacgtcgagcagcagcttcttgtctgcctttgccgccttgcgcgtacgctccagacggcgttccagatgctcgatgtccgcaagaatgagctcgagattgatggtctcgatgtcgcgcgccggatcgaccgaaccctcgacgtgaacgatgttctcgttgtcgaagcagcggacaacgtgtacgattgcgtcgacctcgcggatatgggacaggaacttgttgcccagaccctcgcccttgcttgcgccgcggaccagaccggcgatgtctacgaactctacgacagccggggtggttttcttcgcgtgatacagatcggtcagcggctgaaggcgctcatccggtaccgctaccatgccgacgttcgggtcgatagtgcagaacggatagtttgcgctctccgcgcccgcctgcgtgatcgcattgaacaaagtggacttgccgacgttagggagaccgacgatgccgagtttcatatgtttttcctccaaattctctaaagagcacggaaaggcggcctccaaagggcacgctcctcccgtctcattttttgtcttagattagtataccgctttttctggcattttgcaatgttttgcgttatactattggcaggtgcctgcggaaaatccgtctgcgccgggcggcgagccgctctcttgaattctggaaaaggtgatatattatgccatcctatgccacctgtcatatttttgctgctacggtgcagcgcgttacgagcgatgcggtcgcccatatcatcgactcggctccttcggcctaccggtggggcgcgcagggagtttcgccgctgcgtatgtatcatgcgccgctgccgtcaccgctgcaccatgctgccgctgagctgcgtacccagccgcccgcccggttgttcgaggcgctgtgcagggcggcctgcgccgcacacaataccgctgcgctcgcgtatgtattcggcttctgcacgaactatgcgctcagccgcgtgacgagccgctttatcgacgagcaggccgaccggcttgcgacgtatatgcccggcctctccgctgcggcgcgccgtcagctggccgcgagcgacatcgacggcatcatgatcgaggactacattgataccgcatcggccgactacgcggcgtatcgtctgctggatgcggacgcacctgaatgtaccgccgccgcccgtgtgctcgcgcaggcggtgcatgcaacgctcggtacgcacgtctcccctgccgccgtttaccgcggcatgcacgatatgcggcatattctgcggcttgcacatggcggcgcgcccgtgcgcagcagattgcagaagctcgagcatctgctcggaaggagcggcatggcctcctcgtttatccggccggcggagccgcttgcggcggactgtgcgaatcgcgaacatcgtccgtggcagagtacaaacggcgagcgcacggaatcgttcggcgatctgttcgatgccgctgttccccttgccgtttcgctccagagagcggttctcgatcgatatttccaggacaagccgcttgatccgcggtttttcccctcggattttaatggaaattctgtaaaaaacggaaaataaccggctgaccgtcgggaaatcagacacgctttgacgatccggcgacaggtttcgtgtgactttatcctttcaagtgcgtatgctgtcattgttaccgaattgtaaccaatgatcttcttgaaaggaggtatatggacggcttcggctgtccatactgccgtcatgcgaaacctgttatctttttttctcgggattctttccgacctgctctacgtgtttgtctgttctgcgctgttcctcgaccgtgcggttacatttgtctgggatgccccgctgcgacggcgaacaggcgccatcatacatgcactcgcgcgaagccgcgccgcctcggcggcactgatcttcattccgtgcttcctgcttcccttttcgctcctcacccagaagggcgtgctcattctggcaggagacaggcctctcggctttgtgcaggatgcggacatgctctccggcacagtgcatgagatcgaggcgagcgcctcggcagcgtccggcgaaacctattcccttcccttctcgctgagcacccgctcgatgcgtgcgccgctttgtgaatttctcgatgagaacgcgctgcgcacagcgctgacggaacagagcggtgaactggacacgcttgcggtgatctcgatcgacggcacacgcgctggcgtatgccataatgctgaggaggcacagaccctgctcgaccgcgtcaagcggctttataccacgcaggctgacagcagcgcggatttcgtgcagcaggttcatgtggacagcgttgttgcggagagccgtcttgcaggcgagccgcagacggtttttgagactctgtccgaccgcctggacgtccgtgcgcgccgctctgtcacctacaccgagaccatcccgttcggcacggtaacgcgcgaaaatgatgcagagtatcaagactaccgcgagaccctccggcaggggcagaccggcgaggcagtcgtgacggcggagatccagacgctcgacggcgaggaaaatgaacgcaccattgtcgcacgtaccgtgctgcggagtgcatcggacgagatcatcgaggtcggcacaaagaatatcggtatcggcaccggcagctttgtgcgtccggtctcgggctatacctttacctcggcgttcaagtggcgctggggccggctgcacagtggtgtcgatctggcggtgcctgagggaacgcctgtccgcgcgtctgacaacggaaaggtcattcttgcggaaaattccggcgacggctacggaaactatatcattctcgatcatggcaacggcttcaagactctgtacggccataattcggcgctgtgcgtgtcggtcggagatatcgtgtcacagggcgatctgatcgcctattcgggtagcaccggcaactcgaccggccctcacctgcattttgagattcatctcgatgatgaaaaagtagacccggagcgttttctgtccttctgacgcgcaaacaccctgcatgcttttatttcatgcagggtgttctcttttattcttgtgttttgtcatgcggctcgtccgtagagccgtccgtctgcgtctcggtttcggattcagtcggcgcggaagcgccggtcggctcccagtcgaagtgcatcggctgcggatcgggagtcgcgagatgatcgaacatggcgatgaacgaggtctggtagtagctgtttacaaagctgccgacgacgaggccgacgcagagcgccgcaatcaaagatactgccatgactgcaatgccgaggccgccgccgatcaccgtcagaccgagcatgccgagcaggaagcacagatagaccgacgcgagggcgagcaggttccagccgagaaagctgagttcaaagatgagaagtgcgccgaagcggctgcggaatacggcggaggcatcacgggttgcattccagacgccgtactgctcgttgtcatgcagcacgacccagccggcgctgtaggtcatcagcttgatgttgatcaggaagctgaccagcccgtaaactacatagagtgcgatcagtccgccggtcatgctgtctgtgcttccggtcatgaagctcatcgcggaaaccgcaacagcgccgatcgtaagcagaatggtcggcggaacggtccacatcagactgcgcaggaacaggcagaacgacatgcggatgcctgtccagagcgatgcgcccgaggtgatcggctgaaggactgtgcccgcacccggacggccgccgcgggtgaggtcggtgtagaaccgcataaggccgaaggtgagcggaccggaaacgacgagcagcagcagtacagcggtaaagagaccgctgcctgtgccgcgcagcatcgcctgcgcaacggcgctctcatccgcccctgccaccagcaacgcaaaagacgagccgaacatggtcaggtaaacgatcagcatcagcaggatgatcggcagcgaatacagcacatttgcgccgatgcaggagccgagatgcgccgcgacatgcgctttgcatttacgcttgcattcttttctcttctgggcattccattctttcatttttctcttcctttcggtcagcttccggtgccgacacatactatttcgtcgcgtttggagtaggtggatttgtttgcaagcacctcggtcgtcttcccattttccgtgatgaccttataggtgcgtgtcgagtagccggtgatgcccgaggtctcgacctgcgtttctcctgctgcaagcgagctgtcctgcttttcgaccgtttccggcttgtaggtttccagcacctcggtacgtgttgcgaccgtcttgtcgctcgttttggtgccgataatggtcatgatcatctgtccgtcggtctgttctgccaggatcttgatgggataggcagtgttattcgcgaaacggaaatcgagattgccgtagtccacggtcgcatcctcgccgagcggcgtgtaggaaacggtgaacgagtgattgtgacgctcgacgacctccagatccgcgcgcagcacggccatataaagcgtcgaggagggctggcatacgccgccgccgaactcgtcgatgatcttgccgcccgagtaagcgtgcgcctcctgatagccgcgcgcctgcgtgcgttcgccgacgactgtgttgtaggagaacacatcgcccgggttcaggatcgtaccgttgatggccttggcggccagacggacgttgttcgtgcgcggtgcattgccctcgttgaggttggttgcggtacgggcgagcgtatcgcggaacagacgttctctgaggaccgcctccgtgatcgtcggctgcgtgatggtgaccgggatggagtagcttgcctgcgagccgtcaccgatgatctcctttgccttctcgacgtcgaactgcacgccggacttgccggggatgatggtcttgccgtccttcttgctgacggtcgcgttgaccggactgccggtgacatcctctgcaattttgtcgatgtcgatggcaggcgcagcggtcacattggtcgagacctcatagggcttgaaatccatcagctcgatctgcgcggtgagcgcctgctcgacagcggcggtatcgaactgcacgcccggcgtaccggactgaatgacgaggttttccccgtcgagcttccatgtcggtgcgaccggctcggtaagcgcctcggctgcaatctcctcaagctgggctttcagacccgattcatcgactgaagcgtccagacgggtatcgcagccgtttcgcatcgcgctgatgatcgctgtcatgcgcgcgagcggcccgccctcgcggccgaccttccatgcgttttccgcagactggatatcgtctacgccgctcagcacattctcaaccggaatatcataatccgcatcatagatcgtgagtgtgagctttttaccctgataaagcggcttgctctttgtggcaatctgctgtgcggcttcatcgcgcgacaggccgccgacgtcgatcgagccgactgtcacgccggggaaaatgttcggatagaaataaactgtgccgagcgcgccgcctgcaagcagaacgatcagcacgaggataacgaggagcgcggcgggaaaacggcgttttttggggagagccgcagcggtcttttctgcttttttcttatctgttttgatgaggtgcgcgccctttctgggtttgccggaatggaatgccatggtgatctccttttattcatgcgcagagcggcgcggccgtctgtctgcgtgagagtttatgcgctgcctgcgtccgaaagacacaggaactatcattttattatatactgctgtgcggaaaggtgcaacaacaaatcggtatcagaatgtttttcgccgccgcctcataagatgacagcatgaaaggaggcggcgaacatggcggcaaggcagagaaaacaccgtgagacacacggaaagggcttgctttttgtcacgttatgcctgcttgcggctggagtggtcaagtacagcagtttccctgctgcggccgagttccgtgcacgggcggctgaggcgcttgccggtgcgccgggaatggaggaagcactcggtgtcttcggcggacggacggaaaacgctgcggcggtcagcggtgatgcgggatacgcggcatcctcgggcggtgcggacgacatcctcggacgtgaccagacgcagttcccggacacggcggacgagaccgtctattcgatcggctttcattatgttctcccggcgaaaggcacgcttacatcgtccttcggtgagcggctgagtccgctcaccggtgagccgggatttcactacggcgtggacatagcggctgatgagggcacgccaatcgaggcgtttgccgacggaacggtccgtgagaccggagagtcgagctacgggaagtacctgatcgtcgatcatgcggacggattttcgacgctgtacgcgcattgcagcagtatttccgtcgagatgggagaaaaggtcagctgcggcagcgagattgcccgtgtcggtcagaccggcaatgcaaccggcccccatctgcatctggagatctggcgaaacggcgcggcgctcgacccggcggattacctgacagagctgtagcatgggcagagtaaacgtgcgcgacggcttctgggtgctgctcgcagcgctttggtgtgtggacggggacaatctgcttccgctgttcctgacggcggcgctcgtgcatgaggccgggcacgcggtcgtcctgtatcttgcaggcgggcgtctccggcagctgacgctgaccgcctgcggcgcggtcatgcaggccgcgcttccctgcggccgtttcgcctgcgcggcagtcagtctggccgggccggcggccggctttgcgctgacgatcgcagcgagggcctgcggcggctggcgtcttgccggtgcaagcgcgctgctcagcctgttcaatctgctccccctccctccgctcgacggcggcatggcgctcgtgtatctctcggatggcggatttccgcgcgttcggggtgtccttgctgcgctcagtggtgcgacgctgctgctctgcggactgctctgtctgcggaacgatggcgggtgctgggtgctgctcacaggcacggcaatatgtatttcagcacttcgtatgaaaaaatgcagcgaaatatgtgtattttaaccggcttctgtgcggcattttgcatagttttttcggaaaacggcggttttgcatggcatagccttgcatacaggcggattatgttgtaaaattacagatatacaggctccgggtgtgtctcggatcgatacaggctttctggaacggaggatctatgtttcacgtcggtgacaaagtcgttcatccattgcacggtgcaggagtgatcgagggcatggtcgaaaggaccattgatgacactccggcatggtattatgtcctgcgccctgcgttcggggacaccgagctgtttctgccggtggacggctgcggcagactcggagtccgtccggtttgcagccgggagtgcgccgagcggttccttgacggactggatgcgataacgtacagcgaaagcaaaagctggaaccagcgctaccgtgaaaacatgcagcatattcgttcaggcgacctttgcgaggttgcacaggtcatcaagagcctgtctgtgcgggaccatgcgcgcggtctgtccacgggcgagaaaaagatgctcgaacaggccatgcagatactggagtctgagctggcgtttgcgctcgatcgtccggcggagcgtatcgcagaaatgctgcgtgagcatctgtgccgctgagcctgcggcaaaaagaaaagctttatcagggaaaaggctttgcatgcgcagagtcttttttcgatttctgcaaggagaaatgaatatgtcaactgaaaatcagtctgtctgtgcggtcgttgttgcggccggctcgtcgcggcgcatgggaggcgaaaacaagctgctgctcccgctctgcggaaagcccgtgctcgcgcatacgctgacggcgtttcagatgtgcggcgccgttcgcgacatcgtactggtctgccgcgagcaggatatggaggtctatcggacgcttgccgcagaaaacggcatcaccaagctgcgcacgctgacgcgcggcggcgatacccgtaccgaatcggtcctcgcaggcgtctctgccgcgtctgaagcctgtgcgctcgtggcagtgcatgacggcgcgcggccgctcgtgtccgatgaggtcatcacgcaggctgtagctgaggccgcaaaaacgggtgcagctgcgcctgtggtcccggtcaaggacagcatcaaacgcatcgagaatggaaagatcgcagctgatgtgccgcgcgatacgcttgccgcagtacagaccccgcaggtctttcgcagggatatgctgctgcatgcgctgctggatgcggcagcgaacggccgcagctttacggatgactgcgccgcagtggaggcactcggtcagacggtttccgcgacctcgggcagctacgaaaacatcaaggttacaacgcccgaggacattgctgtcgcggaggcgttcctgtacaggagggaaaagaaatgaatatacggatcggacacggctacgacgtccatcggctggtcgaagggcggcgctgtatcatcggcggcgtagatattccgttcgagcttggcctggacggacattctgacgcagatgtgctcacgcatgcggtgatggatgcgcttctgggcgcgctcgcgctcggagacatcggcaggcattttcctgataccgatccggcctacaagggtgcggacagtctggcactgctgcgccatgtcagtgcgcttatccgtgaaaagggctggcaggtcggcaatatcgacgcaaccgtactcgcgcaggcgcccaagctcgcgccgcatatcgtgcagatgcgcgagaatcttgccgctgccatggaatgcgatgtcgaccgtgtttctgtcaaggcgacgactgaggaaaagctgggcttcaccggtgcaaagcagggtatcgccgctcactgcgtctgcctgctggaaaagctttaagaagatcacagcataacaaagtaaaacggcacgcctttcggcgtgccgttttactatttcgttacctcgcagccgccccattcaacaacagtaaagccgtccctctcgaaagacgggaacgtctgcggttcgatcggctgcgccctgttcagcggtttccacgccatgaatacgcggagctcactgtccggtttcgggtcgatggtgagctttgcgccatcggtgtagcgttcagactggaaggaaatcaggttataggggtttccctgcatcttcggaagccagtaaacgataaattcattatattccctcggtgtcagaccgatgccggagagcgtttcgcggagaaaatctgcggtgtctgcaccggcaacgcagaagccctttgaaaagtcatagtcggcatcgttttctccctcccagaacaggtaggagtattcgtttccgttttcgtcatgcagtgtgccgtccggctcggcggtgacacgccagccgttttcatacgccggataggccgcggtgagtgttccgtcataatcgagcgaaacctcgacctctgtctgctgctcgggatagagatagatgaccggcttggcatcgcactcttcctgctgctgaccgcagccggtcaggccgagcgccagagcggcggcaagcgttcctgcgagtaatcgtttcatgtcagttcctccttttcctgtatgtgtctctgtgtatactgtttaccagattagacgagggaaagaagcaaatgttccgcattttcacatttcatttgtgattttccggaagcggatgagaaacagaaccgtggtggtcgcggcggccagaacgtctgcgaccggttccgccagaaacacggcgaacagcttgtccgcgaaaaagtgcggcagaatgaaaatcagcggaatgagcaggaaaattttgcgctcaagcgccagaaacagcgagattttcgcctcgccgagcgccacgaaggactgctgaaagccggtctggaaagcattcgtgaagccgagcgccatgtaaatgcggagtgcccagaccgtgatttcggtcagctgctcgtccgaggtgaacaggtgaacaactgcgtgcggcgcaagctgcacgacgccccagatggataccgcgaacagcaccgcaatcagaatgttgtaccgtaccacctgcttcatgcggtccgggcggtgtgcgccgaaattgtagctcaaaatcggctgtgcgccctgcgcaagaccggtcagcggaagctggatcatctgcgcgaccgaggtgaggatggtcattgcgccgacggcaaggtcaccgccgtatttctggagtgaaatattgaacgcaacggtcagcaggctttcggtggactgcatgacaaagggcgacgcgccaaggctgaccgccggaagcagcagcttcgtatcaatgcggagtgtactgcgccgcagccgcagcacggtggttttcccggtgaggaagcgcagcacccacgccgccgaaaccgcctgcgagagaacggttgcaaccgccgcgccgcgcacgcccatgtgcaggacaaagataaagagcgggtcgagcacgacgttcaacaccgcgccgatgacaacggttttcatcgcgaccgcagaggagccttgcgcggtgatgaagccgttcaggccgagcgctgtcatgacgaaaaccgttccgagtacataaatgctgaggtactgcatcgcgtaagggagcgtatcggcggacgcgccgaacagccgcagcaggtctcgctgaaacagcaggaacagcacggtcagcacggcggcaaggctccagagcgcggcggcacaggtgccgagcgtgcgttcggcgcgatccttctcccctgccccgagcgcaatcgaggcgcggggagcgccgcccatgcccacgagcgcggaaaacgcggagatgagtgtgatgaccggaaaagtaacgcccatgccggtcagcgcgagcttgccctcgagcgggatgcgcccaatatagatgcggtcgacgatattgtagagaaggttgacgatctgcgcggtgatggtcggcagtgcaagccgacacagcagcgggcctatcgggtcgcgaccgagatcgaccgcgtgtgtggtgtgttcgttgctgctcatgcgcctgcgttatccttctgtatcagaatgcggatggcctcaacagccgcgcggacgccgcgttcggttgcgtcgggcggaatggccggagcgtcgtcgttgtcggcgttccacagcacgttgagtaccgcgccgcagcgcacatggagcacttgcgccacgatcatgagcgccgccgtttccatctcgctcgtgagcgcgcccgcagccttccaggccttccattttgcggtgagctcgtccgcgatcggcatcagcgccgggcggatctcgccgtaaaagctgtccttggactggatcacgccgacatggtgcggatagccgagcttttctgcggcttgcttgagcgcgagcacgatgtcgaagtttgccgccgccgggaactcgatgggcaggtattcgcggcttgtgccctcttgacggatggctgaggtcgcgatgacaatatcgccgcccttgacctcatctacgatgccgcccgaggtgccgacacggataaacgtgtccgcaccgcactcgacgagctcctccatggcgatcgccgcagaggggccgccgatgcctgtcgagcagaccgcgaccggaacgccgtccagactgcccgtccagagcgtatactcgcggttttgggcgagctgctgcggctcatcaaaatagcgcgcgattttctcgcagcgcgccgggtcgcccggaagaataacataccgcccgatgtcgccctttttgatttgaatgtgcatctgtttgccgtcaatcagcatatcgtttcaccctcccgttcgatactgcgtatatttttttccaccttgctgcgcggaagcatgacctcatgtccgcagccgacgcagctgagcttgaaatccatgcccgtgcgcagcaccttccactgcttcgagccgcatggatgcggttttttcatcgtaaggatatcgccgaccagaacgtccatcggtatcactccccctgcggttatttctatttttattatagcacaggaagcgcgaaaaagcgactgtatttctgcgttttccgcttctctgctccattcatattttcacctctggttttcatataatgaaaaagctcggaacaataaaggaggctgtgcatttatgatgaaaaccgacgatttcctgcctgagggcagctatggaacgcttcccttcgtccggcaggcgctgcactcgctcgagggactgcggcgcgcacaggatgaagggcggattctggaggctccggcgctgcgctgcaccgcagcgcacgatctgctgttcgacttcggctttgcaaggggcgtcatgccgcgcgcgtgctgtgcgctcggcattgcagaggggcaggtgcgggagatcgccgttctctcgcgcgtaggcaagccgacctgcttcgtcgtgaccgatattgatgaggagagcgagccgccgacggtatggctgtcgcggaccgccgtgcagctgcgtgcgcaggaggctctgctgtcctcgctctcgccgggcgacattatcccggcagccgtcactcatctggaacccttcggcgcgttcgtcgacatcggctgcggtctgccctctctcatcggcatagaaaacctgtcggtctcgcgcatttatcatccctctgaccggctgaccgtcgggcagagcatccgtgcggctgtgcggtcggtggacgcggagaaccgccgcatcacgctcacgcatcgcgagctgctcggcacctgggaggagaatgcggcactgtttgccgcgggcgagactgtacgcggcatcgtccgctcggtcgaaccctacggcgtgtttatcgagctggcgcccaatctttccggactcgcggaaaaccgcgagggtctgacgcccggcacgccggtttcggtctacatcaaatccatcctgccgcagcgaatgaagatcaagctgagcgtgatcgatattctgccgcatacagatacgcccgagccgccgcgctattttgtctccggcgaccatatcgaccgctgggtctataccccggcagactgcgacaggaaatacatcgcgactgaatttctctgaacggaagcagataaaaagaacatttgttttctctctcggtctgtgatatactgataatgtacagccgtctgcctgagcggctgctgattttgtatatcttcatgacgaaacgaggacatatatggaaccgaccaaatttgatatgaaatacgcatccattcgacaggcgatcatcgagcagcgctttgaaaagctcaacgcccggcagcgcgaagcggttttccagactgacggccccctgctcatccttgcgggcgcgggcagcggaaaaactaccgtactcatcaaccgcatcatcaatctgctgcgcttcggacagggccttaccgacccgtttgccccggaatgggcaacggatgacgatctgctgtttctcgcagaatacctcaatgacccgaaaccggaaaaccgggcgcgggccgagcacctgtgcgcggtgcgtccggcaaagccgtgggaggtgatcgccatcaccttcaccaataaggccgcccgcgagctgcgcgagcgactcgagcttgcgctcggtgatgaggaggccgcaagcgcggtctgggcgtataccttccataccgcctgcctgcgcattctgcgcaggcatgtcgacctgctgggcttcgagagcgcgttcaccatctacgatgaggacgacaaaaagcgcgtcatcacgaatgtgatgaaaaagctgaacctcgaccccaagacgttcgatccgcgcactgtgatgggcatgatcagccgcgcgaaggataagctcatgacgccgaagcagttcgccgccgatgcggccggcgactatttccgcgaaaaggtctcggatatctaccgccagtacgaaaaggaaatgaaaaaggcgtgtgcgctcgatttcgacgacatcatcatgaaaaccgtgctactgctccagaacaacccggaggtgctcgagttttatcagcacaagttccgctatgtgctcgtagacgagtatcaggatacgaactacgcacagtatgtactgaccagcctgctcgccgggtactatgagaacatctgcgttgtcggcgatgacgatcagagcatttacaagttccgcggcgcgaccatcacgaatatccttgaattcgaaaagcagttcaaggacgcgaaaaccatccgtctggagcagaactaccgctcgaccggcaacattctgaatgccgcgaacgaggtcatccgcaacaacgtcggacgcaagggcaaggagctctggaccgatcacggcgccggcgcgaagatcaagctgcaccgctcggacagtcaggagggtgaggcaggctatatcgcggacacgatccgcgagggcgtcgagcagggccgccgctggggcgatttcgcggtactctaccgcaacaacgtgctgtcggacaacatcgccgccgccttcatccgagcgggcgtgccgtaccgcgtttacaagggccgcgacttcttctcccgtgccgagatcaaagatatgttcgcctacctctggatgatcgagaatccggcggatgagctgcgcctgcgccgcatcatcaacgttccggcgcgcaagatcggcgataaatcggtcgaaacggcgatgcaggccgcagtcgagaacggcgtcacgctctatgacgtcgtgtgccatgcctcggagtaccctgccctgtcgcgcggcgcggcggcgatggagaaattcggtgagatgatcgaaaatctgcgccgcctgcgtgagttcgtttcgctctccgagctgtatgatgaactgctcgacaagagcggctatctccgtgcgcttcagctcaagggcggcgtagaggaggaaagccgcatcgagcacatcgaggagctcaagtcctatatcgtcgactacgaggaaaagaacgaaaatccgtcgcttggcgacttcctcgaaaacatggcgctttacaccgatgcagaccagtcgggcgaggatgaggatgcggtcatcatgatgacgatgcacgcggcaaagggcctcgagttcccggtcgtgttcctcgccggcatggaggacggcctgttccccggcttccgcgcgatggaaaaggaggaggacatggaggaggagcgccgtctgtgctatgtcgctgtgacgcgcgcgaaggagcagctgtacctcacctgcgccgagcgccgtctgttgtacggccgcacgcagtacgctcatccctcgcgttttatcgacgaaatgccggaggagctgctcgacagcaatattgtcgagagccgccgcttctctgccgcgaccgcacccgacccgacgcttgaccgtccgcaggtcatgcgcgcacgctatgtctccgccggagcggcaaagccgggtgcatcggtcgcaccggcaaagcccgccgttcccctgcccgattatgcagccggagaccgtgtccgccaccgtgcattcggagacggcatgatcgtttccgtcaagccgatgggcggcgacgcgctgcttgagatcgccttcgaccaaaagggcaccaagcgtctcatggcgaagagcgcaagcctgttcatgcaggtcatttaaggcaataccacataatttctgcaaagcgccgaagctttcattgtgcggtgctgccataaaattataccgccccggaacagcgtttatcagcgctccggggcggttcctctatgtgtcgcacagcttttcgcgcagtgccgcgagtgcacgcttttcgatgcggctgacctgtacctgcgacacgccgatgatgcggctgacctgctgctgggtcatgtcgcgcgcaaaacgcagcgcgatgacctgccgctcgcgctcgggcaggctcagcagcgcctcctcgagcgacagatacaggcaggttcgctcctccatgccctcatcgcccacgaggtccccgaggcgtccgccgcccgaaagctcgcgttcgagcgagtcgaccgatacgtcagcctgctcgcagacagcgacctcctcaggtgtcagcgcacaggcagcggcaagttcgctgacgctcggggaacggccgagccggccctccagctcgctctgtacccggcgtacacgcaccgcgcgttccttgaccgcacggctgaccttgaccgcgccgtcgtcgcgcagaaagcggcggatctccccggcgatcttgggaacggcataagtcgaaaactcgttcccgcgcgcagggtcaaagccgcgcaccgccttgatgaagccgacacaggcaagctgatacagatcgtccggctctgcaccgcgcccgaaataccgccgcgcgatggtatggatgagtccgctgttttccgagatgagcacgctctcggcttcacggtcgccttcggatgcacggcgcagcagcgccgtcatgcgctcggtcaagtctcccgctcccgcaggaccttggtcatggtcacgaccgtgccgcgccccggcgcagagcgtacacgaagccggtcggtgaagctttccatgatggtaaaacccatgccgctgcgcgaatcgtcgccggtggtaaacatcggctttctcgcctgctcgacgttttcgatgccgcagccggtgtccttgatcttgatttcaagtgcgcgcccctcgaacaggcgcacggcgactgtgatgaagccgctcctgcctgcatagccatgtacgatcgcgttggtgaccgcttcggagacaacggtctttatgtcgcccagctcctccatggtcggatcaagctgcgaagcaaacgcgccgaccgcctgccgcgcgaacgcctcgttgaccgagcggctttcaaatttgatgctcattttgttgctgactgtccgcaacgttactcacccctttcgaatacgatgacctgcggcagaccggcggcgtcaaagacgcgctgcggctgcggcggcgtaccgcgcacgcgaaaatcgcagccgcagcgcgcgcaggtacggtgcagatgcagtacgaccgcaagacctgagctgtccatgaaggtcagaccggatagatcgagtacgagactgtcgcagggatagagtacgagcagatcctcgctgcgctctatggtctgacgggcggtgtgctggtcgagctcgccggtatagcggacggtcagtgtccggtcgacctcggtctgggtaatatcaagcatatttttcacctcaaaacagaaaaagcctgtaccgtttgccggtacaggcttattttagcaggctattcggttttaatctgtcgttttcggtcggccgcgcaggatcttctcagcctcacccgtcagaaacagcgagccgcagacgagaatgcagtccttcggggatgcatggtcgaacgcaagctcaagcgcgtgctcggtgctgcggcagtcgtagacctcactgcattcctgctctgcgagtgcagcaatggtctgctcaccgagtgagcgctctgccgcatttgttgtgcaggcgtaaaaggcatcagcctgccgcgccattctgcgcacgcagtattcgtattccttgtcgcagaccatgcccatgacaacatgcagacggcgcattttcaaaaggtcatgcaccgcaccgcacagcgcgtcgatgcctgcggcgttgtgcgcaccgtcgagcagcacgagaggcgcgtccaccacgcgctccagccttccggcgatgcgcgcgcgtgccagaccgcgcacggcggcctcgatcgggatatcccagccgcgcagacgcagtgcatccagagtgcggagcgccgtagaagcgttctgaagctggtgccgaccgggcatggcgatggtgtagccctgtccgtcgcagacgaaggcagagccgttcagatcacagcgaagcacacgcagcgtatccgcgctctcgtgccagaccgcaccctgagacgcagtgacatgacgcagtacggcgagagcgtcctcctcctgaccgtttgcgcagacgacatcagcgccgggcttgatgattccggctttctctcccgcgatctcagcaactgtgtcaccaaggactgccatatgatcgagcgagatcggcgtgatcacgcacacctccggactgcggatgacgttggttgcgtcgcagcggccgccgagaccggtttccagtacgacgatatcacagccctgctcgacgaagtataggaaagcaactgcggtcgtgaactcaaactcaccgatcgtctctccttcgggcagtgtcaggctttcgcaggcaactgcgacgcgctcggaaaagtgcgcgagatcgtcgctcgagatcattgagccgtcgatacggatacgttcgtagaactgcacgagatacggcgaggtgtacaggcctgtgcgcagaccggctgcctgaagcgcggaggcgatcatggtagcggtcgagcccttgccgttcgtaccggcgagatgaacaaagcgcagcctgtcctgcggatcaccgagcgccttgcacagcgcacggatacggtgcagaccgggtctgccggaaaaacggccgagcgagtggatatattcaacagctgttttagggaattcggtgtccatgatgaaacctttcctttttcgtttagtaatggctgtattatagcacagtctgggcaaaattgaaagcacaacagcgcaaaaagcggaagccggagcttccgctttttatctcagtttgattttcagcccagagctgcgatagactcctcgagctttgcgagatgctcgcgcagcttgtctgccttttcgcgctcggctgcaacaacgttctccggagccttgtcaacaaacttcgggttgttgagcttcttcataacgaacgcaatatcgtcctcgaccttcttcttctccttgccgagacgggcgcgctccgcctcaaagtcgatgaggtcgcccatcggcatgtaaagctgtgcgtcgccggtgactacggatgccatcttggcggcgtcagccggaacggcgtcgatgagttcgatctcggaagcgtatgccagcttcgggaagaagcctgcgcctgcggagaacgtatccttcttctcggtcagaatgagtaccttggccttcttggagggcggtacgttcatctcggcgcggcggttgcggatggcgcggacagcgtccatcaggctctccatctgcgcttcttcgacggagaagttcagcttctcgtcatactccggccacttggaaaccatgacggacgggccctcatgcggcagcgcctgccagatggtctcggtgatgaacggcatgaacgggtgcagcagctgcattgcgcccgacaggacgtaacacagcaccttctgtacgttctcgtcgccggtctggagacgggtctttgcgatctcgatataccagtcgcagaagttctcccagatgaagtcgttcagcttggaggcggcaagacccagctcgtactggtcgatgttgcgggtaacgtcggcaacgagggtgttgaacttgctgatgatccacttatcctcgagcgccagctcggcgggcagctcgaccgccttgtccttgtcgatggtcaggttcatctggatgaagcgcgatgcgttccagatcttgttgcagaagttgcgggatgcctgtacacgctcatccgagaaacgcatatcgtttccggggctgttgccggttgcgagggtgaagcgcagcgcatccgcgccgtactggtcgatgacctcgagcgggtcgatgccgttgccgagcgacttggacatcttgcggccctgtgcatcgcgcaccagaccgtggatatagaccgtcttgaacggggtctcgcccatgtgctccacgccggagaagatcatgcgggcaacccagaagaagatgatgtcgtagccggtaacgagggtcgaagtcgggtagaaatactccagctccttggtcttatccggccagccgagcgtggagaacggccacagagcggacgagaaccaggtatccagaacgtcctcctcctgatggatatgcgtgccgccgcacttcgggcaggtgtgcacatcggtcttggagacggtcatttcaccgcagtcgtcgcagtagaatgccggaatgcggtgaccccaccacagctgacgggagatacaccagtcgtgtacgttctccatccagcgcaggtaggtcttggagaagcggtcgggcacaaacttggtcttgccctcgtttactacgtccatagcgggcttggcgagcggcgccatcttgacgaaccactgtgccgaggtcatcggctcaacggtggtgccgcagcggtagcaggtgcctacgttgtgctcgtggtcctcaatcttgaccagatagccgccttcctcaaggtcctttacaaccgccttgcggcactcgtagcggtccatgccctcgtacttgccgccgtttgcgttgacggtcgcgtcctcgttgaatacgaggatctgctcgaggttgtggcgctggcccatctcgaagtcgttcgggtcgtggcacggcgtaaccttaacacagccggtgccgaactccatatcgacgtactcgtcaccgaaaatcggaatctcgcggttcatgatcgggaggatgcaggtcttgccgatgaggtgcttgtagcgctcgtcgttcgggttgacggcaacgccggtatcgcccataaaggtctccggacgggtggtcgcaaccaccagctcgcccgagccgtccgccagcggatagcggatgtgccacagcttgcccggctgggtttcgtactcaacctcagcgtcggacagcgcagtcgcgcagtgcgggcaccagttgatgatgcggtggcccttgtagatgaggcccttgttgtacaggtttacgaatacctcgcggaccgccttggagcagccctcgtccatggtgaagcgctcgcgctcccagtcacaggacgagccgagctttttcagctggctgatgatgcggttgccgaacttgtgcttccagtcccagacacgcttcagaaactcctcgcggccgaggtcataacgggtcttgccctcctccttgcggaggttctcctcgaccttgatctgggttgcgatgccggcgtggtcggtgcccggcatccacagagcctcgtagccctgcatgcgcttggtacggatcaggacatcctgaagggtctcgtcgaacgcatgacccatatggagctggccggttacgttcggaggcgggataacgatggtatagggtttctttttcggattgacttcggcatggaagaagccggagtcgttccagaagctgtacagcttgtcctcgaccgctttcgggtcgtaggtcttaggcagttcgctcatagatctatctccttcaatttttttacaaaaataaaaacagcacgccgtccaaaacaggacgaagcgtgctccgtggtaccacctgaattcgcggcaaaaagccgcgcgctcgttggtccgtaacgtggacaggacggaacagcttaacacaaatcagctgccctgctccaaagcgaccttctttcctctcgcagaggtgcttgcaccgaccgcaccttctctgaacagacgaagaagaaatactcctctttttcatggcattttctcagtattaccttgctattatagccgcaaacacagcttttgtcaagcaggacggacgaaaaatcatactgtattgtatttgtaacttgtgtttgtttcctctgcatgttacgattagcatataaaggtaaggagggaatagttatgaaacgaaagcggacatctgttttctgcgtgctcgcgctgcttgccgttctgctgccggttccggcgcgcgctgacatggggccaaagccgagcgtgaccatccatgtgaaaaatccgccgagcgggagctattatcttgatctgctcgtgccgggtgaagcgtcggacaagctgtttgataatcaggaatggaaccatctttccgagacgcagatggatgccgagatcataacgaatcttcggacggcggcacgcgatgcaggcggagaaggaacgtggcacctggctatgctggatggtacgcgagcgccgatgtacggcgagatacagagcacggatgacaccttccggtatggctatcacggcgtcccggacgagttccgtatcgtcatcgcgacaaaggacggcgcccgcctctcgttcgtgcagcagcgctaccgcctgtggcaggaatttacctacgactacaccgcgaacacggtcctgaccggcaattcgtggagcgattacgcaaagcagtttctctcttccctgctgccgacgctgctgatcgagggactgctgctcattccgttcggcttctgggacgagcgcaaccgcagagtgttcctctgcgtgaatgtcgcaacgcagcttgtgctgaccgccgttaccgcatggtgcatggcgcaggatatggtgttctaccggtattttgtctttgtgccgctcgagcttgccatctggattgcggaggccgtcatttaccgcaaaacgctcaggagcgaacgtccgtcggcacatccgatctgctatgcgctgtgcgcaaacggcctgagcatggctgcgacgtttttcagcattcgctgggtattcccctgggtctgaggaggagaagttatgcaaaaaacaaagaaaaccgcactctgggcgtgcgtcatcgttctggcgtgtatgctttcgtactgcatcgtcagcaaggtgcagcagtataattatattcattccgaataccgaaccggcgcgatgtctgtgcagaaagacccgtccgagaccttcgaggtgcgcgagctcatctcggaaaaacagaggaacggcggtgtaacgctgtaccgtgcagcgtattatcccgaggcggaaacgctgatgctctggttcggcggcgccgaaccagagcgtgatatctatatcgacgatcagccggcaaaaaactatctgtcggtcagcgaaaaacacggcgttggtcttgcggtccttgaggatgtccctgcggacgcgatcccggaaaccgtgacggtcgcaaagacagatgttcagcatgagggcgaggaactggtcactttctcgatgaaaaacggaaaaaacgcttaaattcctgcaaaccgctcttgcattctgcgcggaaatgtggtttaataattctgttatgaatattccaatgcgatgaacaggaaaagtagcattcccatttctcggtccagagagcgcggccgcaggctgtaagccacgccatgagacaggatgtgaagttcccctgcgagcatctgtgctgaaccgcggctttcggcagtaggcacagacgggctgacgcctcgttaccggcgtttaatgagtgtccgagcattcggaaatcagggtggtaccacggaagagttatgcctttcgtccctatatctgcaaaagcagagggacggaaggcttttttacgcttccgtcccggcatgaacatcacgttccaaaggagaattgatatgaaagaaaagctgcaaggcattttgcagtccgcgaaggagcagcttgctgcggcggcggatgcacgcgccctcgatgaagcgcgtgtcaagttcctcggcaagaagggcgagctgaccgctctgctcaagggtatgaaggacgttgctgcggaggagcgcccggtcgtcggccagctcatcaacgacgttcgcgctgagatcgagaccatcatcgacaagcagaaaaagctgctcgagcaggcagcgctcgaaaagaagctcgctgccgagaccatcgacgttaccctgccgggcgacgaggtcgtgatcggcaaaaagcatccgctgaacatcgtgctcgacgagttcaaggagattttcctcggtcttggcttctccatcgcagagggcccggaggtcgagctcgaccactacaacttcgaggcgctgaacatcccgaaggaccatccggcacgcgacacgcaggacaccttctatatctcggacaatgtcgttctgcgtacccagacctccccgatgcaggtccgcaccatggaaaagcgcaagccgccgattcgcatcatcgcaccgggtcgcgtttaccgttcggacgcagtggacgctacccactccccgctgttccatcagatcgagggcctggtcgttgacaagggcatccgcatgagcgacctcaagggcatcctcgagctgtttgcaaagaagctgtacggcgaggacacggtcgtccgtttccgcccgcaccacttcccgttcaccgagccgagtgcggagatggatattcagtgctaccgctgtcacggcgagggctgcccgctctgcaagggcgagggctggatcgagatcctcggctgcggcatggttcaccccaaggtgctcgagatgagcggcatcgacccgaacgaatactccggctatgccttcggcatcggtctcgagcgtatggtcatgggccgttttaagatcgacgatatccgtctgttctatgagaacgacgttcgattcctgcaccagttctaagcgctgacgcgcttacagcggacttcggaagtccactgtatacgaaaacagcagcactgttttcaatttcatgcgcgcctgacggcgctgtaccatcaaggaggaaatatatccaatgaaactgccattatcctggctttcggattataccgatatgaccggcatcaccccgaaggagtatgatgccaagctgaccatgtccggctccaaggtcgaggaggtctactacctcggcgcagagatcgaaaacgttgtgaccggcaagatcctgtccgttgtcgaccatccggactccgaccatctgaaaatttgccagctcgatgtcggcaaggaggagccggtgcagatcgtcaccggcgcacccaatgtaacgcctgcatccgttggcgagatctgcccggtctgcctgcacaagtccaccctgcccggcggcgtaaagatcaccaagggcaagctgcgcggcgtgccgtccaacggcatgatgtgctcgttccaggagctgggtctgtcccacggctgcgtgccgtatgcctgcgagaacggcatcctgttcctgccggccggcaccccggtcggcgaggacatcaaaaaggtactcggtctggacgactgggtttccgattttgagatcacgtccaaccgtccggactgcctgagcgtgatcggcctggcccgcgagactgcggctaccttcgaccgtccgttcagcgttaagaccccggaggtaaagggcgttggcggcgacatcaacgagtatatgtccgtcgaggtcaaggacaccgatctgtgcccgcgctacaccgcccgcatcgtcaagaatatcaagatcgagccgtctccggcgtggatgcgcgagcgtctgcacgcctgcggcgtccgtccgatcaataacatcgttgatattaccaactacgttatgctcgagtacggtcagccgatgcacgctttcgactacaagtgcctgtccgacggccgcatcgttgtccgccgtgcccgcaacggtgagtccatccagactctggacggcgtagatcacgacctgagcgacaagatgcttgccatctgcgacaacgacaagccggttgctgttgcaggcgttatgggtggcgcaaactccgagattatggacgacaccaagaccgtcgttttcgagtccgcgaacttccacggcgctaccgttcgtattaccgcaaaggcgctcggcatgcgtaccgaggcctccggccgctttgagaagggccttgacccgcgcatgaccctcgatgcggtcaaccgtgcgtgcgagctggtcgaaatgctcggcgcaggcgaggtcatcgacggcatcatcgacgttgacaactccgacccgaaccacaagcgtctgccgtttgagccggacaagatgaacgcgctgctcggtctggagctgtccacggaggagcaggtaaagctgctcgagaagctggacttcaagattgagaacggcgaagtcgttgtaccgttcttccgcaccgacatcaaccgcatgtgcgacgtggccgaggaagtggcccgtatgtacggctacgacaagattccgaccacgctgtacgccggcgagatggtacagggcgagttcaccccgtcccagcaggcggagcgcgccgctgcgctggtttgccgcgaggcaggcttcgacgagtccatgagccattccttcatctctccgaagttctacgacatgatcggctgggacgagaacgacccgcgacgcatctccaccaccatcctcaatccgcttggtgaggatttcagcgtcatgcgtaccaccgtgctgccgtccatgctggataatctggcgcacaaccacgcgcaccgcaacccgaccgcttcgctgtacgagctgggcaccatttataccccgaccgtcaaggacggcaaggctgacccggacgtactgccgcacgaggagaagatcctgaccctcggcagctacggccgactgtccttcttccagttcaagggcgtgatcgaggcgctgctgcgtgaactgaacatcaagggcgcgtcctttgctcccgagaaggccaacccgtcctaccacccgggccgctgcgccaaggtgctgattgacggcaaggagatcggcgtattcggcaccatccacccgaccgttgcagcccgctacggcctgtccggcgaagtgctcgctgccgagcttcagatggacgcgctgctggccgccatcgacccggagaagctgtaccacccgctgcccaagttcccggcatccacccgtgatattgcggttctggtcgatgatgctgttccggcagcttctatgcaggccgctgttgagaaggcggcaggcaagctgctcgagagcgtcaagctgtttgacgtttacaagggcaagggcatcccggagggcaagaagtctgttgcatactcgctgtccatgcgtgcgcccgaccgcaccctcaccgacgaggagtgcgacaaggctatgcgtgccgcgatctcggcgcttgagaccgagttcggcgctcagctgcgcggttaatttcaaaacacaggaagggagactgcaaccggtctcccttctgtatttctggtgcaggcacctgtttgtgccggggatggaaaaagattttgctcgagttttccacggaataggctttactttttccgcaatttgtattatgctgtttatatagaattatacccgacaggtaggaacggaaaggagaccaagcatgcttgacggaacgagaaaattcagtctggtagacgagtccaacaaggagatgaagcgcacgcttaccgctgtgtacgacgcgctcaaggagaaaggctacaacccgatcaaccagatcgtcggttatctgctttctgaggacccgacctacataaccaatcacaacaatgcccgcagcctgatctgcaagatcgaccgtgatgagctgatgcaggaactggtacagttctatctggataactgatacgattgatatacagcggcttttcgctgtaatgatatgagctgttagaaaaataaccgcccttcgagcaaggcctgcggttatttttttatggtcgatatacagaggacaaaatacagcggtacggccgcaaaggagcaaaaatgaacggatttcttcctatttcaaagcaggatatgaccgagcgcggatggtattactgcgacttcctgatcgtgacgggcgacgcctatgtcgaccacccctcattcggtacggcgatcatttcccgtgtactcgaggacgcaggctataaggtcgcgatcctcagtcagccggatttccgcgatgagcatgattttctcgcgatgggacggccgcgctatgcggtgctcatcaacggcggcaatattgactcgatggtcgcgcactatacctccgcgaaaaaacgccgctcggacgatgcctatacccccggcggcaagggcggcaaacgtcccgaccgcgccgtcaccgtctattccatgctcgcacgccgtgccttccccgatacgccggtctatctcggcggcatcgaggcgagcctgcgacgctttgcgcactacgactactgggcggaccgcgtcatgccctccattctggagtctaccggcgcggacggtgtgatgtacggcatgagcgaacattcggtggttgagcttgcgaacaatctccggcacggcagaaaaggcgcagatgcctgcgtcggtgtgcgcggcacagcctacatgacacacgacgccgaggggctcgcgtgggatgcggtcgagtgcccgtcctacgaggatgtctgcgcgagcaaaccggactacgctcgttcggtcaagctccagtatgacgagcaggatgccgtgcgcggcagggcgctgcttcagcgccacggccggcgcgtgctcatccagaatccgcccgcgaagccgctgaccaccgaggagatggatcacatttatgcgctgccctatatgcgcacctatcatccttcctacgaggcgctcggaggcgttccggccattcaggaggttcagttttctatcattcacaaccgcggctgcttcggcgcgtgcaatttctgcgcacttgcgttccatcagggacgctacattcaggtgcgcagccatgagagcgtcatcgaggaagcgaaaaaaatcacccagatgcccggcttcaagggctatatccatgatgtcggcggcccgacggcgaattttcgcttccctgcctgcaaaaagcaggacacgcacggctgctgcaaggacaagcgctgtctgttcccatctgcgtgcagcaacattgaggccgaccacacggattacctcaacctgctgcgcgagctgcgccggatcgagggtatcaagaaggttttcgtccgctcgggtctgcgctacgactatatgatggcggacaggaacgatgccttcttcaaggagctggtcgagcatcatatttcgggtcagctcaaggtcgcgcctgagcacatgagcgacaatgcactctattatatgggcaagccgtcgttcaacgtttatgagcagttccgcgaacgctatgcacgcatcaaccagaagctcggccgcaagcagtatcttgtgccgtatctgatgagctcgcaccccggcgcgacgctcgacgacgcgatcatgctcgcgcagtacctcaaccgcatcggctatatgcccgagcaggtgcaggacttctaccccacccccggcacactgtccaccgcgatgtattataccggcatcgaccctcgcacgatgaagccggtatatgtcgcgaaaacaccggaggaaaaggcgatgcagcgtgcgctgctgcaatggcgccgtccggacaagcgtccgatcatccttgcggcgcttaaaaaggcaggccgcgaagatctgatcggctacggaaaggaatgcctcatccgcccgaaccgcagcggcgagcagaatgtcgctcccaggagcagcaaaccggcgcaccgccacggcgtttcggcggcacgaccggaaaagccgcgccgcaacgccaaaccggcagcaaagccggcatcccgtgcgccgcagccgaaaaagggttgggcaaagccgaagaagaaaaagtaaccgggaacatttcggaaacctgtccgtctaaccggacagaaaggcggtggataccatgaagaaacgtatggctgcactaatactcgcgctgctgcttgcgcttgcgctgaccggctgcggcagcagagatacggaaaaagacggcgaaagcgcagacattggtacacagagcacggatgacgcttcaacgctccccgacactgcacaggaccgtccggtgacggacgcgccgatgatggtgatggtggataacacgctgtatcagtccgagggagaggtcagcacggtcgagggccgctgcggcaacatggacggcgagatcacctcgcagacagccagcggcacggacgcaccgaccgaggacgaccagtccaacttcggcaccggctacggctatcagttcggggacggcactgttgaggtgctgattgataatcggtggattgttttccggccgattaccgactcggatgtctgatctcgcgggcgaaaaaacggttttttcgtgtgtagtgcacaaaaacagcagagcacagcggttcataattatatgcagaccgcagtattttgtttgacatatgcggcataatgctttataatgtaaatgaacaaaggagttcacttcgcataacacgaggtggactccctttttgttttaccattttttgtagataaggagggctaccgccctatggatgaaatcgacctgaaactgctgcgcctgctgcaaaaaaactcccgcactccgatcaagacccttgcaagcgaggtgcggctgtcctctccggctgtctccgcgcgcatcgagcggctggagaagcagggcgttatccgtgcgtatacgctcgacctcgatccgcttcagctcggccaccacattctggcctatgtgcatctggatatgcagccggcacagaaagcagagttctatccgtttatcgcggcgatccccaatgttctggaatgcaactgcgtaaccggcaactattccatgctcatcaaggtctccttcccttcgacgcaggatcttgacggcctcatcgggaagctccagcagttcggcaagaccgaaacgcagatcgtgttttcttcgccggttccgccgcgcgccatcgtcatctgacccctaacctgttctcggaaattcctgttctctccccacccctgggactgtctcgctgtcgggacagtccctttttagcgttttttgccaaaacgcatggcagcgcgctccttgcgattttcgttgcactgggcgcagtttggtgttaaaatagaaactgatacattatgtaattacatacccggaattaaggaaggtattttatgtggatcgcagataactggaaagactacgccgtgctcgactgcggcggcggagaaaaaatcgaacgatggggcagccagattttgcagcgtcccgacccgcaggccatttgggcacgcgacaaggactgcaaggcatggaaccgtccgaacgccatctatcaccgctcgaatgcaggcggcggcaagtgggaaatccgcaggctgcccgagcagtgggccattcattacggagacctcacgttccagctcaagcccatgagcttcaagcacacgggcctgtttcccgagcaggcggcaaactgggactttattgacaggatgattcgcggtgcaggacgcccgatcagcgtgctcaacctgttcgcctatacgggcggcgcaacgctcgcagcggcaaacgccggtgcatcggtctgccatgtcgatgcatctaaaggcatggtgcagtgggcacgcgaaaacgcagcatcttccggtctggctgaccgtccgatccggtggatcgtggatgactgcaaaaagttcgtgcagcgcgagatccggcgcggccgcaaatatgatgctatcattatggatccgccgagctatggccgcggtccgtccggcgagacctggaagatcgaggaggatgttgcggacttcgttgatcttaccatgggcgtgctgagcgacaagccgctgttcgtgctcatttcgagctattcgaccggcctcgctccgtcggtcatgagctatctgctgggtattacggcaggaaagcgggccgccggtaaaatcgaggcacaggagctcggcctgccggtcgagtctaccggtctggtgctcccctgcggttcgtcggcccgttttattgcggaagagtaacaaaaaggatgaaaactactgaaatggctgaaataatcaaaaccgaagatcttcgctatgcctatccggcggaagagggtcaggagccggtgcaggtgctgaagggcgtggatctcagtatccagcgcggcgagttcgtggcggtgctgggtcacaatggctcgggcaaaagcactctcgccggctgcttcaatgcgatccgtctgcctaccggcggcgtgtgctacgtcgacatgatggacacgcgcgacgaaaacaacacctatgaggtgcgcaaaacggtctctatggtgtttcagaacccggataaccagatcgttgcaacggtcgttgaagaagatgtcgcgttcgcgctcgaaaacatgggcattccgcctgccgaaatccgaaagcgcgtagatgatgcgctcaaggccgtcggcatgtatgagtaccgcgcgcaggcgccgcaccgcctgtcgggcggtcagaagcagcgcgtcgccatcgcaggcgtgatcgccatgatgccgcgctgcgtcgtgctcgacgaaccgaccgccatgcttgaccctcagggccgccgcgaggtcatgagcgttgtgcgcgagctcaatcgtaaatacggcattacggtcatcctcatcacccatcatatggatgaagccgtacaggcacagcgcgtcgtcgtcatgcacgcgggaaatgtgctgatggacggcagaccgcgtgagatcttcacacaggtggacaagctgcgcgccgcctcgctcaccgtaccgcagacgatcgaggttctgtatgacctcgacagacaggacggcgagagcctgccgatcgacgcgctgagcgtcaatgaatgcgcggatattctggaaacctatttggcataactgcaatataaggagaaattccattgtcaaccatacttgaaacacggggcctgacgcatgtttacggcgcaggcaccccttttgagcgtgtcgcgctcgaccatgtcgatattcagatcaacaagggagagatcctcggcgtgatcggtcacaccggttcgggcaagtccacgcttattcagcatttgaacggtctgctccagccttctgagggagaagtcctgctcgacggcaaatctatctgggatgcaaagggcaaatgtgcgcgcgagacgcgatttcgcgtcggtctggtatttcagtatccggagtatcagctgttcgaggagacgattgcgaaggacatcgcctacggcccgaccaacatgagcctgccgcaggcagaaatcgacgtgcgcgtgcgcgagtcaatggaggcggtaggcctcgcccctgagcttgctgaccagtctccattcgcgctctccggcggtcagaagcgccgcgttgccatcgcgggcgtgatcgccatgcgtccggatgtgctcgttctcgacgagccgaccgccggccttgatccggcaggccgcgacgagatcttcgagcttgtccgcaattaccacgcgcagtccagcgcgaccatcctcatcgtctcgcactccatggaggatatttcgcagatcgctgaccgcctgctcgtcatggatcatgcaagggttctgttctgcgatacgccgcgcgaggtgttttctcacgctgacgaaatcgttgcggcaggtctcgatatcccgatgatcaccaaggtcatgatagagctgaaaaagcgcgggcatgatgttgatacctcggtctataccgttgcgcaggcgatggacgcgctgcgcgcctgcaggaagaaagggggcgctcactgatgctcaaggacattaccatcggccagttcttccccggaaacagcgccgttcaccggcttgacccgcgcgtcaagatcgtgctgacggttgcactcattgtgctgctgtttcttgcgcagggaccggtctcttatggccttatcatcctgtttctcgccctcgttatcggaatttcgcgtatttcccccaaaatggtcgtgcgcggtctcaagcccattctgctcatcgtcatgttcacggcggtgctcaatctgttctatacgccgggtgattatgtctggcagtggaaattcctgcatatcagcgtagagggcatccgcatggcggtattcatggtgctgcgactgatgctgctcatcatcgcgacctccatgctcacctacaccacctcgcccatccaactgactgacggtctcgagcggctgctcgctccgctcaaaaagctgcatgtgccggtgcatgagctatccatgatgatgtcgatcgctctgcgctttattccgaccttgattgaggagaccgagaagatcatctcggcgcagaaggcgcgtggcgcggacttcgactccggcaacctcattcagcgtgccaaggccatgatccccattctcgtgccgctgttcatctcggcgtttcgccgcgcagatgagcttgcgaccgccatggagtgccgcctttaccgcggagacgttggccgtacccgcatgcgtcagctgaagattgcacgtgtggacatctgctccatgctgctcgttgccgtgctgtttgcggctgtgatcgcgctgcgcagactgggtctgtaaatcacttgtcaggtattttatagtatgaaaaacattgctttggtgctgtcctatgacggcacaaactacaacggctggcagatacagaaaaacgggccgtccattcaggaaagcatggagaccgcgctcttccgtctgctcggcgagaaggtgcatgtctccggtgtcggccgcactgactcgggtgttcacgcaaaacgttatgtcgcgagcttcaagagcgagcgctgcactattccgacagaccggcttccctttgcgctcaacagctttctgccgcccgatatcgcggtctcaggtgcagtcgaagtcccggaggactttgacgcgcgttttgactgcactcgaaaggaatacgcctattatatctttccgtccacgctgcgtgatccttttcatgcgcgatatgcgtatcgctacaactatccgctcgatgcagagcggatgcacgagggcgcacagcgctttgtcggcacgcacgattttgcatccgtgcgcagccagggtacgccggtcaaaagcacggtccgcacgatcttctggtgtgacgtggacaagattgatgatctcatccgtatccgcgtatgcggcgacggctttctgtacaatatggttcgtgccatttcgggtacccttgtctatgtcggcggcggcaagctgcggcctgacgacgttgccgatgtgcttgcgtcctgcgaccgcgaacaggccggtccgacgctgcctgcctgcggccttttcatgaaccggctgtggtatgaccacacgagtgaactcgaccgttttcggctgggggactgaaaaatttattgactattcacattttacgcctcgaaaagcgatataatgaggaggtgaaccttgatgggtgacacaccaaacgaaaaaatgtccagagtaagaaatctcatccgctttccggcaacgggcaaagaccgccgtatccgcttggaagagagccgcgatccgcgcatccgttttgtcacgaagctgcgttttgtctgcggctggctgctggcggtcggcgcgttctgctttgtgctgacccattatggtctgttcgcgccgtcagccattcagcgcacggtgcagtacgcgctcgccggtgcgcgccagcatgagggcgacatcacgaacatagaattcgaaaacaatattttcagcgatggtgcgctgttcgagtccggtctcgcctacgcagacagcgatgcgctttatctctcccgtccgggcagcatgacgacgtttcaagtgacgatcggctattccaatccggtcgtggagtcctgccagaccaatgttctggtctatgaccgcggcggcaagaatgcggttttgacagatgcgtcctcggtcaaggcggaggtcgcgctgaattccgccattctgaccggcagcatcggacggacgggcgattttctgctcatcactgacgagcagggctaccgcactgctgctgccgtttattccaccaagggtgaggagctgttcaaattcagctcgtccgagctgtatatcgtctcgggcggcctctcccccgacggaagaacggttgccgtgctcggcttcgagcagcgggatgcatcgcttatcagccatgttcgcttttatgatgtatcgagcggcaagcagatctcggataccgagctggagaacgcgctcggcatagagctgtgctatctcgataacggttcggcagccgtgctgtgcgacgacggtctgtatctggtcacgcgccgcggcagcagcgagcacgcgctgaccgtcggcacgagcgacctgatctcggtcgcgacgcgcgacaacgcgatggtgcttgcgattcgttcgtactcgggcggcgcgcgcagcgatctatatacggtgcgcagcggttcggtatacggcccggagccgctcgacgaggagccgggcgcgctggcggtctccgacgccggtgaggcggtgctgacaagcaccggcgtcacggtgtacgacacgcagttccatgcgctctggcgcaatgatgaggccatcggcgcacgccgcatactgctcaccgatgacggtacggtattcgttctttacaacagcaacgcccgcatattcactgcccgctccgcgcagtccagggaggtaacagccgatgcagccgcagcaaattcctgatgcgctcctcagcctgcttaacgtgcccgatctcgtgatcctcgcggtcgtgctcgttaatctgatccttggtctccggcgcggcgcactcgcctcgctcgcaggtcttgtgggccgctgcatcgcgatggccgggtcgtactttctcgcccgtcagctggcgccatctgctgcgaaatggctcgcagagccgattgtgcgcagcgtttttgagcataagctcaagcagtcgggcgttccagacgcgctggcggacagcgtacagacggcgctccgcgctgcggtgcagagcatggccgagagtatttcctatcttgtgctgatcgcagtgttttccgtcctgctcagtgttctgatctcgcttgcggtcagggcgctccgtctgctcagccgagtcacccctctcggcatactcgatgcactggccggcggcgcgatcgggcttgcgaccggtctgctgctcgtcgtgctcgtactgctcggtgcacactggttctacccggtgacttttaccgagctgggatatctttcacccgaacgtatcgaaaatacgttcctgttagctaaaattatcgcgttcctgccgtttattgcggcatgaatcgtcagaatctgtaattccattgcagaatgaaggagtttaaccaattatgaacatgccaatgtgctcgcggtgcaagaaaaacatcgcagtggtgttcatcaccaaaatcgaaggcccggataagaccacgcaggagggcctgtgcctcaagtgcgcgcgcgagctgggcgtcaagccgcttgacaacattatggaacagatgggcattacggaggacgacctcgaggccctgtccggtgagatcggctcgctgtccgatctgaatgagcttgtgactgctgggtcggacggctcggacgacgaagcgccgcacgagaccgaccccatgaccacatcctcctcccctgcccgtccggcgcaggagagcacgcagaacagcgacaagcgcggccgcagccgcgacgacaaaaagcgcaagtatcttaacaattactgcgaaaacctgacccagaaggccgctgagggccgcattgaccacatcgtcggacgtgaccgcgagaccgaccgcgtcattcagatcctcaaccgccgccagaagaataatccctgtctgatcggtgagccgggcgtcggcaagaccgctgtcgcggagggacttgccgtgcgcatcaacgagggccgcattccttttaagatgcgcaacaaggaggtccatctgctcgacctgaccgcactggttgcgggtacacagttccgcggccagttcgagagccgcatgaagggtctgatcgacgaggtcaaaaagatcggcaacatcattctcgtcatcgacgaggtgcacaatattgtcggtgcaggtgactccgaaggctctatgaatgctgcaaatattctcaagccggctctcgcgcgtggcgatattcaggtcatcggcgcgaccacgctcaaggaataccgcaaatacatcgaaaaggatgccgctttggaacgccgctttcagccggtgtacatcggggaaccgtctgtttccgagaccacagaaattctcaagggcatccgttcctattacgaaaccttccacggtgttaccgtgtcggacgagatgtgccgccgtgccgccgagatgagtgagcgctatattaccgaccgctttctgcccgacaaggctatcgatctgatcgacgaggcctgctcgcgcctcaatctggactctccgcagctttctgagatccctgagctgcagaacgagctggaacgccttcaggcgcagcttgacgagcttacgcagtcctctgcgcgcagcgaggaggaggaaacctatgcgaagatcgcatcttgtcgctcgcgtattctccaggtcgaagcacagctgcatgacctgctctgcaagcctgcgcctgctgttgacgagcagttgctggccgaggttattgagatctggaccggcattccggcctccaaggtggcagcgcaggagtccgcacgtctgcgcgatatggaaaaccgtctcaagtctcacgtgatcggtcaggacgaagctgttgatgcagtctgcgcgtccattcgccgcagccgtgcgggtatcagccccaagcgcaagccggcatccttcctgtttgtcggcccgaccggcgtcggcaagaccgagctggtcaagcagctcgcactcgatctgttcgactctccggatgcgcttgttcgtctggatatgtccgagtatatggagaagcatacggtttctcgtctgatcggctctcctccgggatatgtcggctacgatgaagcaggacagctgaccgaaaagatccgccgccgcccgtactcggtcgttctgttcgatgagatcgagaaagcacatccggatgttcttaattcgttgctccagatcctcgacgacggccgcctgaccgatgcgcagggccgcgttgtcagcttcgagaacacggtcatcgtcatgacctcgaatgccggttctcagtcgagcagcacgcctgccggctttggacgcacggtctctcagatgagcagggaccgcgtgatgaaggcgctcgaggagatcatgcgtcccgagttcctcaaccgcatcgacgagatcattgcgttcaaccagctcaccgaggacaacttccgtcttattgctgagatcatgctgaacgagctcaagggcaccctcgcagacaaggaaatccgtctgacatgggatgacagcctgctcgcgctgctcgtagaaaagtcctattcggtcaagtacggcgcacgcaatctgcgtcggctgatcgaaaaggaaatcgaaaatccgcttgcaaacgctatcgtcacgggtgataagccgcttctcggcgcgcatctttccgctgaggacggcagggtaaagctggatacgatttgatccggaattgttgaaatacgatgctgatcgacagcaaaagccgcccacagggcggcttttgcttttgcgcagattatgcaaatttgaaccagaatttcggaccggcgtctgtgttttctgcgccgcaggtgtatccgtgcagatcgaacacggttttcgcaatcgagagaccgaggccgtcgccctttgtgctgcgcgaggggtcagcctgataatatgcctcccacagccggggcaaggcatgattcgggatggcgtcgccggtgttggctacagaaagcataccgttcgcgatgcggactgtgatgcagcctccctcaggtgtgtgctgcacggcgttttcgaggagcgcgtccagtgcccgtgcaagcagtgcgcggtctgcgttgaccaggtattcgttgtcggatgccaattccgtgtgcaggctgccgtctgccgggagcgcggcggcaagcctttcctgtgcgagggcggcaagcgggaattcctctcgacgcagcgcctgcacgccggtctcaagccgcgacagctcaagcatctgccgcacgctgtcgtccatgcgtcgggtctgcgcctgaatgacgctcagataatgcgcctgcttttccggtgcgagccggtcgcccagaagctccgctgtcgcagaaaggacggagagcggcgttttcaactcgtgcgcgagcgcggcggtcgtttcgcggcgaacctgctccacgcgctcctgcctgcgccagacgcgaagaagcgcataggacaggactgccgcacagaacagcgcaagcgccagactgaatgtccagacggggataagcaccggcagcgatgctttgagaggatacccttccgccgcgtaggacacaaatacgtagtggctctcagcaaaaggacaatactttatctgccgccggtacgtccgcacgagccatggcttctcgaccgtttgactgctgtttgcgccgctcgggttttctgcccattcccgaagcgcctgccgcgcaggagaggacagggatgcggcaatctgctcggcggtagcgccgttcggtccggggtacataatgccagagcaagtcatggttttcagaggcagatttttcatctgcactgcgtcataggtgcattcaaccatgcgcacttctccggtcggctcccacgtgccgccgacgttcttcgtcggcttgatcgttatggatttcagatacgcatcatcgcggtatccgggtacactgtctgcccacacctcaaaggtcatccccggcagcgattctatgtttttctcggctgcgcccgcacccgcaaggatcgtctcgcacacctcgcgcggctgactgctcatatccacgcggtacaggttttctccctcgatcagttccagccaccagcggttgctttgcagaatatcgccggtgttcaggtcggtgatggcggtttctacgatttgcaggttcggcgggtctgtgctgtccgccatgaataccgccttgctcaatcgtctgcgcagctctgtctcgtccgtcgcgtcatatgtcgaggggtcgagcagaatatcggtatcctctcccatcagcctgtttgatttgctttccatgtccgacagcatgagttctgcgcgctgctgcgacaccagaacggtgaacatcgccatcactgcaagccagaacgcaagaaatcctgcgccgatacgtgtgaaaaagctcccaaaagttctacgtattgttttcatctccgtccacctccagtttgtagccgcgctttactacggtcttgatgcagtccgcgtgcgtccccagtgcccggcgcagctttttgatatggctgtcaaccacgcggtccgaaccgtcaaaatcccagccccacgcaaggttcagcagttcgtcccgggtcagcacgcggtttctgcgctccatcagcacccgcagcaaagcaaattccttgggcggcaggtcgatgcgctgaccgtccgctgttaccgttcccctcgccgggtcgagcacgagcgcaccggctatcagaacctctgttgctgtcatgccgcgtgaacggcgcagcagagcctgtgctttggcgtacagcacagcaagcgaaaacggtttgacaacgtagtcgtccgcacccagactgtagccgtgcagcttgtcctgctcgtcctcgcgcgcggtgatgaacaggatgggtgcctcgccctgttcccgcgccgcgcggcacagcgcgaacccgtccgtgcccggcagcatgatgtcgagcagaagcagatcgaagggctgtgtctcgatcaggtgaagcgccgtattgccgtccggtgcggaaatcatagtcagctcgccgccgctcttcgccgtgaaataatcgcacagcacctcgcgcatatcccgttcgtcctccgccagtaaaatagttgctttcatacgctctcccctcctttgattacagtataacacagccgtatgcccttttgatgccctgctgaaaatgctgcgaaaaaactttcttaataaatttgaaaaaatatgttgacatacgtcctgtgaattgatataataaacaagcgtcagagagagacccgcgggtgtagttcaatggtagaatgtcagccttccaagctgaacacgtgggttcgattcccatcacccgctccactttttgatgtgccgggttgccggaattgacatgcgccagtagctcagccggatagagcaactgccttctaagcagtaggccgggggttcgaatccctcctggcgtgccaatcctttcgaggtttatccggtggctgatttttaatatggtgggtatagctcagttggttagagcatcggattgtggttccgagggtcgagggttcgagtccctttacccaccccatatttttttgatccagtagctcagtcggcagagcacctgccttttaagcagggtgtccggggttcgaatccccgctggatcaccaataaaaagcacggtttgccgtgctttttatttttgtcatttccccgcagactccgtacattaaaatatttcgaaaaacccttgacctggagtgaactccaagtggtacactgaacatatacaatcatttcgttcaggagagattattatgacgatagctgaaacagctaaaaaatatgacatttccgcagatacactgcgctattacgagcgcatcggtcttattccgccggtgccgcgcacgaggagcggcatccgtgactacgacgaaagctcgtgcggctgggtcgagtttattaagtgtatgcgcggcgcaggtctacagatcgaagcgctcatcgagtacgtttccctcttccggcagggggatgagacgagcaatgcacgcagagccattctgatcgagcaacgcgggcagcttgccgagcgcatcacgcagatgcagcagaccctcgagcgtctcgacagaaagatcgcgcactacgaaaaatgtgcagccttcgaacatacccttcgcgacggcgaggcgccccggaaataaaagactcccctcccccgtgaaacttgtagttctgtaaaaagcaggtggacggatttatatgaaaaacaaacgttttatgcgcattatgcacagtttgaaagcatctgtttcgtctattatgcgtataaacttcaaatcctttggttaaaacgacgtattatccggcgtttctgataaatttattgttgcattccgttaaatttgacagttgacgcatgctaatccgtgtggtatattgttagaaggaacaaaacttaacaagaaagtgtgcaaaacgcactcgaaaagagaccatccgcggccgctacatggtacgggtggtatagtgctgttctgccgcctctgtgcggcaaaaaatcggcggaacgtcggcctttaccggtcggcatcggcaataaatatccaaacaagaaggagacttgaacatggatttccatctgacccgtgaacaggaactggttcgccagatgatgcatgacttcaccgagaacgaagtcaagcccatcgctgcggaaaccgacaaaacctctacttacccgcgcgagaacatcgagaagctgttcgaccttggcgtaatgggcatgatcgtgcccgaagagttcggcggcgcaggcgctgacgacctttcctctgcaatcgctatcgaggagctgtccaagcagtgcgcttccaccggcgatattctcgctacccacaatggtctgtgctgcggcccgatcatcgcaaacggcacccccgagcagaaggagaagtacctccgcatgctgaccgagggccacaaggtcggcgctttcgctctgaccgagccggacgctggttctgacgctgcaaagggcacctgtgttgctgagctgcagggtgaccactacgttctgaacggctctaagatcttcatcaccaacggctatgttgctgacgtattcgttgtatttgccatgaccgacaagtccaagggcaccaagggcatttctgcattcatcgtagagagctccttcccgggcttctctgttggcaagcacgaggagaagcttggcctgcacggctccccgacggctgagatcgtattcaccgactgcatcgttccgaaggaaaacctcctcggcgcagaaggcaagggcttcaagatcgctatgcagaccctggacggcggccgtatcggcatcgctgcacaggcactcggcatcgcagagggcgctatggaagagtccatcaactttgctaagacccgtgagcagttcggccgtccgatcgcaaagttccagaacactcagttcctctttgctgacatgcacgttgcaatcgaggctgctcgcctgctgacctacaaggctgctgttgccaagaccgagggcggccgcttcactctggacgctgcaaccgctaagctgttcgcttccgaggctgctatgaagatcaccaccaaggcagttcaggtacacggcggctacggctacaccaaggattacccggttgagcgcatgatgcgtgatgccaagatcaccgagatctacgagggcaccagcgagatccagcgtgtcgttatctccggcaacattctcggtaagtaagaataggaggaaaactgaactatgaaggcaattgtttgtgtaaagcaggttccggatacctccggtaaggttgctgttaatcccgatggcactctgaaccgcgcatccatggctaccatcatcaacccggatgacaagaacgctgttgaggctgctctgcgtctgaaggatgctaccggctgcaaggtcgttgttatcaccatgggtcctcccccggctcagggcatgctgcgtgagctgatggctatgggcgctgatgagggcatcctggtttccgcacgtgagttcggcggttccgataccttcgctacctcccagatcctcgctgctgcaatcaagaagtacggcgttgacgctgacgacgttgtattctgcggccgtcaggcaatcgacggtgataccgctcaggtaggctctcagatcgctgagaagctgaacatcccgcaggtctcctacgctgctgacgtaaagatcgagggcactaccgtaaccgttaagcgcgcactcgaggatggctacatgaccatcgagacccagaccccgtgcctgctgacctgcatcaaggagctcaacgagccccgctatatgtccatcaagggcatcatgggctgctacgacaagccgattgcagtttatgactacaacaccctgaaggacgatccgctgatcgacccgaccaccattggtctgaagggttctccgaccaacatcttcaagtctttcactcccccgcagaagggtcagggcaagatgcttgagggtgctgacaaggctacctgcgaagagctggttggcgagcttcagaagaagcacatcatttaatcggaaggagaaaactgaacaatggctgatttcaataacaccaacctcgccgatttttccggcgtatgggtattctgtgagcagcgtcag

SEQ ID NO: 12829 - DNA, 44134 bp, Unknown
  gut microbiota DNA sequence
ctatcctgatacaagggtacccttgtatcaggatagtcctatcctgatacaatccgttctaatgacaaaatttttcggagcggagcggagagacctgcggccgaaggttctgcaaataaacggaaaaccgcagaaccggaatatacaaggaggaaaatgtgatgaaaaaaagattattggccagcctgctcgcagccgcgatgacgctgaccatggccccggcagcgtttgcagccgagggagataatgtgcagcttaatgacgcctcctccgccgctgccgaagtagacccgactgtcaaatctgtcgctcaggttgaggataaggaatatacgtcgttggctgatgctattaaagcagttgataatggtggtcaggtaactatcctgaacgatgtaaccgaggatgtcgttattcctgaggggaaaattgttacgctgtatttaaatggtcaaacaattaccaatagtacaggccataccattaccaacaacggacaacttgccatcaatggcacaggtacgattgacaatgtgaccaatggtaaagctgctgtatacaatgcagcaggtgcaacttgcaatctgaacggcgaaattgtatattcccgtagcgcagaagcatctaccagtgaaagcagtggtggtggtaactcgtactatgttatcgataacgtaggtacgatgaatattcataagggcacgttcaaattctcggacaccaataacggtgcattttccagccttatccacaatggctggtatgacggcagcaagaatacctccaatcagaatgctgtaatgaccatttgggatggtgattttacgcagggaactggtggtaaaattactgtaaaaaatgatgattatggcgaactggatattcagggcggtgtatttactcagccggagagtagctattattgtgtatttaactacaataaagccactatcagcggcggtactattaacggccatgtcggcaatgagtacattaacgatacttcggacaagggccatctggatattcatggtgacgctgttattaccggcgatattgataataccactgcaaaggatactaagtccgatgaagacaataatctggttgaaatttccggcgatgtaaagattgacggttctatcaacacctataatgcagctaatgttgttatttccggcggtaacttcaactttgacccgtctgactatcttgcagagtcctccgagggcggcaagaagtacgttgctaccgcaaccaagggtgattacgcatacaaggttgaactggtagacaactctgttgttccggctgttccgactacgggggcaaatactgcaccgaataaggacgaattggcaaagaacaccgatatcgataaggcctccgtagaagctgttgcaaacgctgctaaggaagtagcggtagactccaaggaaatctctgagcaggctcagaatgcagcggctgatctctccgatgacgacaatcagaaaaagacattcgaagacgcggctaagggcgaagttccggatgttgagaaaatcgaagttcgttcgcacatcgacgtagttccgaaggctttcaacaatgagaaatacactctggacattactccgaagattgacatcgttgttgtcggcaaaaaggaagatggtactgccgctgaaaaggtagtcgataccaagaaactgacgattgcaaagagcaccactgtaaacattccgcttccggcaagctttattgatagaactatctctcagctgttcgtacagcacaagggttatgagtatgaagcaacggtaagcgaggataatggtgcttatatcgcaacgttcgagaatccgcacggcttctctgagttcaccatcacgaagaactcccagaccgcagctaagattaaagatgtatgttacactaagttcgaagatgctgccaccgcagcaaaggacaacgaaactgtttatgtaatcggttccgacaccgagtacaaggcgaccatctccggcgcatccaagaccatcaaggtcgagaacggcaaggataaggacatcactgtaactattaacaacaccgtaaagaccattaagccgcaggaaactgctgagtttacttacaccaagccgtcctcttccggttcctccggcggctcggcctccaagaccacctacaaggttacgacttcctctgtcgcgaacggcggcgtaaacgtttctccgtcctcctcggcgaagggcgacaaggtcaagattaccctgtccccgaacaagggctataagctcgataagctgactgttacggacgcttccggcaagaccgtttccaccaccaagacgagcgacacggtttacaccttcacgatgcctgcttctcaggtaacggtcggcgtaacctacgtcaaggccgacgaaaccactgagcagccgagcactaagaccttctccgatgtttcttcgtctgactggttcgcggatgcagttaagtacgtttccgacaagggcatgatgaacggcaccggcaacggcaagttctccccggcggactccaccacccgcggcatgctcatgaccgttatcgcccgttacgcaggtcaggacaccaccggcagcaacccgtggtaccagaagggcatggagtgggcgaaggccaacggtgtttccgacggcactgagccgaatgcgaacatcacccgtgagcagctcgtcaccatgctgtaccgttatgccaaggcaagcggcaaggacgtttccgtcggcgaggacaccaacatcctctcctacgcggacgcgacgaccgtttcccagtacgcaatccccgcgatgcagtgggcgtgcggcgcaggtatcatcaacggcgcgaacggcaagctcaatccgcagaataacgctacccgtgcggaagttgccgcaatccttatgcgtttttgcgagaatgttaagtaaaaaataaacatctttctgagagcagctgcacctcaccgtgcggctgttcctttatggaaaggggggcattccttgatgggaatgagcgaaaacagggcgcagaggacggttttagaacggcttttcgccttgcaggacacgaaataccgggcgtttcagagcaagctgatgccgaccgtcgcgcccgaaaccgtaatcggcgtgcgcacgccgctgctgcggaacctcgcaaaggagcttgcgggcaccgccgaggcggcggacttcctgcgcgttctgccgcacgcatactacgaggagaacaacctccatgcgttcctagtggagaaaatccgcgactacgacgcagcgctcgcggaaaccgaacggttcctgccgtacatcgacaactgggcgacctgcgactgcttttcgcccaaggttttcgcgaagcataaggacgagctgctgacgcccgtccgccggtggctcttatcggaaaagctctacaccgtgcgctacgcaatcggcatgctgatgcggcattacctcgatgcggatttccggccggaatacctcgcgtgggtggcggacgtgcagagcgaagagtattacctgaacatgatgcgtgcgtggtacttcgccacggcgctcgccaagcagccggacgacacgctgccgtatctcaccgagcggcggctcgacgtctggacgcacaacaaggccattcagaaggccgtggagagctatcgcattccgcccgaattgaagcagcaccttcgcgaaatgcgcatccgcgcgtaaaacttccataaaaataccggagcgcacgggccaaatcatcaggctgtgcgctccggtttttacttatcttccttatggttcatcgcgctgatgacggctttcagcacgctttccagatacggaagctggctgggcgcgacgctttcgaccataggggagagcgccttgaacaccgacagcttttcctttttctcctgtttgccgaacaggatgtaatcggtggacaggctgagtgtcgtcgcaatgcggcacagcgtcggcacggacatacccttgacgccgagttcgatgtcggaacagaaatttgtttttcacgcgaacaggatatttataacgcagttaaggcaataccacataattgggcaagagcgatttgcgagtgaattttgcgtactgacgaggcgcggttttgcggtaatacttgacgtattaccgtgaaatcgcaacaaagtcagggcacgaaatttccgcaaagcgccgcagctttaattgtgcggtgttaccttaatgcatatcactttcttctccctgcgtgacggctcgcagggagggaaaaccccggcagaaggagaaatatattatggaaactttaagaatcggactcgtaggcaccggcggcatcggacgcacccatatcgaacgcatcaacaacacgcttcagggcggcaaggtcgttgcctgcgccgacccggcgagcgcattcggcttttcggttgccgagaagtacggcatcaagggcttcgaaaaccccatcgacatgataaactccccggaaatcgatgccgttatgtgcaccacgtccgacccgtatcacgaggagtacgttctcgcctccatcgcggcaggcaagtacgtgttctgcgagaagccgctcgcgcccaaggcggacgcctgcaaacgcatcgtggaggccgagaggaaggcagggaagaagctggttcaggtcggcttcatgcgccgctacgacgagggatacaagcagctcaaggcggcggttgacagcggcaagtacggtgaagcgctgctgctgcactgcgcacaccgcaacccgtctgttccggatgactgggacaactccatggcagttgagaactccatggttcacgaaatcgacgttctacgctggctgctcggcgaggattacgctaccgctgaggttcgctacggcaagtccacgaacaacggcccgaaagacttgcacgacccgcagatcatgatcctgaccaccaagtccggcgtgcgcatcgacgttgagtccttcgtcaacaacaaaaacgactacgacatcaagtgcgagatcgtctgtgacggcgcggtgctcaatatgccgaagccgaactacatctcggtaaacgcgaacgcaaccaccggtcaggcgatgtacaccgactgtttccagcgctttgcagatgcgtataacgcggaaatccagacctggatcaacgcctccaaggcaggctacgttgacggcccgaccgcatgggacggctactgctgccaggttgcagcggcggcggcttccaaggcacgcgagacccagactattcagccggtcgtctacgacgagatgccggacttctacaaggcataatttcccgcacttttcttcaattcatctcagaacctatcttctctcttttttcttcggcgggtgtgcggcaatccgcgcacccgctgcctattttcaggaggtaatctttatatgaaactcgcaatttgcacggatgtttttgctgatctgtcctacacggatatgctcgacaaggtaaagtccctcggcattgacgcggtcgagatgaccgccggcggctggggcgcacgcaagcactgcaacaccgccgagctgctcgcggacgcaggcaagcgtgaagtgttcatgatggagcttgaaaagtgcggcattgagcacatcgctatcgaggaattcccgggcaccatggtttggtctgcttcgaccctgctcaagctgcgtgaggctaccgacccgatgctcggcatcaacctcgacccctcccacatgatggtgctgggcgctgacccgatcgcggctgcccgcgcgctcaagggctgcatcttccatgtgcacggcaaggacgcccgcattgaacgcggtctggccgacaccgacggcctgcttgagccgcgccccgttaccgagtccgctgaccgcgtatggaactacgttgcggtcggctgcggcaaggacctccagtggtggaaggaattcttctctgtctgccacatgatgggctacgacggcgacgtttctctcgaaatggaggacctcaccatgacggttgacgtcggtgttcatacctccatcgacgcgctccgccagacgatcagccggtaaaacgtaaaatataaaacagtataaaaccccttcccgttattcctctcgtaacgggaaggggttggcttttcggggggtaaagtccatcatgcagccggtctgtgcctttggttatctcgtgaaatttcaggaggtgtatcgatggatcaattctctgaggtcgtttagcgtgatatgcgcaatatcattggcggtatcagcaggtgataaggcgtcttcggcagggtaagggagataataaagtgtatcatcgtcacctactaacatctgacagaatttccaacccagctgttcatatgcatcagccggcatgtcgtcggtcggagcgccgaggaaaaagatatactgctgaccgactaaggggctttcctgcatatcggctgcttggcggatgatcgtattttccaactcttcatcagtcatatcggtatagctttctcgattatgttccgccgcggcaacatctttcatagaaatatacccgccatatgcgtagatcgtaatgtttgacctgtccgacaggtcgccggacaacacgtcttgtacagcggcgtcaataacggtccatgcgttagcgccgatggaagtatattctatgttatcgactgtcgcctgaacgatggcagttgcgtgcggaatgacttcttcgagaactgggcgatatgctaaatcaaggcgggaattgtcgtttataacggttttatcctgataaattgagggcgtttcttgctcgaaaagtatgatttcagagtcgggaattggggtttcttggggcaggggagtgttgtctgttgcggaagtctgattgtcagcgctctggcacgccgtcagcgaaataattacaaggacgcttaggagtaaaatggatattttggctcggtgatgcttcacgacaggtcgctcctttccgtttatggatagatttattatatcgctgtatcaatagtctgtctattcatttgaagaggaaacggtatattcccaatttgataaataaaaacagcaggcacattcgtgtctgccgtcctgctgcccgtcacggcttttgtgctgtggcgggtatttttttgcgttgaaatggcctgtccttgcggctgccggagattggcggtcaagggtgttaaaaaatgtacgatttactacacagtgtacagtatttttactttggactgcttattccattaaagtatttacaattatatcaaaaaatacgcgatactacaaggctttggcaggttattaacctgtactatttgctacacttttgtcgagtaatgtgagggttaagggatgaaaccgagaagcttttattactcctgcacaccggaagctgaccgcgaaacgcagttcgaaagcttccgttcgatgggagcacacgaaagcgagattttcattgatgtatgcgggaacagaaagtcgagccgcagcagtctggcgatgctcaagcgcatcggcctgcgtgagggcgaccggctgactattccgacgctgtactgcctgagcgatttgaaaaagggccttgcagatgagctgaactggcttcgacagcacggaattcagctgcggattgccgatattccgatgacgatgcgctgctctgatgaaacggagcagcgccttgccagcgaaatgctgtatcaggtgatcgatgcgacgattctgaaggagcgcgaggaaaaacgccagaagcagagcgaaggcattcgtgcggcacaggaaaagggcgtgcatatcggccgcaagccgatagagcgcggcgctgagtttgaagcgctaaagcagcagtggcagcgcggcgaggtctcgctcagagaggcaggaagacggctcggcgtgacgcatcagacgtttaagaagtgggtggaggaacccgaggaagattaaggataaggttgtacaaattcatgtcaaaaacacagcaggggttctcgaccagagaactgaagaagattttttcgattgttttcgtcgcgtacatggtgcttgcggtggcgttttattttctctctggagagcagctgcgttatcgcgactcgcgcggcaatattgagatgccggtagcgaacgctgcgacggttgagttgacagcaggttcggttgtggaacagcagttcacgccgaaaattcagatttttgagcatctttccgtgcaatggggtgtgttcaaccgtgtcaatcacggcacggtgaacgtgcagcttgtgaacctggcaacgcaggaagtcttgcttgatcagaatttgcaggcggatcagcttacggaaggtcaggttacgacgtttgatttcccggcactggaaacagtctgcaatgcgccgtttgctctgcgtatcacatcgcccgatgccgtggcaggcgacgcgctcacgccggtgatgaagaccgatgcaacgcttgaaaacggtcagctgtatgtcaatggacaggctgtagacggtgaactggcattctcggctaccggcagagattatatctggaccggactacactattggcagttcgcagccaccggcgcggtaattcttgcagcgctgctgctcttgctgctacacaagcacaagaccggtaagaaaagttttattctcaatgcgatgattgcactgagacggtatcgtttccttatcaagcagttagttgaccgtgatttcaaggcaaagtataagcgttccattcttggcgtgttctggagctttctcaatccgcttctgaacatgatcgtgcagtatgttgtgttctccaatatgtttaagtttgatattccatactttccggtttatctgctttgcggtaacgtcgttttcaattacttctctgaggcatgtggcatggcgcttacatctattataggtaacgctgacctcattaaaaaagtatatgtgccgaagtatatttatccgctgacgcgcattatgtcgtcgctcatcaatatgctgatttcgctcatcccgctcgcagcggtggcgattttttcgggtctgctgccgaataaaacgtattttctgctgccgttcccgctgctctgcctagcactgttctgtctcggactgggtatgctgctcgcatcggcaatggtgttcttccgggatattcagttcctttggggtgtattgacgacgatttggatgtatttgaccccgattttttacccaatcagcgctttgccggatagtattcaaatgatcgttaaaatgaatccgctgtacttctatgtaacgtttttgcgctcgtgtgtgattgacggtctttcgcctgaaccgttcatgtatgtgcagtgcgcgcttattgcgctaggaatgcttgctgtgggtgcattcacgttcaaaaaatcgcaggataactttgtcctctatttataaggtgtgaaaatgagcaaaaaagagaagatgctccatgagcagaaggaaaaagttgcagaacttcaaaagcaaaaaattattgaggtacaaaatgtctccatgtgctttcggctgacggacgataaaatcatgtcgctgaaggagttcgtaacacgcaagctgagtggcaagtacaagacctcagaattctgggcgctgaagaatgtatcgttcgatgtctaccgcggcgaggttgtcggcattattggccacaacggcgcaggcaaaagcacgattttaaaagtcatttcgggcattcttaagccgacagaaggctctgtgacctgcggaggcaacatcgtgccgatgctggaactggggtcgggtttcgaccatgatttgaccggtcgggagaatatttttctcaatggtgcgattctcggatattcagaggagttcttgaaatcgaaatacgatgaaatcgttgagttttccgagctgggcgaatttattgatgtgccgattcgcaactactcatccggtatgctgatgcgtttggcgttttcaatcgcgacggtagtaaatccgcagattctcattgtggacgagattctcgctgtcggtgacgcaaactttcaggaaaaaagccgcaagcgcatgctggagcttatgagcggcggtacgaccgtgttgtttgtatcgcacagcctggagcagatccgcgagatgtgcgatcgcgttgtctggattgagcacgggcaggtgcagactgttggagagacgaaagaggtgtgcgatgcgtatgaatcctgaaaaagtgctgacgattgcaatacccgcgtataatgcgtcaaaattcttgccaaaatgtctgcaatctcttgtcgattcaaatgagctggaacgtatggaagtccttgtcatcgatgacggctccaaagagagccaagatgaggtcgttcgtccctatatcgatcgttttccgcaatctattcaaatgattcacaaggaaaatggtggacatggttcggttatcaataaggctgctgagatagcaaccggaaaatatttgaaaattctcgatgctgacgattgggtcgtatctaagaatatgaaatcacttttagattcgctcgagcgactgaatgctgatgtagtcatcacccacttcgacatggtcgatgccgaagaacgatttcgtcaatcttttacaactgaaaatgtggaattcgggaaaatatataccatggatgatcttgcgcaacttcccaagtctgcatacgcatgcagtaccttccatggtatattttatcgccttgcattttatagatcaacacagattcagatgtccgaaaaggtgttctacgaggatcaggaatatgcaacgctgccattttgttttgcttctggcgttgtatttctgaatctgacgatttatcagtacttggtcggccgtcccggccaaagtgtatcgcatgaaaatcaagtaaagcgactgccagagatcaagtttattttggatagcctgatttgtttctatcaaacccattatgatatgtctgaatctcgaaaacgatattttcaatacaaaataggtgctgtgattttgagctattatgtcgcggcactgcttaaaaatccggatcgacgtaaaggtcggcatgatgccgatgcactccgccgggaacttcgccagaatagctgtgatttgatgaaggcaacggaaaagaaatattggattacaaaaggattgcatttcgttcatatgacaccagatgggttggaaagaataaaaagaacgcatttttattacatattgaagaaatttatttgataatggggatggagatttgaaaggtctaatcttagccgcgggcaaaggcacgcgcctttacccgatgacaaaaccgatgagcaagccgttgctcccggtttacgacaagcccatgatttattacccgcttgcaattctcatgcaagcgggcatttccgatgtcatggtaatcgttccgccgaacgagacggatacattccgcgcgctgctcggtgacggaagtcagttcggcattcatatctgctacgcagaacagccggttgctcgtggtatcgcggacgcgctgcttattggacgcgagttcgtgggagacgactcggtatgccttgtgctcggcgataacattttccacagcgatacgctgcgtgaagtgctctgtaagggcgcacagcagcagaacggtgcaacggtattcggctactgggtcgagaatccacgcccgttcggtgtggtagagtttgacgaggatggacgggctatttcgattgaagagaagccgcgccatccgaaaagcaattacataatccccggcatttacttttatgacaaccaggcgatggagattgcagcaaatctcacgccgtcgcagcgcggcgagctggaaatcacagacgtaaatctggagtatttacgccgggatcaattgcaggtgctcccgctcgagcgggacgtcgtgtggctggatgctggtacagcagacagtctgatggacgccggacagactattcgaaatatccaggctgagacaggacgctatgtcggctgcctagaagagttggcctttaaccagggctggctgacagaagaccagttacacgaagccggacaagagctcggcatgacactttacggacagtacttacagtgcttataacggaggatagaaaatgacagttttgttagcaggcggcgcaggctatatcggctcacacaccgctgtacagcttttaatgagcgggcatgacgtagtaatcgcagacgattacagcaacagctgtccggaagttgtcaaccgaattgaagaaatcaccggaaagcgggttcgtgcctacgagactgacgtgaaggacaaagtcaaagtacagcagattttcgcagaaaacgagatcgactgcgtgattcactttgctggtctgaaggcagtcggcgagtcggtacagcagccgctgaagtattaccgaaacaatattgacaccacgctaacgctgctcgagtgcatgcaggaggcaggtgtcaagcagtttgttttctcgtcctccgcgacggtttacggcgaggagaatgcgattccgtacatcgaaacgatgaagcgcggcagctgctccaacccgtatggctggaccaaggtcatgatggaagaaattcttgaggacgcggcaaaggctgacccggaactgactgccgttcttctgcgctatttcaatccgatcggcgcacatgagtccggtcgtatcggcgaggacccgcagggtattccgaacaatctgatgccgtatatcgcgcaggttgccgttggccgacgcgatcatctcacgattttcggtaacgattacccgacaccggacggcacctgccgccgcgattacatccatgtgatggatcttgcggacggccatgtaaaggcggtcgagtatgccgcgcagcataagggcgttgaggtgttcaatcttggtaccggcacgccgtacagcgttctggagattgttcacgcatttgagaacgcgaccggcgttgcaatcaagcacgagttcggtgcgcgccgtgcaggcgacctgccggagttctgggcaaacgcagataaggccgccaaggtgctcggctggaaggcggagcgtgacttgacggctatgtgcagagatacgtggagatggcagagtgggaacccggaaggatatcgcaagtaaaggaaagaagaaaagcaaatgaaaaaatatgattatctcatcgtcggcgccggcctttatggcgctgtttttgcgcatgaagcgatgaaacacggcaagtcctgcttggttatcgataaacgcccaaacattgcaggcaatgtttacacggaagaaatggaaggcatcaatgttcacgtttacggtgcccatattttccacaccaacaatcgtgaggtctgggattacgtcaatcagtttgctgaattcaaccgctttacaaacagtccggttgcaaactatcacggcgagctgtacagccttccctttaacatgtatacattcaataagatgtggggtgtcgtaacgccggaggaggctgccgccaagattgaagaacagcgcaaggccgcaggcattacggagccgaagaatctggaagagcaggccatcagtctggtcggcacggatatttatgaaaagctgatcaagggctacactgagaagcagtggggtcgtccgtgcacagagctgccgagctttatcatcaagcgtctgccggttcgcttgactttcgataacaattatttcaatgcgctgtatcagggcattccgatgggcggatataccaaaatggttgcaaatatgctggacggcgtagaggttcgtctgaatgttgactacttgcagcacaaggatgagctggatgcactggcctccaaggtgctgtatactggcccgattgacgcttattttgattacaagcttggcaatctggaatatcgcagtgtgcgctttgaaactgaagtactggataagcctaactttcagggcaatgccgcagtaaattacactgatcgagagacgccgtggacacgcatcatcgagcacaagtggttcgagttcggcgcacagccgaaaactgttatcagccgcgagtactcgagcgaatggaagcccggtgacgagccgtactatccggtcaacgatgagaaaaacggtaagctgtacgctgcgtacaaggagctggcagatgatgaacagaatgtcatcttcggcggccgtctgggcgagtataagtattacgatatggacgctgtcattgcggcagcgctggaaagtgcaaaaacgaacttggcaaaataacatggaggaaccaaaattatggaaaaaatattgtccatctctgttgcggcatataatgttgcatctacattaaaagagactatagatccttttattgaatctggcgtattagaccagctagatattatgattgtggacgatggatcaaaagatgacaccgcaaaaattgctcaagaatatgcagataactacccgagctctattcgtttgattagcaaagagaatggaggatggggctccactgttaatactggaattcgtcttgcgcagggtaaatatttcagacaagtagatggtgatgatcactataatgctgaaaatatgcctgcgtacattgatgcattgcggaacagtgatgcagatatgattattaccccttatattacatacgatgatagcaccggcgaagtgttttctcacgaaaattgcaatccaaactgcgaaaatggaaaagtatatcaacttgcagatgtagaggcttttgcgccgtttatgcatagcttggcaatgaagacttcgtgtattcgagacacggtatcgattactgaacattgtttttatacagatactgaattcgttttaaaatcttgtaatcaagcgcatacggtgatgtttgttgatttggaaatatattgttatcgcagagcgtcagtgggacagagcatgagcttgacaggaatggaaaagcattatgcggagcagacaaaagtgattgatgttatgctagcctatatggaaactgaggtaactcggtctgaagtcagaagaatatatgataaattacttctgggaacatgctgctggcaatatttggtgttgctttatattaagccgacttctcagcacaaacgtgatttgatggcatatgatgccatgctgaaagacagagcaccgggttattataaccaaattggtattggaacgattgacaagctgcgaaagacgcatttcttgggttacgcttttgctgcatggcataagaagaaaaaagataatcgatttactaaagatggacggcttatttcttaagcacggttatattttgacttattgaaatctctttgaaattcagcacaaaaacaaacaaagaaatatgaaatcggagagcaaaatatggggacaccattagtaagtgtaattgttccggtgtataaaacaccggaacaatttttaagagcctgtatagagagtattcagcaacaaacaataaaagatttacaaataattttagtcgatgacggcagtccggataaatgcggtgatatctgtgaccaatacgcagaaaaagataagcggattcaggtaatacatcaaaaaaatggcggaccgagtaatgctcgaaatcatggcattgagtgtattcgcggaaagtatcttatctttatagatgcggatgatgagatatatcccaaagcgctggaaacaggtattgcagccatggaacgaacgaatgcgcaatgtgcagtgttcggatggataaataatgaaacaggtaaacctgtagactgtaatgttacagagatcgaatgcgtcattactgcttctgaagcgatgaaggaaattgccggcgaaaacgatttatgcggaggcggctatccgtggaataaaatttggaatgtagatgcggttcggaattcgcataatggtgaaatttctttctttgattgcacgttattcacatacgaagataaatattgggtactaaatatgcttttcgggttagagcgagtggtattattgccggatgttttttataattatcgttttgtggaatccagtctgacaaatagcagtgactcgtggaaacgtcggcaatttaatgcatatgctgcatatgataaaatctgcgattatttacagcccattaatcagtctgcatatcgagcagggttgtgtaagtattttagatttagctatattgatatgatgaacatgcgttcttggcgcaatgaggacatcgaatggtatcgaagaactaaaaaaagtgtacttaaagtctgcaagcgtatacatttgggagatttaaagaagtttaagcattatattgcatggattttttgtttaatttattgtcgcatttgattgtttattactgtatatagagctattttgcgaggaattatctgatgatattagaagcactgagtgaaaaaggtttagaatgtacaggctgtagtgcctgcatgaatagctgccctgtacatgctataacgaataagaaggataactatggttttttgtatccaagtatcgatcaatcagcgtgtgttaagtgcaataaatgtgtagatgtatgtcctgtactgaactttgaaacgaaaagagaagaaccgatttcctgttatatgctaaagatggcggatgatatatgtgcagttagctcttcaggcggagcctttactgcgttgtcaaaagcaatctttgaagcagatggagttgtattcggcgcagcgatggaaagtgatctttcggttcatcatagaatagcccacaatgaagtagaacttgcatcgctgcgtaaatccaaatatgttcaaggcgatatgggtactacagtgcaaaaggtaagacaacatcttgagaatggagatgcagtactttttgtaggctgtccttgccaggttgcgggattaaagcgttacttgggacatctgtatgaaaaattatggactgtggatgtgatctgccatggagtatcgtcggcacaaatgctgagagaatcgcttgcagagatgccagatgtttcatcagtagattttcgagataaagattatggctgggaatgtctgggcatgacggtaattagaaatgatggttcacgacatcggctttcgtataatgaaagtcggtacgaacagggatttcatcccaatattacgcttcgcgaaagctgctatgactgtaaattctgtgaatttcctcggcagggcgatatatctatcggtgatttttggaatgttgagaaatattacccagaagtcgataaaaaaaacggagtaagctccgtagtggtgaatacattgcatggaaaaacactgatagaaaaaattaacaagtatgtaaaattattgaaagagatacctttgaagtgtttggaggggaatcgtctgcaggccaaaatttcaaagcccaaagaacgagaagcattcctgcggttgtatccgcaaaaaacatttaatgaagctgttttgtatgcacagcaaaatatacatgatattggcatcgtaggtaattggtcatatccgaattatggaacggcgttaacctattatgcgctgtatcacacactatgtaatatgggatataccgtgacgatgctcagctggcctgaagattcaccgtggaaaccatatgaaaaagctaatctctttaagaaaaacccataccccacttgggatatagcggagatccctaaatgccgcttggatttatatcagtacaataatcggtgcgaaacatttgttctgggatcagatcaattattaaataataatttgtacaatgcgtttggtcgttttattcagatggactgggtgaagggaaatcgcaaaaagatagcatatggtgcttcatttggaactgattatatttggggcgatgacgcagatcgtgcagaaatggcatatttttttcaaaaatttgatgcattttctgtacgagagacaagcggacgggaactcttagacaagtattacggtgtaaaagcacaggtagtaattgatccagtattcctattgtctaggtgtgaatatgaccgattggtttctaacggaaaggaacgcgtaccgaaggaacaatttgtttttgcgtatattcttgaccaaacggatgaaaaactggatcaactgcaaaaatgcattgaatggattggtattccgatgcgatcggtcagcgatgcagctccgaatgagcatcagattagcgcataccatggatttaccgaatataatgtgtatttggaagaatggatggcatatatacaatgtagtgaagcagtaattacagattcttttcatggaacatgtatggcgattttagcaggaaagccgtttttagcgattagcaatgattcgagaggtattgctaggttccgtactttactgcagcttttcaatctggaagacagattgtgtgaaaatgcgagcgagataagtaaaaagcgtaatttactgaagcaatgtccggatcggaaaatgattgcgcaatgtttaagtcgtgaaagaaatagaggtattgaatggctgaaagatgcattaacacatccattgggttataaaaaattctctacctacgatattctgggcgataaatgtgaaactgcgttagcacactctaatgaaggcttatcaaggataaatgatttggaaagacttcagcgagaaagcgtaacgacagaaacaaaacaatgggagcagcttgaagatcatcgattgcgtttggatggtgtggacgaccgccttaacggattagagaagttgcagagggaatcggtaactacagagtctaaacagtggaaacaactcgaagatcatcggcttcgtttagacggtattgttgcagaaaatgattcacttaagatgaatataaatcaaatgcttaagaccattgagaatcttgaacaacagaatgaagatttgaaggagcagattggaaaaagtgaagaacagatgaaggagttggaacattggtcaatactgcatcggattcgacattttataaaggataagagaaagggaaaataaaattgaaaaatatttcaataatcatcccctgctacaacgaagaagcggcgttgccgtatttcctgcaggagatacggaaggtggcggacaacatgtccaccaccttccaattggactttgagatcctttttataaacgacggttcgagagacaagactttacaaattctgcgtcaagcggcgcaggaggacaagcgtatccgctacatatcctttgcccgtaatttcggcaaggaggctgcaatgtatgcaggcttccagaattgtacaggcgactatgctgcggttatggacgcggatatgcaagatcctccatctttgttgccggagatgtatcaagccttgcagagtggagaatacgacagcgtagcaacacgccgtgttacccgcaagggagagccgcctatccgcagttttttcgcgcggtgcttttataagctgatcaaccgcatttcggacgcggatattgtagatggcgctcgagatttcagactgatgacgcgtcaaatggtggatgcgattctgtctatgacggagtataatcgtttctccaagggtattttcggctgggttggtttccgtaccaagtggctgccatatgaaaacgtcgagcgggttgccggtgaaacaaaatggtcgttctggaagctgtttctgtattcgctggaaggtattacagccttttcgaccgcgccattggcaatcgcttcgatcgttggcattttgctgtgcgtagttgcattgttgtttgtatgtgtcgttctcgtcaaaacgcttgcattcggtgatgcagtaggcggttggccgagtatgatgtgcgttattctgtttctaggcggtgtgcagttgttctgcatgggtattctgggacaatatctcgcaaaaacgtatctggaaacaaagaaacgcccgatttacatcgtgcaggaaacgaatgaggatcgagtatgaaagagaaaattattcaaaatacagtccttcgtttcatcctggtaggtgttataaatacgctggtaggcacggcaatcatgtttggcttgtataatctagcgcattgcagctattgggtctcctcggcatcgaattatattctgacaagtattttgagctttttcctgaacaaattctttacttttcagaataaggaaaagagcattggtcaggttgtgcgatttgcggtgaatattgcagtatgctatctgctggcatatggtattgcaaagccgctgtgcctctacctgctgagcggcgtagtaacttcagtgcgtgataatgtttcgatgttcgtaggcatgtgcctgtttacggccttcaattattgcggtcagcgtttttttgcattcaagaaacgaaaggggtaaattcttgatgacactatcacagcgaaaaagtaaaatcggggtaattaccctttcgggaatgataacattcactatattaatcatactatttgcgattaaaggtctcgctccttttggagatcgttctctagtggttatggatggagatatacagtatcttgactttttctcgtactataaagatgtattaattggaaataactctattggatactcgtttgggaaaacgctgggaggatctaatattgcagtttttagttattatttatcttctcccttcaatcttttgttgatattttttggaaacgcgcaacttcatactttttttgatttagtagttgctttaaaactatcactgtcggctatgacatttgctttctttgctatcaatagattcgattgggaggttaatgataatagtataatttatcttctgacttcaatcggatatggattatgccaatataatattgctcaaagtagtaatattatgtggttggacggcgtatatatgttgccgcttattttactgcaaatttccaatattgttgcccataaaaaattctggtcgcttccattgatagtcggaagcgctattatatttaattggtattctgcaggtattgactgtgttttctctgctgtttggtttttgtttgaatttgcactacattctattgaacaaaaagctactatcaaaaatttcattcaaagcacactaatatatgtaagtaatatgattctgggtgtactggtcagtgctgccttgtttattccaactattggtgcactaaaaaagagtacacgaggatctttgcattttggtagcttaatggatttgtcgtttttgggagaatttccgtcggctattcaaaaatacacatatggcgctacaagtgaattaggaagtgttgcactattttgcggtagtattacaatcatttttgcaatggctgtacttttttatcatggagttgatatacgcaaacgaatattattctcaggacttcttggcggatcacttttaattttttactggaatccgctgtatacggtgttttctctgtttcaatgggttagcagttatcactatcgctattcatatgtttctattttttctattttattcatttcagtaattggttatcatgaactcaatgacgaaaagcgagcgcatcgttttttctcaacagctttgattttctcatctgcactaatctttttgtattattgtaagccaatcaatgatcttaagtatgtttatctgacggcattaagcattgcattgcaatctgcattagttttgattgcacgattttctaaagtaaatgctttctctagaaatatattatttattgcatttggaggactgttcctgtttgatattgcgttcaatgcaaattgtttaatcaactactattctattgatgggatcagtcgatatcaatcttatcgagaagggcaagagaatactatttcgacgataaattcagctgatgattcactttatcgtatttctcaaactaccactcgcaatatgggtgacaatggattaactgcaaactataatgaagggttgtcatataattatgcatcaatcagtggctatacttcttctccagacgataaccagcgagaatttttgaacagattaggatatcctattaatggtgaaaatatgtgtatcaccaacacatcaattctgggtgcggattctcttttaggtgttaaatacatcctgtcaccttatgatatagaaggtcttgtaaaaattcgtgaacctgataataatggaaaaagcatttatttaaatccatatgcattcccattggcttttacatataaggataccgaatatactccgaagaatacaacaaatccatttgagtatcagaacgaactgtatcgtcaattgtttggcttaacagaaaacttgtataccccggtgaaatacaatgtccaagtcaatgatgatgggtatggtgcccaaatccaactggataggcccgatgatagctcgaaattagccgtatatgggtctgtaccttgggagtatggtgccaattcagctatttacataaatggcgaatttataacagattatgcatgctggctttcaccgacggtattttatattcctaatgatgctaatcagtcatgcgaaatggaagttaaaacagatgcggataatttcaactgggatatggtacaattttattcattgaacttgaatgtgctatctcaatatgcaaaaatcgcaaacagtcagcgggtagatactttatccgtagaaaacggactggttaccgcaagtatatcaagtacacaagatgatgaacgactgtttatgtctattccggtagatgatggttggaatattaccttgaacggaaagaaagcggaagttgaatcaatcggcgactgcttatatagcattaagataactaatggcactaataatattgtactgaagtatcatattcgatatttgaaaataggtattctaatatcttgcatgaccgtgttcggtattattgtgatgaagataatgcgattcaagagaaaaaatagtagaagtggcgagaaaaaaagtatttaatcttgatatcagctcatatccatacagaaactgtgtaaatggttcccgtagttgtattttcaacaacatattctcgaatctgaagcacccccaaaggctagaaaaaattcaatgtagaaattgttccaggaaccgaaaggggttgatgcttgtgaattgagggcggcaagccctttaagttggccttgatcctgcggtcattgtagtagtccagatattcaatagtaaccgtcaaactgtgatagagtatagatgaaaaatgaccgtgtcaagtgaggttcacaaaaaggatccctgaaaatgaaatcaagttgcggtgaatagcgctgccgtaatggcttcttggataggctagactctggagatagaacgtttttcggcatattccagaaccataagatatgttgtcagcagacgaacataagagttctcattagggaaaattctaatcacgctgatgcgtctctgaatttcacaattcaaccggtcaatcatattgaaagataaaattttccgagcatccgacttgggaaatgcataaaatctcagagagttctccagaacgttttcaagtaacgggatcaccgagctctttcaagcttgcgcaggcgttgtattcctgttccggtgtctttccagagtcaagaaaatgctgtactgtcttttctgtcataagtccaacgggcattgcccaggttttgaaatcatcttcgttatatgtcagataacgctgatgctcctgcggcatgtgctccagcttcatcaacggttcacgctgctttgtctgcaaacggcggtggctcgcaacgcggcttccatggaaatacacttcaacaatagtttttgttacgcgaatgtccactttttcgccaatcagattatatggaacggaatatttgttccggccgtcactcacgaggtagtcgttcggaacctttgccatagaccagacagcggcctcaaatggtacggcgggcagcggcagcatatacggcctgctcttcctcaagataagcgctacggcgggtgccggggcgctgcttgaacttgcggctgttcagctcatccagcttttcagcaatcgcttcgttgacttcatgcaaggagaaaaacttgcgatctcgcagtgcagcaataatccaggtctcagcaaaatggacagaagccgctgccgaactcttgtcctttggacgacgtactcgtgcaggaacaatagctgtgttgtaatagtccgcaagttcctgataactgcggttcagcaccgtttcatatcgagtgttagacgtagttgcggtcttgcagttatccgggacgagcagccttgccgcgccgccgaaatagttgaacgcatgaacatgacagttcagccagttctctggttttatgtcgtcacaggcttctgcatagacatagcagctgcacgggagcaccgccacgaacagataagccgcactctgtgcgccagtaactgagtcatataccgggacagtatctccagcccagtccacctgaattgcatctcccggcttatgctgaatgcgcatggttgccttggtaatgcgagcccatttgcggtatttgtcaccgaactgagtgctcatgtacggcgtacggccgctttcgtagcacttacggcagtattcttcccataaaagcgtcagcgtaacaccgggcttggccagttcgcggtggatgtacggataatccggctcaacgtaaatgctgattttctggtacttgtctgggaaaagaattcgttccagctcggcgttggtaatatcctcgtcaaggggccagtggatattggccttgcttgctacctctaataccttacgaatagtatggtgtgaacagcgtgcgctgtctgcgattctccgctgactgtagtcaagatagtctagccgcaggattttcaaatagtctgtcatttcaaaacctccagataaatgtgtaacagcagttgccgtgcatattcattataaaggctttggcgctctaatgcggcagagtggagctaaaactccggcaagcttgggctaaaactccgtgcagatggagctcttatagcgatttatgcaagagggcaggatgaaggtaggaaatacatcgagcaaaaagccccagctctgtcgccttgacaaagccggagcacacgttataataaaaatagagagggacgctgttacagcagccagccccttgttaagtatcgattttagtcgatgaccgttcggggcctaatctgagcggtcatcgcgcttttatacagaattatacagaaaatgtacagcaggatgactgcacatataaaaagctgaaacgggaaggatcatactcatcgagtatggtccttcccgtttgcctttttattaatcctctttatgattcatggcgctgataaccgttttcagcacgttttccagataaggaagctgactcggtgttacgctctcgatcatcggagaaagcgccttgaatgcccagaatttatccttcttttcctgctttccaaacaggatatagtcggtggacaggctgagcgtcgaggcgatacggcacagcgtcgggacagacatacccttgacgccgagctcgatatctgaacagaatttcggcgtaatatccagtttttcagcaaactgctcgcgcgtcagtcctaaatactcgcgctgcttgcggattcgtccgccaatcgctacccagtccattctgttcctccgtcaagtcttttcatttagtgtaccccggatagttcctgcaaagaataaactattagggtggaaataagagaactttgggtgtataataaagacaactgaggggggactgccgatggagtacagagagcatgcgtttacggtgcacggaagagaaatccgtttttcacatgcgcaggatatctataatgcaatcgaacagcaattctggccgcgatataacgagacggtgaaagatttcgaccggttttattcgtctaatatttcttcgtttgaagacatctttcgatatctgcctgggggagcggacagccgcatacggaaccttgtgatatcgtccgtgggcattctgccgagtgctggcgttctgtcctatacgccggtgagcttttacggggagtacgaaaacgaactgatttacgaaccctgcatgaaggagctgtacgagacacgggagcagattgaacaggctcgtgagcagcaggagcagtaccgtgccgcgcaaaaggcaagccggagacactggcagggcggcggatttggtttttcgggtgcgatcaaaggtgccgtgatggccggtatgctgaacgcaggcagcggactgattcatggtgtcggcgactcatttgccgcggcaggagactgggcccagatcgcaggcgcgaaacgtcaggtctttcagcatgtgcagaagagcggaatgctgaaggaggcgttttatctccgctgccagcgcatcttttatgaggttttagaaaccgtcggatatgaactgcatgttgaaatgccggattatgacgaggagaaagcaaacgcgacgttccaaaatgcggcggcgcagcaccgaaagggacagctttcggacgaacagtatttcgactatctgataaaatgcgtgcagctgtacccgtacaagcccagcatatatggagaactgtatcgactgcatccggaggacgataaagaattacagtcgctatccgaatatctgcatttgcgggaagaatatctgaagcagagggcggcggtcattggagcacggctttcctatattgcggacatgccgagcgatacgatcatcgcagtacagaagaaaatacaggcgcttgacgagttggcggaacgctatcacgcagcggatgataacgactggctgagcgagaaaaacaaggcacaggcgaagctgcaagagctgctccggctgaaggatgaacaggagcgcaccgcactgggcgttctcctgccgacgaaagaggaagcggacctcgttcgcatggaatggaggcaggtatctgctgttctggatgactatccgtacctgtcagacattggtgcggcacgaaagtgcgccgaagcgctgaaggaaatttcggtcacgcatcctctggtgcgcgaacaggtcgagcgggtagaggatcaggtggtcattctacaggcgaagcagggttcgttccaggaggagatgacgcggcagtaccggaagattttcggcagtgcagaacttggggaatccctcgtcaatatcgacagcgagtacgatgaggactcgaatgccgagcttgacccggagagcgaaaaatttatcaatatgatctgcgatatgacggtcgaaagaatgctgctgtacagcatgacaaggcaggtgctgtgtctgactgacaccatgctgcacatcgccacattcgagaacgagcaggcgcattttgtccattttccgctgtacggagacagaattgagatcgaatttccgtccagcaccatgatggagctgcatacgcgcacgcagagagcgcagttttcactggaagacctcgaaaacgtgccgcaattcaaggaaatgctgcaagcatttctccgggaagcatcgatttgcagactgccgccgttttcgggtgcactcagctgcaaacgtctgctcagccggttcgcggcagaactgccgcagatcgataccgaatgccgagaccggattgcggagcggatgcagctgctgaaggatgccgtgctgtgcagcaacccattcccggggcaggtacagcaggtgctccctaatccgatgtctcggtggcagaccggagaagatgcctggcagaggatgcgcagcattgcggaacagcaggagccgcctgaaatcccgacggtgctttatcgggacgcgccagagggcgcacagaaactcacggctttctttaccgaccgggcggtgtaccggctggacggcgatgcgtgtgaacggcttgcgctgaatgagattacggaaatgacagtgcatgccacgttagctgaaccgtatcttcagctgagcagtacggtcgttcttccggcggaagagatcggtccgcatcatctcggcgagttcgcacagctggtcggcaatatcgtgcatgtgctgcttggcggcgtgattgcggaagcgctctgcgagcctccgcaggaagaatccgcactgcctgcatcgccgtctgcatcgtcggttcggttttgcccgtcctgcggcgaggcagtagaagagggcgcacggttctgcggcagttgcggtgaaccgcttttccggtactgcgcttcgtgtggtgcggaaaacgatataagcgccatgttctgtatggaatgcggcgagaaaatgatgtaaacagaggagaattacaatggcaatcaaagatgcaacctgtccggcctgcggaaagtcgatcaagctgaatgatgagaaaccgttcggcttttgcagcttctgcggacataagatcgatacggcagagtatttcagcgctaaagcgcctaaagcgtctgctgttcaggcagaaacggacaagccggagcctgcggcagcaccaatctcggctccgactccaactccggcagcagcgccgtccatcaagattacgcaggatgcgcagagcagcgcgatcagccaaatcgaagcgatgtttacgctctgctcgaccgaacaggaatacatgggcctgcgtcagcgcgtacttgatggagcttactccgaccaggacaaggcggtcatggtatccgagctggaccggctgatgagcaagcggctgcacgacgaactggcactggaggcagacctgcctgcggcaaaagaagaggtctccaaactcgcgatgggaacggtattgatcgccgttatcggccttgtcgtgacgatgtttttcccgattgcgctgctgattaccgccgttctggtgctgtgctgcatcgcgggcggcgcgaaggaccgcaagagaaagaaacagtgcgtccgggcgcataagcatctggagcagtaccgcaagctcggatataagctttgattgagacgctatcaatgcaaaaagttccggccgtgtcgtattgatacggtataataaaaaatagagagggacgctgctaccgcagtcaacccctaattgatcaaaacttaaagtagtcattgaccgtttcggagtccacccgagcggtcaatgcgctttttgtacagaaaaatgcacagcaaaaatgcctcacagtgcgcctgccgagacgcttcatgacatcctgcggcttcacgatacgcaagccgtgctcgcactctgcgtagtcgttcgagcacagttctgtagagaaccttgcgaaaaaataatgaatatttatatagctgattgtacgataatgtcttatttactggggatatgtcggcttactccggctttgttgattttcatgaaattttcgaaacactctggtgaaaattctgatgtgaaaaatcagcagattttcagggaatggtgggaatgaacgcgcggaaatctgtcacaggggcgaaaaatcagcaagcaccttttcgaaatagggaaaatatggcaaaacagaatttgctgtgttcggacgatttccttaacggtatcttaacacgaagatgcaaaattcgggaaattatttgtataaaatgctgtttggaatacggaatttcgacgcgatagggaaataatggatattacacgaaaaaatcatactttattccttcgaaatcttatgatataacttttgtataggcaggaggtaagctggaaatacagaatcaaaaggaaggtcgtgtataagatgaagaatagaattgagcggggaactgggctgtatgcggaaaatctgcgcacgattgctgcgagagaaattgaatttcgcttaacgccatatatctttaatctcggcatcccgccgcacgtttcggggtacaattatctgcgtgacgcggtgattgagctgctgctcgagcctgcggcacaggtcggagtgacaaaatgtgtatatccgagcgttgccgccatgtacggcacaacggtgcacgcggtggagcgttcggtgcggcacgcgatcacgtcggcatggaatggcggcggcctgcgccgggtgaagggcgatccgcaaaatacgattctgagatttcacagcagaccgacaaacaaaaaatgtatcatggcgctcgcacagatgatgcaggagcaatatgggaaccagattcccgactggtatggcgaagcggtatgtaacgaaaccgaatgacagggacacaccgaatcatctgataaaaccgaaaatccctccggaaccactcgaacagggtggagccggagggattttttgctgttattcagctgcaatttttagcgagagagattaagctggcctgctctcagtcagagtcttgacttcgtcaacactgatttccagcgcatcggcaatatcttcataggtatatttgcctgagttcaacatacgccgcgcaatcctgaccattctggctttatcggcttcacgcgccgcttcatttctcatatcttccatagccttgcacatagtcgcaactccttccgtatcttctttgaaatagcgaactctgtccgccagaatttgatagtgcatctcctcggcgctggtgcaggaaaaatcgtgcatgagctgccccagagccgtatcgcctttgatctgggcgtttacatacaggatatgcgactcgtccccgaacaatgcgccggtttctctgaccgtccggtcaatgtgatagatcggacagctgccgtccagtacatcatgctccgtgatgaaaatgacataagtttcgttcagcttctcatattcatcgccgggctcggtcacattggcatcgatcagactgctgttataccgggcacgcttgacgccggcgcctttatcgctgcgctgcacctcgatattgtaaacgcggtctgcttcgtcaacggccagaatatccagccgcacagagcgcccctgcaaattcttaatatcgtgctgaccatgtacgcgctgtacgcgcagatcggtacgctgtaagatgatctggagcaggaactcggcacaagccttgtcctcaaacaccttgttcatgaaatcatcatccagcagacgaaaaccgcgcagccgctgcaaatcctcggcgtgcttgcgctcgaaatccaggtcggacataacgtcacatccttatctataatataccatggaaatccgggaggttcaagccgtgacggcggctgttttccccgctttctgccctttttcttgtttccttttgtttggcgaaaggtgtatctcacgagcgacctccatctgggtgcggccctcgaaaaagcgcaggcggatgatgcgcttttcgcggtcatccagactgtcgatggcctcgcgcagggcgatggcggcgagccaatggtcgtccgtattgcgcgtgtcgccgacctggtccatgacgcagaccgtgtcggtgccgtcatgaaaaaccggctcgaacagcgagaccgggtcgagaatggcgtcgagcgcgaaaacgacctcctccttgggcacattcattgcccgggcaagctcgacaatatccggctcgcgctggtgctcgcgcacgaaggcctccttggcctgaagagcacggtatgccgtgtcgcgcagacttcgcgagacgcgcagcgtgctgttgtcgcgcaggtagcggcggatttccccaatgatcatcggcatgaacgttcaaaggggaaaaacagctatccggcgcggacctccgagcgttccgcgccctcgatggcgtaaaatatttcgatgcggtcatttcggagcacgattctgtccacgcaggcgcggacaagcgactgtttctctctcgcgtccagactgtcccactgcgcgccgaccgtgcgcagtgtgccgagcgcgtcctctttctccgtgtcctgtccggcacgctgctgcgccgcgagaagcgcctctgaggcgcggtctctgtcgtgcttcgcgcgcgcgatcgtatcgcggagcgtgtcgtcctcgtcctcggcgtacagctcgtacagccgccgcagctttcgctccgcacgggcgagcgccttccggcagctctgctcgtcctcggccggggcggacggcggacttggctgcgcggcaagccgggcaaggtctgcggtcacgatgcgctcgacctcctgcgccatgatgccgcggttcgggcagttttcgtcgtgcacgaggtgcggcttggacttgtcgcgcgagtagcagaccagccggtccccggcgcggccccatttctgatagcgcattttcgcgccgcagtggccgcacacgagcagcccggtcagcagctttccgccgtcggcggcgcgcggccggttggggcggtgcaggcggcgctgcgcgcgcagccatgtctcgcggtcgatgagcggctcatggcggccgggatagcgctcgcccttgtacaggataacgccggtgttgctctcgcggtcgaggatctgccgcacgagatgctcgtagcgcagaccgagcgcccgggcgatgctcccggcggactcgccggcgagataccgcgcgtagatctcgcgcacggtgtccgcatcacgattgggcacgaggatgcccttcgcggcatcgtaatcgtagccgaaggggatcttgccgccgcccggccagtagccctgccggacgcgctcgaccatgcccatgcgcgtgcgcaggaagatgttctcgcgctcgagctgtgcaaaggcggacagaatgccgatcatggcgcggccgtagggcgtgccggtgtcgatgttttcgttaatcgagacgaaatccacgccgtgcggcgcgaaaacgtcctcaatcagataaagcgtgtccttctggctgcggctcaggcggtcgagcttgtagacgaccacgcgctcgacctcgcctcggcggatgcagtcgatgagctgcgtcacggccggacgcgacaggttcgagccggaaaagccgccgtccacgtactgtgtgaagcggtcgatgcccttcatgcggcagtaggcttcgagcttttcggcctgtgcggcgagcgaatagccctcgtcggcctgcgcttcggtcgaaacgcgcaggtataaagcggtgtgtttcatggttttccctttccgggactgcgttcctccgccttcagtatagcagagcgcgcggggcgcggcaatggaacatgctggcgcggcagggggaaggacagaacgagcggcggcatcgcgccggagagcgggacgccgttcagatagcggatgatctgcatggaagagctcctttccgcaggggaacattgccctgcatcggaagtttcccccgaaacggcccgctgcaaccctgtgagagccgggttttcagcctttccgacagccaaggctaaattttgtcttgtgagcacgcctgcacaggtgtataatgtatatagaaaacatttgtctgcgggcgaggtatgcctgcacggacgagataacgaaggagaatgaaatatgtttgagaacctgatttcggctctgaaggctgaaaagcgtaccatcgtatttaccgagggcgaggatgcccgtattcttgaggctgcttcccgcctgaagaaggacggcctgatggactccatcctggtcggcaacgtagaggctgttaaggctgctgctgcaaagggcggctttgatatcgagggcatggagatcatcgacccggcaacctattccgagatggacgcgatggtcgagaagatggtcgagctgcgcaaaggcaagatgagcgcagaggactgcaaggctgctctggcaaagggcaactacttcggcaccatgctcgtcaagatgggcaaggctgacgctctgctcggcggcgctacctactccaccgctgataccgttcgtccggcgctccagctcatcaagaccaagccgggcgcacacctcgtaagctcctgcttcattctcgttcgcgagaaggacggcgtcgaggagaagctggcgatgggcgactgcgcaatcaacatcgactatccggactctgtcgataaggaaggcaacgtaaccctgaagggcagccagaagctggctgaggttgcaatcgagaccgcaaacaccgctaaggctttcggcatcgacccgaaggttgccgttctgtccttctccaccaagggctccggcaagggcggcacggttgctctgtcccgcgaggctaccgagtacgcaaaggaaatgaatccggagctggctatcgacggcgagctgcagtttgacgctgctgtatctccggtcgttgctgctaccaagtgcaagggctctccggttgcaggtcaggccaacaccttcatcttcccgtccatcgaggcaggcaacatcggctacaagatcgctcagcgcctgggcggcttcgcagcttacggcccgattctccagggcctgaacgctccgatcaacgacctctcccgcggctgcaacgcagacgaggtttaccagatggctatcatcaccgcaggtctgaagtaatttcagcttaaaaaccgtatcatttaaccgccagcgcgaaaataaacctttgcgttggcggtttgtttttttagtgaggagggaatgcagtgaaacaaagactgacgtatgcgctggtatcctcggctgcgtgtatcgcgcttgcggcgtggctcgtgccgtatgcgccgatgccgaaggcggagggcattgggaaaatcgaggtgctgggcacgatacaggggcagtattcggcgtatgtcacgcgctggctcgatacggatgaggtgcgccaactgctgccgcagatcaaaatgaacagcattcccgagctcctggggcgatatcctgatggaaagctgacttaccggcttgaaacggactacaacggggaaccactgtatttttactactatccgccggaattctatgtcacctataacggaagatggatgcacaggctgcgcgagagcgaggacgccgtacagcgcctgcatgagatatgcctcgacgcctgcgagcaggaattggcagatacgatatactggtagtaatataatgcacagataaaacaaaaagaactcctgctccggcgtgaaagagaattttgcgaaataatacgaactgtaatattatacgaaacggaaacaaaaaggacgctcttttttagagcgtccttcggtttcacattttgagaaaatactcatgaattgccgtgttttcgtcgagttcggggtggaatgcggtgacgagctgattgtcctgccgcgccgcaacgatcttgccgtcgacaacggcgagcgccttcgcgccgcccgacaccgactcgatgtagggcgcgcggatgaaggtcatcggcagcgtgccgagtccctcgaagctgtcgttcgtgaagaagctgccgagctggcggccgtaggcattgcgcttgactgcgatgtccatggtcgcgaagcacggaacaccgccgtcgacctgctttgcgagcaggatgagtccggcgcaggtgccaaagaccggcattccttccgtgatgcgtgcgcggagcgcatcgaacaggtcgaggtcgtgcagcaggcggcgcatgaccgtgctctcgccgccggggatgatgaggcggtcgagcggcttttcgaggtcgcgtgcctgccggatctcaaaatgcggctcgcccagacggtcgagcatggcggcgtgctccgcgaacgcgccctgaagcgctaaaattccggttgccatggcttacttgccgcgctccgccatgagcagagcgatctcgttctcgttgatgccgaccatcgcctcaccgaggttggtggacagctctgcgatcagctttgcatcggtgtagttcgtgaccgccttcacgatcgccgccgcacgctttgccgggtcgccggatttgaagatgcccgagccgacgaatacgccttccgcaccgagctgcatcatgagcgcggcgtccgccggggtagcaacgccgccggctgcgaagttgacgaccggcagacggccgttttcgtggacatactgcaccagctcgaccggaacggccagctgcttcgctgcttcatacagctcgtcctcgcgcaggttctgcacgcggcggatctccgcgttcattgcgcgcatatgagtgacagcctgtacaacgtcgcccgtgcccggctcgcccttggtgcggatcatgctcgcgccctctgcgatgcggcggagcgcttcgcccagatcacgtgcgccgcagacaaacggtacgttgaacctggtcttgtcgatgtggtaaacgtcgtcggcaggggagaggacctcgctctcgtcgatatagtcgatctcgatcgcctcgagaatctgcgcctcaacaaagtggccgatgcggcactttgccatgaccgggatggaaacggcctcctgaatgccgcggatcatgccggggtcgctcatgcgggatacgccgccagccgcgcggatgtccgccgggatgcgctcgagcgccatgaccgcgcaggcgccggcctcctctgcgatctttgcctgctccggggtggtaacgtccatgatgacgccgcccttgagcatctgcgccagttccttgttgagttcgtaacgtgtagccattttattgttctcctctcggattatcgttctttgctgtgatgccgttattataccgcctgagtggcatgaacaaaataatcagtttgcgaatattttataaggtcagataaaaaaatcaccaaattggcggacggctcttgattttcggctcgctgtctggtattatattgatattatttcgcaagggcgcgggacggtacagtctcgcgcccttttgccttctgctgcggcgcggagggcgacgaaaggatgggaataaaaatggagaaattcaccgagatgatcaacgctctcgacagctggctgtggggtcttcccatgatcgtgctgctgctctcgggcgtcatcgcgaaggagacacgccactatctcgcgaacctcgacgagaaggataagacggagatcccggttgtacgccgctgaacttataaaaacacctgtctccgatgaaaaaacttgtgtcacaggggggaatatgttatactgataaggcgtttcgcgtattatgacactaagctgtcgcgcggacggctcccgtttcagaagctcggggggcgaggcactatgcttcgctccctttctttgtctgaaaacgggggaggagtgtatgcaaggcagcactgcataattgaacaggagcaatttgcggaaattatgcagtattgccgtaaatctggcggaaaccgtttccgtcgaaaaaaggagacagaaaaacatggaggctttctcgagctttatcacctcgctcggaaactggatatggggcgcgcctatgctcatcctgctatgcggcacgcatatcttcatgacgctgcgcaccggatttatccagaaaaagacgttcaccggcatccggctgtcggtgacgaaggacccggactccccgggcgacgtcagccagtttcaggcgctgacgaccgcgctcgcgtccaccatcggcacgggcaacatcataggcgtgggcacggccatctatctcggcggcccgggcgcggtgctgtggtgctggctgaccggtgtgttcggcatcgcgaccaagtacgcggagagcctgatcgcggtcaagtaccgcgtgcagaccgcagacggccgcatgatgggcggcgcgatgtatgcacttgagcgcggcctgaaatggaagaagttcggcaaggtgatggcggttctgttcgcgctgtttgccatgctggcgtccttcggcaccggctgcggcacgcagatcaacgccatcgcggaggtcatcgagaccaacctgcccatcggcattccgcgcatcgccatcggcatcgtgttcggcatcgttaccgccatcatcatcctcggcggcatcgagagcatcgcgaccgtgtgcgaaaagctggttccggtcatggcgctgttctacgtgctcggctgcatcgtcatcctcggcattaacttcgactacattctcccggccttccgggcgatcttcacgcttgcgttccggccgggcgcggtcgcgggcggtctggtcggcggcggtatccgtctcgcgctccagtacggcgtggcgcgcggtctgttctcgaacgagtccggcatgggctccgcgccgctcgttgcatccgccgcgcagacgcgcaatccggtgcgtcaggcgctcgtctccgcgaccggcacgttctggacgacggttgttgtctgccttatgaccggtctcgtgctcatctcgactatcatgaagaacccggcggtcgatatggcgagcatcgccaacggcggtcagatgaccacgatcgcgttcgcgcagatcccgtacatcggcccggccatccttgtgttcagcattatcaccttcgcctactcgaccatcctcggctggtcgtactacggcgagcgggcggcggagtatctgctcggccgaaaggcgattctgccgtacaagctgctgttcctcgcggtcgttgtgttcagccccgttctggcgctcgaccttatgtggtctatcgcggacattctgaacgcgctgatggcgatcccgaacctgattgcggtgcttctcctgagcggtgtcatcgcaagtgaaactaggcactacctgaacaacctcgacgaagaggatacgacggagataccggtgattgaccgctgacgctcttccaggggggactctgtccccccctggataccccttcggttcctgcgaaaccgaaggggatacccccctcgcccctgcacggcaggggcggctcgggacacaaggtgaattgccccgaaggggcaagagaaggtgccctggggtacgtgtcccgaggcagtggggtaaaagtccggcagagctggacttttacggtgaattttatgcggcgctctgcggagcgcctgtcctgcctgttttgccgaaggcaaaatccgacaggagactgcgccctttgggcgcgaaaaaggcacgccgccggcgtgccttttctgttttgttgccttacaacacctgcgacatgatgatggcgcagagcatgatggggatattgaacgcgataaaggtcggaatgcaggtatcgcggatatgatcgtgctgaccgtcggcgttcaggccggaggtcgggccgagcgtggtatccgaagccggagagcctgcatcaccgagcgcggcggccgccgagatgagcagaatggtcgccggggtggaaaagccgagcgaggcgcacatgggcacgaacagcaccgcaagcacgggaaccgtgccgaacgaggtgccgatgcccatcgtgacgagcagaccgatgagcgtgatgacgacggctgcgaccagcctgctgccgccgatggcggaaatgccggcgttcacgagggcgtcaatgccgccggtcgccttgatgaccgaagcgtagccgcctgcgacgagcatgatgatggcgatctgacctatcagacggatgccgccctcgacctgcgcgtcgatttcattccatttgatcgcgcggaacacgacgatcacgaccagaccgcacagcgcggacagtgcgagatcctgactgatgacctgtacgaccgcgacgacgatggccgcgccgagcatgacatagtggcggtattcgagcttttccgagatttcctcagaggccgaggtatcggcttccagatcataatattcgcgcggcctgcggtagagcacgaatactgcggcgagcagaccgagcagcatggcgatgccgatgctccagttcgcggcggtaacgtcgcgtaccgtgaccgaaaggccgttttccgtgaggttatctgcgatcacgcgctgaaagatcaggccgaaaccgaacggaatcgtgatataggggaccttgtggccgaaggcgagcgcgcacgcgaccgcgcgtcggtcgagcttcatgcggttcatcatgccgagcagcggcggcacgagaatgggaatgtaggcgatgtgcacggggatgaggttctgcgacaggcaggcaacgagcgtcagcacgccgatgagtgcgagcctgtggccgccgagcaggcgcgagagctttttcgacaggatttcggcaaggccggtcgtggagatgcaggtcgcgaacgtgccgagcagaatgtaggcgagcgcggtcgtagcattgcttgcgaagccgctcgtcagcagctgcatgacggtctgcgtgccctccggcgcggagagcaggggaatgccgcccgcgacgccgccgatgatgcaggcgatgagcatggagagcagtacgttgagaccggtgaggcacagcgcgcacagaacgagcacggaaaccgtgaccggattgatgagtatgctgaaaatcgtggtcatatcttgtggaaattcctccttcagacagaaaactggaaataaaaaccgtatgcaaggcgcgcttgaatacggtaaagtgctgaaatctttcctattttatcagaaaaacgcggacaggtcaagacgatgacccgaaaaacagcaaaaagagcgaaccataatggttcgctctcagtctgtcgatatagttcagctgcccgcgcaaaacagcagtcgcgcgttagcgcgcatgaaatagaaatcgcgtggcgatttcatgaaaaccgggggcgtgtacctcggttttcatacttctggagggagaaagtttccgcatgggaactttcggacgactcgtgttctgcgaagtcagaacacagattgtcggaaaaacgaagtttttcgacagtctcacacagcttgtcggcgaaacgccagtttcgcgacagctttttttttactgctcgcggaagatgacctcgccggtctccgggtccataccgtccacgatggcgagagactcgagatggtagccgaggttgcggatggtgcggccgccgtactggaagcccttctcgatggcgatgccgatgccctcgaccgtgccgccggcctgctgaacgatggagatcagaccctgaagcgcgtagccgttggccagaaaatcgtcgatgagcagcacgtgatcgtcagcgctcaggaatttcttggagacgatgacctgattcttgcacttgtgcgtaaaggactcgacctctgcgatgtaaacgtcgccatcgatgttgatgctctgcgatttcttcgcaaaaacgaccggtacgccgaaatgacgtgcgacgatgcaggcaatgccgatgccggaggcctcgatcgtcacgatcttgttgatgttttcattcgcaaagcggcgcttgaactcctcgcccatcttgtcgaacagctcgatatccatctgatgattgagaaagctgtcaaccttgagcacgttgcccttcttgaccacgccgtcttttacgatgcgttcctctaaaaaattcatggcgaacccttccttttgtgtcctgtgttgttaacaacagtataacaaaaatttcggaaaaatcctacatttttcgcaaagaattttccggcggcggaaagcgggcctgcggattgcacggagcggtcagaccgtggtataataaaagcatctatcgagaagggaacagggagcggcggaaacgcatctctgatgaggatttctgttatggaactgatgaaaaacaaggtataccgctgccggatcagcgattatacagcggacggcacgggatttgcaaagattgaggggcgggcggtgttcgtgccgcgcacggcggtcggggactgctgcgatgtgcgtatcgtcaaggtcacgaaaaacgtggcgttcggccgcgtggagaagttcgtgacgccctcgcgcgcgcgcatcacgcctgcctgcccggtctcggacaagtgcggcggctgctgctatcagcacatcacctacgaggaggagctgcgcgccaaggagaagaaggtgcgcgacgcgctgacccgtatcggaaagcaggacggagacaggctgctcggcatcacgggcgcggaaacgaccgagcactaccgtaacaaggcgcagtatccggtgggccgcgacagagagggcaatatcgtgaccggcttttaccgtccgcgcagccatgacatcgtgccggtcgagcgctgtctgatccagtcggagaaggccgaccatcttgcgggcatcgtgcgcggatggatgaccgaattcgcggtcccgccctatgattacgagacaaaacgcggcacaatccgccatatttacgtccgcacgggcgaaaaaagcggcgaatgccaactgacgctgatctccgcgacgcgcaagctgcccgaactgactgcgctcatcgagcgcctgcgtgcagcggagccgtcgctgacgggcattctgatcaaccacaaccagcgcggcgataacgtcattctgggcgaccgcacggatgtgctgtggggcgagccgatgctggaggacaggctgtgcggcaacacgtttctgctctcgcctcatgcgttctatcaggtcaatcacgcgcaggctgagcgcctgtatgcgtgtgcggtggactatgccggactgaccggcgaggagaccgtgctcgacctgtactgcggcgcaggcaccatcacgctcgcgcttgcggcgcacgcaaagcatgcggtcggcgtagagatcgtgcccgaggccatcgagaacgcgaagaacaatgcccgacgcaacggggcggagaacgtggagttttactgcgcggatgccggacaggcggccggacggttcagcggcattgatgtgctggtggtcgatccgccgcgcaagggtctggacgagaccgcccgcgacgcgatcctgaagatgcagccgccgcgcgtggtctatgtttcctgcgacccggcaacgctcgcgcgcgatgtcgccgagctgtgcggcgcaggctataccctcgaaaaggcgcaggcctatgacctcttcccgagaacgtttcatgtcgagacggtagttcttttatcccacaaaaaaccagatagttatatccacattgacgtggagtttggcgagggcgaaggcaagattccagtggataaaattgtccagagagcggagcaatataagccaaaagaacgtgttacctacaagagaatcaaggaatatattcttgaaaagtatggttttaaggttcataccgcttatattgcagaggtaaagagaagtttaggactgcctatgtatgatgctcccaatgcagttgaaaaattgaaacaggccagaaagcatcctacaccggagaaagtagaagccataaaggatgcacttcactattttgcggtaatataatctttacataaaattaaatatcgcgcttacatagccgtttgttcttacgttagagcaagcggctttttttattcccttacatagctgtctgtctatctgaccggcagcttatttttgagaaaggaggatttctcttgaacacgcaaatcatcgccgtcgccaaccagaagggcggcgtcggcaaaacgaccacttgcgctaacttagggatagggctggcccaggccgggaagaaggtgctgctggtggatgctgacccgcaggccagcctcaccatcagcctgggcaacccgcagccggacaagctgccctttaccctgtccgacgcgatgggccgcatcctcatggacgagccgatcaaatccggcgagggcatcctgcaccacccggagggcgtggacctcatgcccgccgacatccagctgtctggcatggaggtgtcgctggtaaacgccatgagccgcgagaccgtcctgcggcagtatctggacaccgtgaagggacagtattcccatatcctcatcgactgccagccctccctggggatgcttacggtcaatgcactggcggcagccaacaggatcatagtccccgtccaggcggagtacctgcccgccaagggcctggaacagctgctgtccaccatcagcaaggtcaagcggcagatgaaccccaagctccagatcgacggcatcctgctgacgatggtggacagccgaaccatttttgcgaaagagatcgccgccctgctgcgggagacctatggcagcaaaatcaaggtgttcggcaccgagattccccattcggtccgggccaaggagaccagcgccgagggcaagagcattttcgcccatgaccccggcggcaaggtggccgagggctaccg

SEQ ID NO: 12830 - DNA, 331 bp, Unknown
  gut microbiota DNA sequence
gggaggcagcagtggggaatattgcgcaatgggggaaaccctgacgcagcaacgccgcgtgattgaagaaggccttcgggttgtaaagatctttaattcgggacgaattttgacggtaccgaaagaataagctccggctaactacgtgccagcagccgcggtaatacgtagggagcaagcgttatccggatttactgggtgtaaagggcgcgcaggcgggccggcaagttggaagtgaaatccgggggcttaacccccgaactgctttcaaaactgctggtcttgagtgatggagaggcaggcggaattccgtgtgtagcggtgaaatgcg

SEQ ID NO: 12831 - DNA, 448 bp, Unknown
  gut microbiota DNA sequence
cataaggggcatgatgatttgacgtcgtccccaccttcctccgttttgtcaacggcagtccggctagagtgatcttgcgtatcaactaaccgtaagggttgcgctcgttgcgggacttaacccaacatctcacgacacgagctgacgacaaccatgcaccacctgtcaccgatgctccgaagagaagccctatctctaggacggtcatcgggatgtcaaggcctggtaaggttcttcgcgttgcttcgaattaaaccacatactccactgcttgtgcgggcccccgtcaattcctttgagtttcaaccttgcggccgtactccccaggtgggatacttattgtgttaactgcggcacggaaggggtcaatacctcccacacctagtatccatcgtttacggcgtggactaccagggtatctaatcctgtttgctccccacgctttcgc

SEQ ID NO: 12832 - DNA, 17308 bp, Unknown
  gut microbiota DNA sequence
gtttccgttcaaaagcgccacacgcataccgttgtaagtgctgtaattgccgtccacaatcgtgctgttgtcactgaggacggtcagcatcccataattggttccgatgggacgtgaaaaatcaaacttttcttctctgtccggtgttttgcgggcagatgttaccatgtcgatctcgccagcttcaagcatctgctgcatatcatcccagctcttatcatatccgacatattcgtaatctacatcccaataacgagccatcaaccgaagaaaatcatagccgtacccgctgcggttgccttcttcatccatcacatgataaccatccatggcaaagaaaccgactttgacagtttcatgctgcgaactgtcctcggctgcatatgcagtctggggagaaaatatcatacacatgcatacaaaagccagtaatactgccacatatttctttgctctcgaaatcatattaaatctcctgtcatcttctgttgatcagtcattcctcaaaaaaacactgttagacagacagtgcacctcattttatgcaactggctggcattttaaaggccctgtagctttgcgtcccatatctgtttttcaaatccaatatttgatgtattcttttctgccatagtcttaacctcacatgatgttattctataaaactttgctgtccaaaaaaacgtactaaacgtcgataagtattattgtattggtcatatctcgttcgatatccataaatttcttcgcatctgcaagcagatctctattagagaggaaatcttataaacctcttattagtcattatacacaaaacaagcattcaaagcaatgaccccgaagaagattcatagcacattatggtaattattctatatatttttaaagatattgtctccgagagaaatcctgccagcaaagtaacagccgcaatctgacacaatatattttctctatacatttcttctcatcgaaaaatttgctccacgcccttactacatcaattattttcaaatgaataagaggctgcattttctcttattataagaaaatgcagcctcttaaattcaatatttttattagtcgtttttacgcactaaattggtgagtcgtccattttatcgttcattcggtgaaaaatttttccggagttgtcggcgttgtcggcgccgcgcagtcttgccttgagagcgctgtaccggcggcccttctgattgttcgcgaccatgtgcgagaccgtctccgtgctgcccacgatgacgagcagctgcttcgcgcgcgtaatgccggtatagaggatatttctggtgagaagacggcgcggcaggccgtcggacagggcgaaaacgaccgcgtcgaactcactgccctgcgatttatgtaccgtgaccgcgtaggcaagctcaagctcgttcagcatatcgaacgtgtaggtcgcaaggcggtcatcgaagcgcacgatcaggcattcctgctgcggatagatgcgctcgagctcgcccacgtctccgttgaacacgcccgtgccggtctcatcgccgccctcgcgctcccagacgatgtcgtagttgttgcgcacctgcatgacgcggtcgccctcgcggaagataatgtcgccaaagcgcttttcgcgcttgttctcctgcggcgggttgagcgcctcctgcaaacggcggttgagtgctgccgtgccgctgccctgccgtctggccggggacagcacctgaatctgcgacggcgaaaagccgtagtgcgccggaaggcgctgtgagcacagctgtgcgacagtctcgatgaccgaggccgcgtcgccgcgcttcatgaagaaaaagtcgccgtccgcggccgatggcgtgggcatatgcccctcgttgaccgcgtgcgcattcattacgatgtcggatttctgcgcctggcggaatatctcggtcagctgaatggtcggaacgcgctgcgaggcgatgatatcgcgcaggaagttacccggcccgaccggcggcagctggtcggcgtctccgacgagcacgagccgcgcgccgtgcggcagcgcctcgatgagcgcctgcatcagccggatatcgaccatggacacctcgtccagaatgacggcatcgcactcgagcggattggtgaccgtgcgcgcgtagaccgtgcgtccgccgggcgcgaacccggcctcgagcaggcggtggatggtctttgcctccatgccggtgaggtcggacaggcgcttggccgcgcgtccggtcggcgcagcgagcagcgtattcaggctgagcgcctcaaacacgcgcaggatgccgctgaccgtggtggtcttgccggtgcccggaccgccggttagaatgacaagaccgttccgcgccgccgccgcgatggcctgcttctgcttttccgaatacgggaactcgctgtcgtcgaacaggccgtgcagcaggctgtctacgtcgaaatcatactcgtagttgcgctcagacatatcgctcagcatatgtgcgagataagcctccgcgtcgtgcatatcgcgcagatagaccgcgtcgcggcctgcgatctcctcgcggacgaggatgcccttgtctgcgaggcgcaggataccggcgaggatgcggtcctcatcgaacacgacgtcctcgtcgctcagcaggcggatgacagcggtcgtcagcttgtcgagcggaataaaggtgtggccgttcccgaggttgaaggtcagcgtatagacgatgcctgcgtccgtgcggtcgtcggacagcatggacaggccgagctcgatcgccagaccgtccgcaagacggaaatcgacgtcataatacgggtcgcaaagcaggtacgggttctccttcaggctttcgatggcgctgtcgtgaaaccgcttgtacagcagcgccgtgatctcgatggggagaccatgctcgctgaggaagtccatcagctcgcgcatcgcactctgctcgacatactgccgcgcgatctctttggcgcggcgcgaggtgatgcccttgatctcggtcagtcgttccggctcgttcagcatcacatcgaaggtatcctcgccgaatttctcggcgatgcgtgcaccaaggcgcggcccgatgccgcgaatcaggccggaggacagataatccgcgatgccgcgaacggtcgtcggcaggcggcgttcaaagtgttcggccgaaaactgctcgccgtaggacggatgcatgacccagcagccgaccatggtcagctcctcgcccagaccgatgcccggaaaagtgccggtagcagtgatctccgccccctcctgcgacaaaaggcgcagcacggcgtaaccgttttcctcattgctgaaaacgatctgctcgaccgtgccgcgcagctctacatattctttttcgtccacaaagcaccgtcctctcctgctttttctattccagatacatgatatccttccgcaccgcgagaaattttgcaatattctgcccctgaccgctgccaagctcgacgaacgtgatggcagcgccgggcagatactgccgccgcacgcggcaggccgctcggatgagctgttcgctcgccgggtcgcagccgtcgccgtacagcgtcagctccgccgagccgtgctgccggagcatatgtgcgcagattcgctcataaactacgtgcagcaccgtgtaaaatcctaccgccgcgaaaacagcaagcagactttgccagaaaaccgacatgctatcccctcctgcactcagcctatgctgcgggagtgcgctgtgtgcgccggggactgcgcataaattcatagtatatagtgtagcacaaaaccggcctgatgtaaacaattcggctgaaaaagcggccgcagacagaaaacaagccacagactgtggataaatctgcggcttgccgtcggaagttatgtttcgtgctcccggcaccatgctgtgaggtcgtcgctgtcggtcccgcgcatcggatgcgctcggccgcaatcgcgctcgtgcggcggcacggcgataccttcgggcaggtcgcccgcctcgaaaagccgacggctgtccgacggaaggtctacgtctccccttgcggcgaccgaaggcttgctgcgctccatccactgaaacgacttgcgcgccgcctcgaagcggttcacgttctcgtcatacggcatcatgattcatcactccttcccggacagcttgcccgggaaaaaagaaaatatgcagacagacgtaaaaaggctcccatgccgaagcatgggagccttgtcagcgataaagtaatgctaaagcttaaattaagcgttgatagcagttacgacgccggaacctacggtgcggccaccctcacggatagcgaaacgcaggccttcctcgatagcgatcggggtgatcagctcaacgtccatctcaacgttgtcgcccggcatgcacatctcagtgccttccggcagagtgataacgccagtaacgtcggtggtacggaagtagaactgcggacggtagttgttgaagaacggagtatgacggccgccctcttccttcttcagaacgtaaacctgaccgtggaacttggtgtgcgggtggatagagcccggcttagccagaacctggccacgctcaacctcggtcttctggataccacggagcagagcgccgatgttgtcgcctgcttcagcgtagtcgagcagcttgcggaacatctcgatgccggtaacgacggtcttgcgcggagcgtccatcagaccaacgatctcaacttcctcgcccatcttcagctggccacgctctacacggccggtagcaacggtaccacgaccagtgatggagaatacgtcctcgaccggcatgatgaacggcttgtcagctgcacgatccggggtcgggatataggtgtcaacagcgtccatcagctcgcggatgcaagcgtactccggagcgttcggatcggtggaatcagaggtcagaacgttcagagcggaaccacggataaccggtacgtcgtcgcccgggaagtcgtaagagctcagcagctcacggatctccatctcaacgagatcgagcagctccggatcgtcaacctggtcagccttgttcatgaatacaacgatatacggtacgcctacctgacgggacagcaggatgtgctcgcgggtctgcggcatcgggccgtcagctgcggatacaaccaggatagcgccgtccatctgagcagcaccggtgatcatgttcttgacgtagtcagcatggcccgggcagtcaacgtgagcgtagtgacggttagcggtgtggtactcaacgtgtgcggtgttgatggtaatgccgcgctccttctcctccggtgccttgtcgatggagtcgtatgcctgatactcagcatcgccctcgagagccagaaccttggtgattgcagcggtcagagtggtcttgccgtggtcaacgtggccgatagtgccgatgttaacgtgcggcagagaacggtcaaatttttcctttgccattgtggatttcctcctcgtaaaatgaaatctaagtcacgataaacttattctacttcaaattgcaataaaatgcaataggcagagcagatattttagtcgttgtttttggtgcgcgagtcgatgatcttctcctgaatgctcttcggcacttcagtgtagtggctcggctgcatggtgtactggccacggccctgcgtacgggaacgcagagtggtagcgtaaccaaacatctcgctcagcggtacagcggctgcgatagcctgtacgccgccgcgcggctccatgccctggatctggccgcggcgagagttcaggtcgccgataacgtcgcccatgtactcctccggaaccagaacgtctacctgcatgatcggctccatcagaaccgggtcagccttcttcatcgcttccttgaacgccatagaaccggcgatcttgaacgccatctcagaagagtcgacttcatggtaagaaccatcatacagagtaaccttgacgtcaactaccgggtagcctgcgaggataccagcctgcatagcgccctgaataccctggttaaccggctcgatatattccttcgggatcgcaccgccaacgatcttgttgatgaactcgtagcccttgccggactcgttcggctcaacgatgatcttaacgtggccgtactgacccttaccaccggactgacgagcgtacttctggtcgacgtcagcggagcggcggatggtctccttgtaagcaacctgaggagaacctacgttagcctctaccttgaactcgcgcagcagacggtcaacgatgatctccagatgaagctcgcccatgccagcgatgatggtctggccggtctcttcatcggtgtaggtcttgaaggtcgggtcctcttcagccagcttggcgagagcgatacccatcttttcctgaccagccttggtcttcggctcgatcgcgacacggataaccgggtccgggaactccatagactcaaggatgatcgggtgcttctcatcacagagcgtgtcgcccgtggtggtgttcttgaagccgatgcctgcagcgatatcgccggagtatacacagtcgatatcctgacgatggtttgcatgcatctgaagaatacggcccagacgctcgcgggtgtccttggtcgcattgaggatagaggaaccagcagttacggtaccggagtatacacggaagaacgtcagacggccaacgaacgggtcggtagcgatcttgaacgccagtgcagagaacggagcctcgtcggaagacggacgggagtcctcttcgtcggtctgcgggttaacgcccttgatgtccgggatgtcggtcggagccggcatgtactcgataacagcatcgagcaggggctgaacgcccttgttgcggtaagcggtgccgcagaggaccggaacgatctcgtttgcgatacaacccttgcggattgcagccttgacttccttgatggtcagctcttcgccctcgaggtacttcatcatgaggtcctcgtcgagctcagctacgtgctcccacagctcatcatgatactgctgagccttctccatcatgtcagccgggatatcctcgtcgcggatgtccttgccgaggtcatcgtaataaacctcagcacgcatggtgataaggtcgacgatgcccttgaaggtgtcctcggagccgatcggcagctgtaccggaacggcgttgcacttcagacgatccttcatcatgtgaacaacgttgtagaagtccgcgcccatgatgtccatcttgttgacgaacgccatacgcggaaccttgtacttgtcagcctgatgccaaacggtctcagactgcggctctacgccgccctttgcgcagaatacggttacagaaccgtccagaacgcgcagggagcgctctacctctacggtaaagtcaacgtggcccggggtgtcgatgatgttgatacgatgctccgggaactgatgagtagaaccggaccagtggcaggtggtagctgcggaggtgatggtgataccacgctcctgctcctgctccatccagtccatggtagcggtaccgtcgtgggtatcgccgatcttatggtttacaccggtgtaataaagaatacgctcggtggtagtggtcttaccggcgtcgatgtgcgccatgatgccgatatttctggttctttccagggaatattctctaggcatattgctctcctttcaaagcgttatgcggaaaccgacagattaataacggtagtgagcgaaagccttgttcgcctctgccatcttgtgggtatcctcgcgcttcttaacagcaccgcccaggttgttgcaggcatccatgatctcgccggccagacgctcacgcatggtcttctcagaacgagcgcgagagtacttggtgatccagcgaaggcccagggtctgacgacgctccggacgaacttccatcgggacctgataggtggcgccgcctacacggcgagccttaacttcgagcgacggcatgatgttctccatcgcctcggtgaatacttccagcggttcacgtccggtcttctcacggacaatatcgaaagcaccgtaaacaaccttctgcgaaacgcccttcttgccgtcgagcatgatagagtttaccagcttggtgacgagcttggaattataaagcggatcgggcagaacgtctctcttggggacattacctcttcttggcactttacttccctccttcaaaaatatttgatttcataggtacttcgacaggcgtatcctgtcgtagcaatgcctgtccgaggtaatcacccgactatataatcggatataaaacgcctcagacaaagcaagaaaatgtgctttgctctgaaataactttctcgcaaaacctttgtgggtttgttgtgactctgttcacagccgccgcttcgcattttgaagcaaacgaactgtgcagcagtaatcaagcatggtggtgtgagacaaggcgcgaccgcacgccgcgtacaaaagtacgcaagtgtgggcgcaacgcagtatcacgccatcaggcgcagattacttgcctgccttcgggcgcttagcaccgtacttggaacgagcctgacggcggttagcaacgccctgggtatccagagtgccgcggatgatgtggtaacggacaccaggaaggtcctttacacggccgccgcgaaccataactacagagtgctcctgcaggttgtggccttcaccggggatgtaagcggaaacttccatctggttggtcagctttacacgagctaccttacgaagcgcagagttcggcttcttcggagtcatggtcttaaccgtagtgcagacaccgcgcttctgcggagcggacaggtcggtggccttcttcttctgagaattgtagcctacctggagtgccggcgccgtagacttggtgacgactgcctcacgacccttacggacgagttggttaaaagttggcattttatttcctccttctttcaaaagtatatatgaaaaagcgttttcgctttctcagcagttttattcggcgagcacggagacgacggacgcgccgacgtcgatgccgacggcatcgcccagctcagccatggtcgtgatctcgaccatctgaacatgattctcggtgcacagttcgtagatcggacccgtgacgcgcttttccgcgtcgagcgcgacatagaccatggcggctttgccgtccttgatggcctttttcgtctgcttgacaccgatgaccttgtgcgccgaatgaagttctgaaagcatgtttttccctcctatacggcatactccaatagtatactgtcccgcccccctaaagtcaagcattttttcaaacttttttcctgctgttttgactttttccctttccgtgcatttctctctgtttttgaccggaaaacaggtgaaattagacaaacgagacgcgcaccttacattgttccctttcttttcccatttatactgctgctgctttaagatgtaaaaggagcacccctttcggagtgctcctcgtaaaagcgtttcgctctttattaatcagtcaaggttaacgttctgctcgtagtgaccgttgcagtaatcggaaacgcccgagcctgccgggatcagcttgccgataataacgttctccttcaggcccatcatcgggtcgatcttgcccttgatcgccgcatcggtcagcacgcgggtggtctcctggaaggaagccgcggacagccacgaatcggttgcaagggatgccttggtgatacccatgagagtcggctctgcaactgccagacgcagaccctcttcgccggcgtcgatacgcgcctgtacagcgttgttgtagtcctcgaactcgagccaatccataaccgagcccggcagaacctctgcatcgcctgcgtcctcaacgcggaccttgcgcatcatctggcgaacgataacctcgatatgcttatcgttgatatctacgccctgctgacggtaaaccttctgaacttccttgatctcgtagtcgtgaacggcgcggggatcaagaatgcggaggatgtcatgcggattgagcgagccttcgttcagctggaagcccttcgggatctcctggccgtcggttacgcggatgccggaagaggaagcgagctggtaagaacgcatatcgccggtcttcggatcgacaacattgacggtcttgacggtggtgcgcttggactcctcgatggagaccatgccgccgatctctgcgagggtagcagccttcttcgggcggcgtgcctcgaacagctcctcgactcgcggaagaccctgcgtaatatccgaacctgcgacgccgccggtatggaaggtacgcatggtaagctgggtgcccggctcgccgatggactgcgctgcgataataccgacagcctcgcccttgccgaccggagtgcccattgccaggttgatgccgtagcagtggctgcaaacgcccttgcgcgcgcggcactcgagtacggagcggatctgcacgcgggtgatgcctgcctcgatgaccttgtcggcatcgtgctcgttcatcatcttgctcttcggaatgatgactacgccggtctccgggtcgcagatgtcgtcgaccggatagcggccgagcagacgctcacgcagcggctcgatgatctggttgccttccttgatgtcctcgacccagatgcccttggtcgcgccgcagtcgtcctcgcggatgatgacatcctgcgaaacgtctaccagacggcgggtcaggtaaccggagtctgcggtacgaagcgcggtatcggccatgccctttcgagcgccgcgggccgcgatgaagtattcgagagcggtcaggccttcacggaagttggacttgatcgggatctcgatggtcttaccggaggcggacgccatcaggcctcgcatacctgccagctgacggatctggttgatcgagcctcgcgcaccggaatccgccatcatgtggatcgggttgtagcgctgcgccttcatgttgtcctgcagctttgcggtaaccttcttggtggtctcctcccactcggctacggtcagacggtagcgctcctgatcggtgataaagccgcgcttgtacttgcggtcgatctgggcgaccttcttctcggagatatggatcatctcgtccttgccctccggcacgagcatatctgcaacggctacggtcagagcgcccttggtggagtacttgtagcccattgccttgatcgagtcaagcacctcggcggtgatgtggaagccgtgaacgcggatgcacttgtcgatgatcttgccgagctccttcttgccgcaggtgaacatgatctcgagatcgaacttcttagacgggtccgagcggtctacgaagccgaggtcctgcggaatgcgctcgttgaagatcaggcggcccggagtagcgtctacgatcgcagactccaccttgccattgatttccttggtcagacggaccttgatcggcgcgtggatgccgacaacgccctcgttgtaagccatcagagcctcgtcgacgttgcggaataccttgccggcgcccggctcggtgtcgcggtcgatggtcagatagtaggagccgaggaccatatcctgcgacgggatggtaaccggcttgccgtcctgcggcttgagcaggttgttcgcggacagcatcagcagacgggcctcagcctgtgcctcagcggacagcggaacgtgaactgccatctggtcgccgtcgaagtcggcgttgaacgcggtacataccagcggatgcagacggatggcgcggccctcgacgaggaccggctcgaacgcctgaatgcccagacggtgcagggtcggcgcacggttcagcatgaccgggtgacccttgatgatgtcctcgagcacgtcccatacctcgggctttgcgcgctcgaccatcttcttggcggacttgatgttggatgcggtgccgtcctcgaccagcttcttcatgacgaagggcttgaacagctcgagcgccatttccttcggcagaccgcactggtagatcttgagatccggaccgacgacgataaccgaacggccggagtagtcgacgcgcttgccgagcaggttctgacggaagcggccctgcttgcccttgagcatatcggacaggctcttgagcgcgcggttgttcggaccggtgaccgggcggccgcggcggccgttgtcgatcagagcgtcaacagcctcctgcagcatgcgcttctcgttgcggacgatgatgtccggcgcgcccagctcgagcaggcgcttgagacggttgttgcggttgatgacgcggcggtacagatcgttcaggtcggaggtcgcgaagcggccgccgtccagctgtaccatcggtcggatctccggcgggatgaccgggacaacgtccatgatcatccattccggacggttatgagacaggcggaacgactcgacgacctcgaggcgcttgatgatgcgcaggcgcttctggccggaggcctcgcgcagctctgcggtcagctccttggacagctcatcgagatccagctctgcgagcagctccttgatggactccgcacccatgccggcgcggaaatcgtcctcgtacttttcgcgcatgtcgcggtactcagcctcggtgaggatctgcttcttcatgagcggcgtatcgcccggatcgataacgatatagttggcgaagtacaggaccttctcgaggatgcgcgggctgatgtcgaggatcagacccatgcgggacggaatgcccttgaagtaccagatgtgcgataccggcgctgccagctcgatgtggcccatgcgctcgcggcggaccttggccttggtgacctcaacgccgcacttgtcgcagatcttgcccttgaagcggaccttcttgtacttgccgcagtggcactcccagtccttggtagggccaaagatacgctcgcagaacaggccgtcgcgttccggcttgagcgtgcggtagttgatggtttcgggctttttaacttcaccgtaggaccattcgcggatcaggtcaggggacgccagaccgatcttgatggcgttaaacgtatgatatcccatatatattaagatgctccttccctattcacagatgattttcggtcttatgcggcttattcgcccagatcgtcgaaatcatctccggcatcgtctccgtcttcggcggggttatccagtgcaaagagatcggtgtcgccgtcctcggcgtcgttgatgccgaagccggctgcggtgaactcatcgtccgcgcccgaaacagcctgctccatcggacgaacgtattcggtctcgtcctcgtcgtcctcgctcagctcgatgacctccatgttctcgtcgagaacctgaatgtccagacacagtgcctgcagctccttggtgagtaccttgaaggactccggaacgcccggctgcggtacgttgtggcccttaacgatcgcctcgtaggtcttgacacggccggtaatatcgtccgacttaacggtcaggatctcctgcagggtgtaggctgcgccgtatgcctcgagggcccagacttccatctcgccgaagcgctggccgccgaactgcgccttgccgcccagaggctgctgggtaacgagcgagtacgggccggtggaacgggcatggatcttatcgtcgaccagatgatgcagcttgaggtagtacatgtagccgacggttacgcggttgtcgaacttgtcgccggtgcggccgtcatagacgacgctcttgccgtcctcgtcaacgccggcagcgaccagagtctccttgatgtcctcgagcgttgcgccgtcgaataccggcgtctcgaccttccagccgagcttcttcgccgcgaagccgaggtgtacctcgagcacctgaccgatgttcattcgggacggtacgcccagcgggttcagaacgatgtcgagcggacggccgtcctcgaggaacggcatgtcctcctgcggcaggatgcgcgaaacgacacccttgttgccgtggcggcccgccatcttatcgccgacagagatcttgcgcttctgtgcgatgtagacacgaacgaccatgttgacgccgggagacagctcgtcgccgttctcgcgggtaaataccttgacgtctacgacgatgcctgcctcgccgtgcggcgcacgcagggaggtgtcgcgaacctcgcgcgccttctcgccgaagatcgcgcggagcagacgctcctcagcggtcagctcggtctcgcccttcggggtgaccttgccgaccaggatatcgccggcgtgcacctcggcgccgacacggatgatgccgcgctcgtcgaggttgcgcaacgcatcctcaccgacgttcgggatgtcgcgggtgatctcctcgggtccgagcttggtatcacgggactcggactcgtactcctcgatatggatcgaggtatatacgtcatcgcggaccagacgctcgttgagcagaactgcgtcctcgtagttgtagccttcccaggtcatgaagccgatgagcgcgttcttgccgagcgcgatctcgccctgatcggtagacggaccgtccgccagtacgtcgcccttcttcacgcgctcgcccagatcgacgatcggacgcatgttgatacaggtggactggttggaacggaggaacttggtcaggtggtagctcttgtcggtgccgttgtcgtagtggacattaacctcgcgtgcggtaacgcgggtaacgacgccgtcgccctctgccagcggaatggtgccggagtcgactgccgccttgtactccatgccggtcgcgacgatcggagcctcggtcttgagcagcgggaccgcctgacgctgcatgttcgcgcccatcagtgcgcggtttgcgtcgtcgtggtcgaggaacgggatgaacgcggtagcgaccgagatcatcatacgcggagaaacgtccatcaggtcgacgtccttgcggtctacctcgacgaattcctcgcgcaggcggcaggtaacgcggtcgttgacgaggtcgttgttctcgtccatcggctcggtcgcctggcagacgatgaactcgtcctcgacgtctgcggtcatgtagcggacctcgtcggtaacgtggcagcggatctcgccggtcgcctcgtccttgacgtgctcgatgacgcggtacggcgcctcgatgaagccgaagtcgttgatgcgcgcgtaagtcgcgaggtaggagatcaggccgatgttaggaccttcaggggtctcgatcgggcacaggcggccgtagtgagagtagtgtacgtctcgaacctcgaaggatgcacggtcacgggacagaccgccggggccgagggccgacatacggcgcttgtgcgtcagctctgccagcgggttgttctggtccatgaactgcgagagcggagaggaaccgaagaattccttgatcgcggcagttaccggacggatattgatcaggctctgcggggttaccacgtcgaggtcctggatggtcatgcgctcgcggatgacgcgctccatgcgggagaagccgatgcggacctggttctggagcagctcgcctacgcagcgcagacggcggttgcccagatggtcaatgtcgtctaccgtgccgatgccgtggctcaggttgagcaggtagcagatggaggcgagcatatcgtcgacgatgatggtcttcgggatgaggtcatagtgacgggtcttgaacgccttcttgagctcctcgccctgtacgccggagtcgatgatctccttgaggacggtgaagcggaccttctccttgatgccgagctcttcagcggtcatgccgaggtagtccttgaagtcgtcaacgaataccatgccgttgccgaataccttgaccgggttgccgtcggcggactcaacaataacgttgttgatgccgcgggcggagatctcggtcgccttctcgcgggtcagcatggtgtcagcctcagcgacgacctcgccggtcatcgggtcggtgacggtctcgagcagcttgtggccggtgatgcggcgcgcgatgtcgagcttcttgttgtacttgtagcggccgactgcggagatgtcgtagcggcgcatatcgaagaacatcatgtccatgagggaggtcgccgactcgacagagggcggctcgcccggacgcatcttcttgtagatctcgatgagggcctcgtccgcgctgtgcgccgggtccttgtcgagggtcgcgagaaggagcgggtcctcgccgaacagctccttgatctccgcgtcggtctttacgccgatggcacggatgaaggaggtgatcggaatcttgcggttcttgtcgatgcggacatagaaaatatcgtttgcatcggtctcgtactcgagccatgcgccgcggtacgggataacggtggtggagagcaggaccttatcggtcttgtcgagctccttgccgtagtatacgccgggagaacggaccagctgagatacgatcgcgcgctctgcgccgttgatgatgaaggtcgcggagtcggtcatcttcgggaagtcgcccatgaagatctcctgctccttgatctcgcccgtctccttgttgcgcagacgcatacgaaccttgagcggcgttgcatatgttgcatcgcgtgccttgcactcttcgatactgtacttcggctcttcatccatcgtgtagtcgaggaaggaaagctccagattaccggtgtagtccgtaatggaagcggcgtcggcaaaaacctcacgcagtccctctgcgaggaaccactcgtaggacttcttctgcacctcgatcagattcggcatctccagaatctcttcgatgcgtgcaaagctctttcgtgtggtcttgccgtgctgtacgtctttcaccttcatgtgctttgatcactccgtttctttcggcatagttggtgttgatacgcccggcggcgttgtaaaaacttcattcgtttgtcttgcttttttcagcagacagtgctaacatatcattaggcatgcgaagtgcccttcgatttttagcagcaaattattatatcatgttttgcggtgcttcgtcaagtaattattgcacaaaaaggcagaggttttaccctctgcctttgttttttgctctaaaaagagcagaaaaccctttctctttttaccgtcagcagacggcagaccttccgccgatccagcggctcgccgctggaggcggctttacgctcgatgtgagcgtgcacattggccgccttcggcggccgggggtgccggtgttcaccggcgggaacaaaaggggacaggacaccaagtatggtttcctgtcccctcttgactccccagaccttcctttgcgctgacacatc

SEQ ID NO: 12833 - DNA, 644 bp, Unknown
  gut microbiota DNA sequence
actactgcgttagccttagcctcgttgtactcgcccttcttcagaacgcccggacgaacggtcgccatctgcggacggaagcgcgggcagatgatggtagccatcagatggccgccgaatgccggacgggtcatcttcaggttgcggtcctcacgattgagtgcgtccagctgtgcctgcggcagggtggaagcctcctggaggaatgctgcatacttctcaacgtcaacgtcgaggtgggtgcagtctgcggtcagaccggtgtgcagacgagctgcgcagcgcgggccgaggtcacggccaatgttggtagcggcgatcagcaggatctccggcttcttagccataacggtgtcgcagataacctttgcgtaagcatcggtggtgtaggtgtcgagcagatcggactcgcagacgagaaccttgtcagcgccgtaagcgcccagctccttcgccatggaatcagctacgcccttgccgccgagcagcaggccgcaaacctcggtgcccatgtcgtcagccagcttgcgtgcctcggagatcagctcgagtacggtcggctgcagcttgccctgacgctgctcacagaatacccatacgccggaaaaatcggcgaggttggtgttattgaaatcagccattgt

SEQ ID NO: 12834 - DNA, 81951 bp, Unknown
  gut microbiota DNA sequence
gcgggcaagcgcacactactttgtagacctgaacgagatttaccagagcgtaaaggacagcgacacggcatggcattgcggcagggaacgcggcggcagctactacaacgactgccgcaacgcgaactccatcggcattgagatgtgtagcgttatccgaaacggcgtgtacgttatcccggaggaaaccatgaagcgcgccgcaaagctgacccgtgagctgatggcaaagtaccatgtgccggtatcgcgcgtgtgccgtcactatgatgtgacgcataaggaatgccccgaaccgtgggtacgcaatccgcagttgtggcagaaattcaaaaccatgctgacagagaaagaggttgaagatatgacggaagcgcagacgcgcaaaatcgcgcaggaagaaatcaaaaaagcaaacgcaaaggtttatgaccgcgtgcaggactgcccgacatgggcgaaagacacggtgcagcggcttgtgaacaagggctttttgcagggcgatgaaaacggcaagctgggtcttactgaagagctgatgcgtgtgctcgttatcaacgaccgtgcacatctgtacggttaaaaacaagacggtataacatacccaagagggaggataccatgaacgagaaaaacgaaattctggcaggtgatgtactgtcgctgctgaaaagtcagctgaaatttatgaaagcgcttgtactggtgcttattctgctgctggcggcaacgaacatctatcacgtatggcagtggagccagttcgatacggtagtcgtggagaacggggataacggtggttatgcaaattatgtcgccggagataacacgggaggtgtgtataatggcgagcgtagcggtacggaagaagaaaaacggtaagaccaagggagttaagatcaagcggaaggggtaaaccgcatgaacctcaaaaaagagttcaccaagccggaatgcgactatttccggcgcgagtgcaattttacggatgaggaacgcgccgtattcgatctacgagttacggcgcgttctgttgttcagattgcggacacgctgcatatgagcgaggcaacggtttaccggcggctgcggaatatcaaacggaaaatactgaaagttttgtgacaggttttcgcgcttccgatgcgctataatagacgcatagagaggggcgataaagcatgagctacgaacaaagactggaacgtatcggctacgacaagcagtgtgcgcggcgcattgctgaggactaccgcgaggcggggaacacaaagtatctcgacgagtaccttgcctacaaggagcgctcccttcacgaaacggaggtgcacggataatggcttacggttatccacagtatccacagcagtattcacaacagaatgtacaaatgccgcagtatccacaacatattgtgcgtccggtggcaagcgtcgaggaggcaagagcggttcagaccgacttttcgggcgctttaaccattatgccggacacggcacacggatacatctacacaaagcagctcaatctgcaaaccggctgcgcggatttcgcggcatacagccgcgtgcaggacgcgccgaaagtgcagacggattatgttccgcgaggcgagtttgacgagctgacacggcgatttaacgccctgtgcgaccaactgggaggtgcaaagaatgaataacccgatgatgcaggttttgcagctgatgcggaacggcggaaaccctatgacgatgctgaaccagatgacgggaaacaatccgatggtcggtcagcttatgcagagtatgcaggggaaaagtccggacgcactgcggcagatggcgatgaacatcgccaaagaacgggggattgacctcgaacagtttgcgcagcagttcggcatgaagatcaagtaaatacgaaactgtaaaaaaacagacgattttttacggttcccttttcagttacggaatcttgaagaaaaatccggcatgaatttgtcatgttcggaaagcgtacggttccgatcaaatataactgaaaaggagaattacactatgagtgacgattcgatggctctgggttatgcactggggcaggacagcaacaacaacggcggcggcaatgacggcatgtggggcggcaacggctcgtggatttttgcgtttctgatcatcgcgctgatcttcggcggcaacggctggggcttcggcggcaacaacggcgcgggctatcagggcgcggtaacgcgcagcgacctgtgcagcgagttcaacttcaacaacctgtctcgttccgttctcggcattcagaacggcctgtgcgacggcttttacagcacgaacaacggcatgctcaccggcttcaacacgctcggcaacaatgtgtctaacggcttccacggcgtagacaacgcgatttgtcagctcggctaccagacggcacagcttgcaaacaacacggttcagaacatgaacaccggttttaacggcgtgaccgccggtctgacggcactcggcacgcagatgtccggctgctgctgcgacacccagagacagatggaacgcggtttctgcgacatcaactacaatgccgctaccaacgcacgcgacattatccagacggcgcacaacgacaccgaccgcattatcgcacgcctcgaccagatggagaacacccgtcagcaggagaagatcgcggcgctccagaacgagaatcaggccttgaagttcgcggcttcgcaggaggcacagaacaattaccttgtaaacgctctgcgtttttccggttgcggctgcaacacctgcggctgctgagatacgatattcaggagggggagcaatccccctgcctttgacaggagggaacagttatggcttgcaagcctgtacagaaactttgtccgaacctgcgtatctcacagagcgtgacctacgcaagcggcgtactgacggtaaatattccggcgggagattaccagaacggctgcgtatacggtatcgtcatcgcgcagaacatcccgagtacgacgatcatcggcgcgccggtggtcatcacgatcggcgacggcacggtaacgtatccgctcttaaaatgcaacggcgcggcggctaccgtgtttaatctggacacccgtcacaaatacctgtgtcgcgttgtcacttcggcaaccggcggcagtttccgaatgctcggaaattcctgctgctcgcactctgacgcgctgcgctcgattaacggaacggcggtgacagtatgagaaggggaacaatgatgctgctgatgcagcgaggccgcaaagagaatgcatccccggaagagtggagaattcgcaagatgtatcccgaagatcgtcaccattacggcgtgcggtatcattacggcaacatggagccgtatgattactatgacgagcgcattcacggcggcgaaccggaaatgcgtagttaccgccgctattctgacggacgctttgcgcccaagaacagtgtcgcatggccgaggtatgacgagtaccccgattacgaggatgagatgcgccctattggctttcgcgatgatgacgcttatatgggtgatacctcgttcgtaggggacaagacgcgcggctctgagcgctctatggggtatgcagcaagcgccaacgcaggccgcatgactaagagcatggcagaagagtggctgcacagcatgcagaacgctgatggcacgaccggtccgcattggactttcgaacagtgcaagcaggtaatgcagcagcgcggccttgactgtgacccagttgaattctgggttgcaatgaatgccgaatactctgatcgttgcgccgtaaacgaaaagcacggtatgcgcagcattgatttttatgcagactcagcctgcgctttttggctgaacgacaaggacgcagtaaaggataaggaagcggcatattacaaatatgtcgtgaagcattgacagaaagagggggcttctgccctctcttttttgcttgtgttgggtgtgggagtgtgttacaataaacaaagtagcgtgggagtggatgtgggagtctctaaaacacgatagcgaaatcgtcagatatagcgttatattttacgcttagtcctctgccttacaagcagagggtcagcggttcgagcccgttaacttccaccaaacgaaaccactcacttctgtgagtggttttcttttttcaaaaattctgaatgcaggcaaacgaaagccgagcggccgcccgccgtcagccgtcgtttccgaaaagaggtacgtctatgtctgaaaccgtcatgacacatatcatcgcgcgcatccgcacggattttccgaccaagttcggcatcccgcgccagagcggccttgccgacgtgccggcgcgcatcgttttcgagccggaataccgcaacgcggacgcgctgcgcggcatcgaggaatactcgcatctctggctcatctggcagttctccgaagcggtgcgcgagagctggtctccgaccgttcgtccgcccaagctcggcggcaaccgccgcgtcggcgtgttcgcgacccgctcgcccttccggccgaacgccatcggcctgtcctcggtccgcctgcaccgcgtcgaatacggcacgcacgagggcgcggtgctgcatatttcgggcgcggacctgatggacggtacgccgatcttcgacatcaagccctatctcgcctacaccgattcgcatcccgaggcgtcgggcagctttgccctcgcgggggacgccgtgcgcgtcgagtgcgcggagggcgttctggatgccctgccgcaggaaaaacgggagactctgctgcgcgttctcgcgcaggacccccgtcccggctatcagcatgaggcgggccgcatctacggctttcccttcggcggcttcgaggttcgcttcaccgttgcggacggcgtgctgaccgtgctctcggcggaaaaagtttgagcggtttaacattttgttaatgcaatcgctttccggctgcgttataattatcatagatatttttatcgaaagcaggggggagaactatgccaaaaaagatactcattgtcgaggacgaggccaacatccgcgagctgctgcgcctgtatctcgaacgcgagggatataccgtcctcgaggctgaaaacggcgtcgagggcattaaaaaatggaagtcggacaagccggatatgctgctgctcgatgtcatgatgccggtcatggacggctgggaggtctgcagggagatccgcgcggaaagcgacgtgccgatcatcatgctgaccgccaagggcgaaacggccgaccgcgtttccggtctggagatgggtgcggacgactatatcgtcaagccgctcgaaatgcccgaggtcatcgcacgcgtgcgcgcggtatttcgccgtattgcgcccgatgacgcacccgaaaagctgtcgttcgacaatctcgtgatcgacaagcaggcctacgatctcgtcatcaagggcaagcgcgtggacgcgcccccgaaggagatcgaactgctgtacttcctcgcctccagtcccaaccgcgtattcacacgcgcacagctgctcgatgaggtgtggggtttcgactacttcggagatacgcgcacggtcgacgtgcacgtcaagcgcctgcgcgaaaagctcgagggcgtgtcggataaatgggagctgaaaacggtctggggcgttggctacaagttcgagaccaaggagtaagcgatgaaaaaacgcagctttttcttcaaggagtacctgacccactttattctgatcgtcgttgcattcacgctcgccggcagcgtgttctatcatcagatggcgagctacgcgctgcgcgccaagcagaccgagctgaagaccacggttcagagccttgccgagcagagcaagctcatgcagggcacggactcggacgtgatacgcgagctgtacatgctctccatcgcgcgcatcgccaaggaggacgagctgaccgtcctcgtcacgaacgagagcggcgaggtgcagatggcggcgcatccgaacggctccacctacagcgtcagcggctaccgcgtgccggccgaggtggtctccgaggtcacacgcagcggcagctatgccgcggtcggttcggtcggcgtgctgaccgaggcgacgagctacacagtcggcagctgcgtgcgcgacactgacggcaatgtcgcggcgctcatcttcgtatcctgcgaggacccggcaacggccggcgtagtgcggcattcgacgcagacgctcgtgctcatcctgctcgtgacgctcgccgcgatgctcattatctcgttcattctgtcgcagcatatcacgcgcccgatcaagaatatcgcggcggcggcgaaggaatttgcctccggaaacttcgatgtgcgcgttcctgaggacaatcactgttatgagatcgacgagctggcggtctcgttcaacaacatggcgcgcgacctcgatcagctcgaggagctgacgcgcggcttcatctcgaatgtcagccatgagttcaaaacgccgatgacgacgatcggcggcttcgtggacggcatgatcgacggcaccattcccgaggagcagcgcgacaagtatctgcgcatcatcgcggaggagacgcgccgtctgtcgcgcatggtcaaccgtatgctcgacgcagcgaagatccagtcgggtgagctgctgctcagtccggcgccgttcgatttctccgccatgacgagccagatcatcctctccttcgagcagaagatcgagaaaaagaagctggaggtagagtgcgagcttgatgaccggctgatcgtcatgggcgaccgcgaccatctgtaccgtgcggtatacaatctggtggacaatgcggtgaagttcatcgacgagggcggcaggctgacgctccgcgcccatccggagggcgacttctgtgcgttctctatctcgaacaccggcgcaggcatttccgccgaggatctgccgcacgtgttcgaccgcttctacaaggcggatcgttcgcgttcgatggacaagaccggcgcaggcctcggtctgtacatcgtcaagaatatcatcaacctgcacggcggagagatctccgttcgctcggacggcggagagaccgaatttgagtttacgcttccgctcgcgaagatataaaaaagactgtcgcgaaactgacgtttcgccgacaatctgtgttctgactacgcagaacacggacgtccgaaagttcccatgcggaaactttctccctctcaaagtatgaaaaccgaggcgcatgtccccggttttcatgcgtttgcgcagcaaacgcttttgaatgcgcgctgccgcgcgattgctgttctggtgtgaaaacagactttatcgacagacaagggcatggacgaaagtccatgcccttgttattattgtcttgaggttttaccaaccgaagctcgagaacggggaggagaagccgccgaagctgccgtagccattgccgtaattgccgtaattatcgttctggctctggttctgctgctgtgtctcagccggatcgtcgccctccagatcgtgcgcatcggtcagcgtgatggtgaggttgatggtcttgtcctcggagatgcggtagacggaaagcgtcagcttgtcgccggccttcttgtcggccttgacggtgtttacctcgtccatggtcggggtcggggtgccgtctactgcggtgatgacgtcgccgaccttgaggccctcagaggcggctttggcgcgcgagtcgatcgaatagacctgaacgcccgagatgctgccgtcctgcgaggagacattgcggccggtgatgccgatggacggacggccggaaacgtagccgttctggatgatctcgtcgacgatatcctttgcggtgttgatcgggatggcgaagcccatgccctcaacggtcgcgctgccgaaggcgttgccggacagcttggccgaggtgatgccgacgacctgaccgtactcattgatgagcgcgccgccggagttgccgttgttgatggaagcgtcggtctggatcaggctcatgacgcggtcattgacggtaaggtcgcggttgatcgcggagatgcggccgccggtgatggtgttcgcaaactgaacgccgccgggggagccgatcgcgtaggcgtattcgcccggctggagctggtcggagtcgccgaactcagcgggggtcaggtcggtgctgctttcgactttgatcacggcgaggtcggtctgctcgtccgtgccgacgatggtcgcatcgagcgaggagctgtcgctcagctgaaccgaaaccgactgtgcaccctcgacaacgtggttgttggtgatgatgtagccgtccttgctcatgataacgcccgagccgctgccctgtccttcgctcgtggtcgagataacggatacgaccgaggggctgacctttttgtagatgtcctcgccggacatgccgtcagaggagctcgagctgctgtccgagggcttgctgttgatctgcatggtcggcgtggagccgctgtcggtcgaggcagatgcggagctgtccgtctggctgctgccggtgacgaaataggtggctaccgcgccgcctgcgaacagaaggcaggccgcggcaacgctgcacaggccgatgacgagtctgcggccgctttttttgctgcggtgcggcattgcgttctgctgattctgctgatgccatgcgtcactgtacggaatgccgttctgctgctgcggtgtctgctgaatcggcggctgctggaaggactggaactgctgtgcattgctgcgctcacgcggagactgatactccgggtgctgcaccggtgtctggaacggggtgcgcggctcctcgccggacttctgctgcgcctgcggcgtttcggtctgctgcggctgcgcaggagaatcgttctgctgtgcctgcggctctgcggcgggagtctgggtttccgctgccttgttttcggcagtctggttttcgttttccaatttattattgaagtcgtccatttgaatggcctccttatcgtttactgtctctattgtaaatttgctgtgtggcagtttgttgaaaacaatgtgaacatactttgaacaattatttattatagcacgcgcaggtgcatatgaaaagggcgcaccgaggtgcgcccttagactgtcgaaggaggaaggcggctatgctaccggagcatttcgcccgcataggcaagcccctgatgaatgttgacgcctgcgctttcgatcgcaccggcgatgatgaccgccgcgatgatgatggcggctgcgatgatgatcttgccgatcaggttttgatattctttcattttagttcctccctctggtctggtattcagttcagctcgtcgagcggcgtcagcacggcgtccttcggcggcgcggaaaccggtgccgaggacggggcgaggctgagcgagagatcgaacgtgagcgtgccctgattgcgcaggtggttggagagggtcattctgccgctcgtgccggagaaatcaaaagtcagacgggtgcggttggcaaccgggaacaggctgcccttgatgtcgagggtcagatctcccgacgccgcgccggtggcagtgttgagagtatagcttccgctgacgccgaccatatcatcctcttcgccgccgagcagagatttgaccgagggctgcgcagtacagcgatcgcccgagcgcgtgaacaccgcatcgcccagtacagcagacaggctctgctgcctgtcctcgagcgagctgtaaaagccgctccagccgccgtattcctccgcatacgcctcggcggaggcgagcagcgcagcgccgcaggtgtttggggtatcagcgttccggtacagcgtcaaaagatcgccgagcgcggtcttttcgctgaaatgctcctcataataccagccgtccgtctttttgtccgtaccgctgctcgaggtgagcgcggagaacagcagcggactgcgcacatacagcgtgtccgtatcggcgttgtagatcaggtcgaacgccgcgttcccgagagcactcttataataggaaagcatggacgcggagaagagctgcgaggtcgggccgtccgcgctgctgatgaggtcggacgagagaaggcccgcgagtgcggaaagatcggcggacgcagagagcgaggcgctttttccgtccgagacgagcgtcatcgtgcccgaagcgctgtattttttgtcgccgctgatcgtgtcgaacgcggtgcagtccagctttgcggtgagccccatacgcacggcatcggtgttttgcagcctgggcacggcggcgagccagcggttcgcggtcgtaaagccgctgtcgatgctcccgagcagcgcgtcccggtcatacagcaccgcgcactgtgcgccgtcgtcccattcgacggtcagaccgaggctttccgcgagaaaacgcacggggacgcaggtgcggccgtccttttcgatgggcgaggcgtcgagcggaacggttttcagcaccttgccggtcaccctgtcggaaacggtgagggtgtcgccgccaatcgcgaagcggcagaccgtgccgtcaagcgaagcggaaaccgtgccgctgtcgtagccgacctcagcgccgagcgcttccgcgaccgtgcggaagggtaccatggtgcggccgttctcgaagaacggctgaacgtcggggaacgtgagcgtcttgccggaaagctgcacgctgagtgcggggacggcgtacaaatcgtcctgaagcgtcatgtcgagcgctgtgctgcggtagaaggcctcgcggtcatcccagtaaccgctgtcgagccattcctcgaggtcgctctgctcggcgtcatggaagcggagcgcgacggacgggtcgctatgtatctcgtcgagatggcggcggtagcagtcgcttgcctgatcgtagctgaacttgtcgaaccaccagtcataggaggaggtgtacgcctccgcgctgtcgtagccgaactgctggtacatgggcggcgcggtgtcgagcgcaagcgctgcgggcagcgaggacacggcaagagacgccgcgagagcggcagtgagcagtcgtttatgcttcatagagatcctcctttgtatgcaggtgtgaatactgctttatttttctattgtactacatatgccgctgaactgtccattgcccttttgaacggatttcggcgcgaaaaaccgtcatgatttccggggcgtccgcgtagcatggagagagggaggggagagaaatgttcatcaccatcacgcgctccatgctgcgccgtgtcgcggcggcagcggcggcttttgcggtcgtcgcggcgcttttcatgatgttcccgcagggaaagaccgagcagaccgcagcggcggacggaaactggggactgtcgttccgcgcggaggggcagcagcccgaaggcaacgtctccgccggagagctgcggcagtgggatgcgtattatgtgggcgatccggcggaaaaggttatttatctgacgtttgacgccggatatgagaacggctgcacagcagcgattctggacgcgctcaaaaagcacagcgcgccggcctgctttttcgtcgtcggcaactatatcgataccgcgcccgagctcgtgctccgcatggtgcaggaggggcacatcgtcggcaatcacacgctgcaccacccggatatgtccgcgatacaggacgaagcgtcgttttcggcggagcttgacggccttgcggacaaataccgggaactcacgggcgaggagatgaagaaattctaccgtccgccgcagggaaaattcagcgagagcaatctcgccatggcgcagaaactcggctaccgcacgattttctggtcgctcgcctatgtggactggtacaccgacgatcagccgaccgatgagcaggcgttttccaagctcgtgccgcgcatccatccgggcgcggtcgtgctgctgcactcgacgagcgcgaccaacgcgcgcatcctcgatgagctgctcgcaaagtgggaggcgctcggctaccgcttcgcctcgctcgaggagctcgcaggcgaaaaggcggaatgaaggtgcgtcacgagtagtcctcgagcagctgcgtcagctcggtctcgctttgcagcgtgatgccgcggcggagcgcttcccggtcggcgctcggcagcgtgcgcacatcgatcgccgtcgtgaggatgacctcgccgttctgagagatggtcaggtgcgtgccgtccgtaccggcgacgagcgaagcggcgtctgcgggaacggcggcaggcgcacggacggcgcgcacggcaaggaggagcatgacggcggcaaggagcagaaagatcaggagcgcggcggcgcgctgccgcgcctgacggcgtgcgagcagaaaaaatccctgtatcattgacaaaacctccgttacagatgtaattcctaaaatagacaagagagagactgcgtgatttgagtattcccacaaaatttttgtctattccgcgaagttctgtaaaaataatttggcatttcggctcttgtgtgttataatggcatagaccgctataatactgtattcccgctctgtcccggcacagggacgaaaatggggatatttcattctgcgggcgttttttcagccgtgcgggaacaaaacgggcggtgaaaacgtccgtacctgtacaggtaaatgacagctgcccgtgcgcattctgccgggcataccctgcggccttcggctgccgggcaaggaggataccgaattgtcaaaaagaaaaaatggatcggtcatcggacggtttttcggacgcctgctgctgacgttagtgctcgtcggcgtgctgtgcggctgcttctgcggcattgcatttgcgttctatgttcatacgagcatcaacccgtccgcgaaggaaactgcttccgaaatcagcaagggtctcggcctgaacctcaactcgttcatctatacgacggacgcggagacaggcgaggaggccgtttatgagaccatcaagggccgcgagaaccgcgaatgggtcgacagcgacaaaattccggacaatctcaagaacgccgtcgtcgccatcgaggacgagcgcttctacaagcatcacggcgtagactggtggcgcacgctcggcgcggtcaagggctgggtgctcggcggcgaccagtacggcggctcgacgatcacgcagcagctcatcaaaaacatcactgaggacaaggattactctatcaagcgcaaggtaaacgagatttttcgtgcttttgcgctcgaaaaggagatcgacgacaaggaccgcatcctcgtcatgtacctcaacaccatctacctcggctacaacagctatggcgtgcagaccgcggcggaccgttacttcggcaaggatgtttcgcagctcgatctggcggaatgcgccgttctggccggactgaccaacaatccgtccatctacgacgtatacaaccatcccgacaaggtaaaatcgcgtcaggagaccattctgtcgcagatgctcgatcagaagatgatcactgaggacgagtacaacgcagccgtttccgagcagctgaactaccgtccctacgaggaataccagaaggacgtcaagtctacctacagctacttcaccgatgaggtcatcaaggacgtcataggcgatctgaaggagcagaagggttattccgagctggtcgcagagaatatggtatattccggcggcctcaagatttatgcgaccattgataccaaggttcaggatgctctggacagcgtatataccgatgattccgcgttcccgaacacggaaaagtacggcgaagtgccggaaagcgccatggtcatcacggacaagcagggcgatatcgtcgcgatcgcaggcggacgcggccagaaaacgctcagtcgttcgttctcctttgcgaccgatgcacgccgccagccgggttcctcgtttaagccgctggcaagctacggcccggcgatggatgcaggcatcatcgttccgagcacgacgatctacgaccgcgccttctccgagggcgaggacggtatgccgtggccgatgaacgacggcaagtacccgaccggccgctccctgaccatcaaggagggcgttacgcgctcgctcaacaccgtctcggtacaggtgctcaacgcactgacaccgcaggcttcctatgatttcctcaccaaccagctcgacatcaagctggtcggcagccgcaccaacgaggacggcacagtccagtcggatatcgctctggcgcctctggcgctcggcgcgctgaccgacggcgtgacggtccgcgaaatggccggcggctactctaccttcatcaacgacggcgtgttcggcggtacgcgcacctatacgaaggtgctcgacaacgagggcaacaccgttcttgaaaacactccttataccgacaagggctttaccaacgtccataccgtatatgatatgctcgactgcctgcagaacgttaccgcacacggtaccgcctacggcattcagatcgacggcgtggagaccgcgggcaagaccggtaccacgagctcgaacacggatatctggttctgcggcgtaacgccggaatactctgcggcggtctgggtaggctatgagcataactaccgtctggacggcctgtacggccgaaacgcggcggagatctggctcaaggtcatggaaaaggttcatgccggcgacagcggtcttgtctttgactcgcatccgcaggatttcgtcgaggagacctactgcatggataccagcctgttggcatccggcgcctgccgcgaggcgggacgtgcggcgaccggccgcttctggaaggacaaggttccgacgcggacttgcagccatgaaaacatcgaggagaagtatgacttcgagacaagcggcatggatgactactacgacgagtatgacgacgaggaaagcgacgacagctcgaacaccgacagcagcaacggctcgaccgataacggcgacagcagttatgaaaacggcgacagcgacgacagcagcggcggtgatgacgacggcagcagcggcggtgatgacgacggcggcaacattgcaccgacgcccgatcctgaaccggcgcccgatccgtcagagggagacccggagagctgatcttcggtatgccggacagaccggcacagaaaagtaaatacagacgggcggagggccgcgaatgcagctctcctcccgaaaaacgttcagtgctgcacaaggccgcacagaccggggcgttagcggtgccttgaacctgcaatccgcttcagcaggggtcgtgcagacaaagagggtcgcatatgcggcgaggcagccactcacaggacgatgagagaccggtactgcgcaacggaggactgtgaaccatgtcaggcggggaaccgagcagcattaagcagaaaccatcgtgtgccgcagagctgccgatcttgagtccgaaatgcggaaaggcagccgggtgtgtgttttcgaattgcctgcgtgcggtcttgtggagcactgaaaaattttcgattgaaaccacgctttcaatcgaaaagggatataccgatcctgacggctcggatatatcccggcgggacaaaagttcctctcttcggtcgaaacttttgttccgacttgtataaaaacccacgcacatgtcgcgggtttttatgaaccttcggctgcgccgatggttcgattttattcgcgaacgaggttcgcgggagaacgctttgaggcgggcttacgcccgtctcttttttatgagaggaactgcggagggagggtttcgctttgtatcaggctttataccgcaaatggcggccgcagacctttgcggacgtgatcggacagcagcatgttaccgacacgctgcgcgctcagcttcagagcggcagactcagccatgcgtatctgttcaccggtacgcgcggcacgggcaagacgacctgcgcgaaaattctcgcccgggcggtcaactgcgagcatccggtgaacggcgacccgtgcaacgaatgcgccgcgtgccgcggcattctggacggctcggtgctcgacgtgaccgagatcgacgcggcgtccaacaacggcgtcgacaatatccgcgacctgcgcgacgagacgcgctatacgcccgcgcaggtcaaaaagcgcgtgttcatcatcgacgaggtgcatatgctctcgatcggcgcgttcaacgcgctgctgaaaacgctcgaggagccgcccgagcacgtgctgttcatcctcgccacgaccgagctgcacaaggtcccggcgaccattctttcgcgctgtcagcgcttcgacttccgccgcatcggtgcggaggacatcgcgcggcgtctgctcgacgtcgcggcaggcgaaggtatcgagctgaccgagggggcggcgcggctgatcgcccgcctcgcagacggcgcgatgcgcgacgcgctgtccatgctcgaccgcgcagcggcggccggcgccgtcgacgaggagacggtcacggcggcgctcggcgtgatggggcaggatgacggcattcatcttgcggagcacttcaagacaggcgatctcgcggcggcggtgacgctgctggaggaatattacagcgcaggccgcgaccttgcggcggtatttgatcagatgctcggcctgatacgcgacgcgctgctcgtcaagacaagcagaactgatgtttccgcgctaatctcgccggcgtatacggtgaaaacgcttcagggactgtgcgacggcctcgcggcctcgacgcttatcgcgtggagccgcatcatcggggactcgctcgaccggatgcgctcggcggcgaaccgccgtgtagaggccgagctgtgcgccgtgcggctgtgcagtctgggcgcggagaattatgatacgctcggcggccgcgtcgaggcgctcgaggaaaagctcaaaaacggcgtgccggtgcaggtcgtgcagacgccgcagagcggcggcatggcgccccctccgccgggagatgaggacgcacccccgccgccgggcgacgaggacgcgccgccgctgatcgacggggagccggcaccgcaggcgaagccgggcaaaccggccggcccgacgctgacgctctggccgcagtgggcgcggctgctggatgccctgatgggcaagatcaacgtcggcgcactgacgaacatcaagctcggcgcgaagggcgcgctcgaggacggcgcgctcgtcatcctctgcgaggacagaatgacttatatcctcgcgcaaaaggatgagacactcgcggtcattcgggaacaggcggcgaagctgaacggcggcccaatcaaggtccgcgtgcgtgaggcgggagacgagatcatacaggaaaaaaacgacatggtagaggaactcatcgaccatgcgaagaatttagacgttgacataaagacactttaaggaggacacttaaaatggcaaagggtaagaatttcggcggcttcggcggcggcatgaacatgcaggcaatgatgaagcaggcgcagaagatgcaggagaatatgctcaaggcacaggaggagatcgccgttatggagaccaccggcacggcgggcggcggcatggtgaccgcagtcgttaccggcacctccacgctcaagagcatcgagatcaagccggatgttgtcgatccggacgacatcgatatgcttcaggatctcgttgtcgcggcggtcaacgaggcgctcaaggcggcgaccgagaagtcgcagagccagatgtccgcactgacgggcggcctcggcggcggtctgggcggcctgctgtaatggattacttcgcaccaccggtcgagcggctgattgaggagttcgccagactgcccggcatcggccagaagagcgcacagcgtctggcgttccatgtgctcgatatgccaaaggaggacgcggagcgcttcgcgagcgccatccgcgaggcgaaggaaaagaccttcacctgcaaacgctgtcagaacctcacggacagcgaggagtgcccgatctgcgcggacaagtcgcgcgaccagaagaccatctgcgtcgtggcagacccgcgcgacgtgatcgccttcgagcgcacgaaggaataccgcggcctgtaccatgtgctgcacggcacgctctcgccgatgggtcatgtcggcccggacgatatccgcattcgcgagctggtgcagcgcatcgccgacgaggacacccgggaggtcatcctcgcgaccaatccggacaccgagggcgaagcgaccgcgatgtatatctcgcgcctgctccagccgttcgacattaaaatcacgcgccttgcctacggcattccggtcggcggacatctcgagtttgtcgatgaggtcacgctcacccgcgctctcgagggccgccgggagctgtaggcggctctcaatcttgctgtatattgtgtaatattataaaatgaccagctttgccggtcattttatacctcgactcagcgcccttggggcgcgtccgggggtatcaaaattcggtttctgcggaaccggattttgtagatagggggtattggataccccctatcgcgcgcgaagagcgcaaaaaaaacaggaacagccgggctttcgcccagccgctcccgcaataaaaggtaggatagagagtagaaagcaagaacatgtggggggatcttacgctttccacattttttatgatacggaacaattgtgtacattctgtgaacatttcgctgaaatttatatttgggaggaaaaaagcctgtggctgatctgaagaaagaaattgaaaatcggcgcacatttgcgatcatttcgcatcctgacgccggtaaaacgaccataaccgagaaattcctgctgtacggcggagcgattcaggaggccggcatggtcaagggcaagaagaacagccgccatgcggtttctgactggatggagatcgagaagcagcgcggtatttcggtcacgtcctccgtccttcagttccgctacgagggcaagtgcatcaacattctggatactccgggccatcaggacttctccgaagatacctaccgcacgctgatggcggcggacgctgccgtcatggtcatcgacgcatccaagggcgtcgaggcgcagacgcgcaagctgttcaaggtctgcgcgatgcgcggcgtgccgatcttcaccttcatcaacaagatggaccgcgaggcgcgcgacccgtacgagctgctcgaggacatcgaaaacgagctcggcatcggcacctatgccgtcaactggccgatcggctcgggcaagcgcttcaagggcgtatacgaccgtatggatgacgaggtcatcgccttcgagggcgcggatttccgccacgaggtcaaggcgcagcgtatgtccattgacgaccccattctggagggtctgctgcccgaggatcagtatcagacgctcattgatgatgtggagctgctttccggtgcgggcgacgagttcgacctcaaggccgtgcacgagggcagactttcgccggtattcttcggctccgctctgaccaacttcggcgtcgagccgttcctgaagaagttcctccagatgacgccgccgccgactgcacgcaccgcagacatcggcgtgatcgacccgttcgacccgcatttctccgcgttcgtgttcaagatccaggcgaacatgaacaaggcgcaccgcgaccgtgttgcattcatgcgcatctgctcgggcaagttcgagcgcggtcaggacgttctccacgttcagtccggcaagaaaatgtcgctcgctgcgccgcagcagctgatggcgcaggaccgctcgatcgtagatgaggcctacgcaggcgacatcatcggtatttttgacccgggcgtgttctccatcggcgataccgtgtgcgaccccaagcataagtgcgtgttctccggcatcccgaccttcgcgcccgagctgttcgccgtcgttcgccagaaggacaccctcaagcgcaagcagttcgtcaagggcgtggagcagatcgcacaggagggcgcgattcagatcttccgcgagccgaatgccggcatggagtcggtcatcgtcggcgttgtcggcgtgctccagttcgaggtgctcgagtatcgtctgaagaacgagtacaacgtcgagatcatccgtgagaacctgccgtatgagcatgtccgctgggtcgagaacgacgaggaggactttgacgtcaagcgcctccagctgacgagcgacaccaagatcgtcgaggacctcaagggcaacacgctcctgctgttcacctcgccgtggaacatcacctacgcgaccgaccacaatgagggcctgcgtctggcggagttctcggaaaacgcttaaagaactgtcgcggaaccacggttccgccgacaagctgtgttctgacagcgcttcacgccgcagaacacggacgtccgaaagttcctattcagaaactttctccctcttaaagtcaaaaaaccgaggtacacgcccccggttttttggaatttgctttgcaaattctatttcatacgcgctgccgcgcggtatgtgtttttattaaattttatctacaagccttttacagccgcttcgacttttttcggtcggggcggcttttttcatgcgcccagccgggtgagttcggtgccggggtagtagtgcgcgaggatctcgcggtagtccgcgccgttttcggccatgtatttcgcgccgtactgcgacagaccgacgccgtggccgtagccgatggtgtggaaggtaagcgagtcatcagcggtcgtgaccgtgaaattggtcgagcgcaggccgaacagctcgcgcaccgccgtgccttcgaccgtgacgccgccgagctttacggttttgatgccgccggcgtccgagcggaccgaggccttgaaccaggcggagggcgggccggaaagatcggcggcagggaaggcggagccggccttttcgcggaaatcgtctgctgaaacagtgacagcgctctcgtagccgtcaaaagccgtgccgccgggactgaccacgctttgcaggtaggggacatcctcaccccagacatcggcggcggactcggtgcgcgggccgctgacacagtgaaataccgccgcgatgggagcgccctcgctcgtcaggatttcgccttcggtgtcgcggacggccgcacggatggcggagatttcatccgtgccgaatacggagactgcgggactgcggtaggcggcgcagtggcggtaatcgtcacacagatcggcctcgggatgggcgtccgggcgtccgcgggacagcttgcacagcgcataggttcgtgcggcgaccgcctgcgcgcgcagcgcctcacgcggaaaatctgccgggatctccgcggcggtgacgccctctacatagctttcgagcgtaagctcggtcggtttgccgtcaatctgcacagtcaccgtttcgttttcggaaacggctggcgtttcggcggcgccttcggcagattcatgtgcaatatcctgcggccagagcacgggcagcaggaaaagcgccgccacgagcagcacggcggtaaacagcagtcggcgcacaggtctcatctcccttcgtttctctgggacagtatatgcaatgagtccgaaaaacaggacataagcctgctgctttctattgacattgcttctgatttgaagtattatggaattaagagaaacgaacaaatgttcgataaacgaaagtgcgaacgggaggtacaacatggaactctgcaaaatggctcaggaataccgccgcaacacggcgctgctcgaactgcgcaagaaacagcttctggcggcaaagcgtcacgcgaagcagtacgaggtgaaatacaggctgatgcggcgcatacgcatgctgaacgaaatgataaacgagagccgtctggcggcgttcgaaatggagaattattatgaaaaggagggggagtatgtcgggcgaacggcagtatgaccgctgtgcatatgaaagctatatccgcgatctcggggaggagaacagcacgctgcgcgcggcattccggacggcatttttcgaggcgatgcgcagcgagctgaccgcgcggcagtacgaggtgctgcggctggagacggtcgaggggatgaacggcaaggaggtcgcggcgcgtcttggcatcacgcagtctgcggtttcgcggcacaagtcgcgcggcatgaagcggcttcggtcgctgctttcgtataacctcgagctgctctaagggggacgctgtcccccttagatacgcccccggttcctgacgaaaccgggggcgataaccccctctcgtccgcacagcggacgaggccgcgccgccgcggcgcgggcagaggtaagaaagtcaggtacacgccccgactttcttggagatttttaagcggcgctctgcggagcgcctgtcctgcctgttttgccgaaggcaaaatgcggcaggagaaagcgcgcaaagcgcgcaaaaggcacgccgtcggcgtgccttttatttgatagctttcggacgtccgtgctctgcggagtcagaacacagcttgtcgggaaaacgaagtttttcgactgcttaaaagaaaaacgcgacatcaggccgcgcatttgcaccgccccgtcgcgtttcttggcaataaataaaaacggcggcagggagtagtctcaaacctaccaccgaacttgtgaacacattatacatcgatttccggtcggacggcaagataaaaaattcacaaaatcgagtttacaccttgttaacatttgtacaaaattgcaggacggttaccgaccgccctgcacgccgcggaagcacgcaggaaaagaccgcgtttttcggcagaaaagatgcagattttccgcggatttctctttacaaaaggcgtgtggtgtgttatcctatatttactgttgccccgcgcttagctgtcggataaccggacgcgttcctatcgctccatttcaccaagccgcggcccagcctgagggtacaaaaattatattttcgaaaggtgaaaacgaacatgatccgtaaggaagacaagactgccgttatcgaggcaaaccgcacccacgctaccgacaccggttccccggaggttcaggttgcaattctgaccgcccgcatcaaggagctcaccgagcacctgaaggttcacaagaaggacaaccactcccgccgcggcctgctgaagatggttggtcagcgccgttccatgctggcttacctgcagaagaaggacatcaaccgctaccgcgctctgatcgctaagctgggtatccgtaagtaagaaacgttttataggggagcagtctgctcccctgtttctatacctgcgaaaaaagcatctgctttccccaaggaagtttatcaaccgggcggcataaacctgctttttagcgtttgaaagagggacgagggcatcttcgttcctgtttcaagtgctaaaagccggtgccgccctccaaaaatcaaaggaggaaacaaaatggcaaatatcaaccactttgacttcaaaaactaccgcgtttttgagaccgagatcgccggccgcaagctgaccgtcgagaccggcaagatggcgcagctggcaaacggctcctgcctcgtccgctacggcgagaccgcagtcctcgttaccgctaccgcatccgcaaagccgcgcgacggcatcgactttttcccgctctccgttgacttcgaggagcgcatgtacgccgtaggccgcatccccggctccttcatgcgccgcgagggccgtccgtccgagaaggcgatcctgtcctcccgtcagatcgaccgcccgatgcgtccgctgttcccgaaagacctgcgcaacgacgtttccatcgtctgcaccgtcctcgagaacgattatgacaactctcccgaggtagtcgctctgctgggcgcttccatcgcggtctccatctccgacatcccgttcgactacgttgtagccggctgccaggtcggcatcgtcgacggcaagaccgtcatcaacccgacctccgagcagcgcaaggtttccgagatggacgttaccctgtgcgcgaccaaggacaagatcgtcatgatcgaggccggcgcgaaggaagttccggaggacgagatgtttaacgccctcatggaggctcatgaggagctgaagaaggtctgcgcgttcatccagtccatcaaggacgagatcggcaagccgaagttcgagtatgagcatcacgacatcgaccacgacctgttcgacaagctcgaggcagagtgcaacgacaagttcgaggtcgctatggataccgacgacaagaccgtccgcgacgcaggcgttcgcgagatcgttgacgcattcgaggcgaccctgtccgacgagtacaaggaagagcacggcgcaaacctcggcgagtgcgtggacaagctccagaagaagatcgtccgccgctggctggcaaacggcaagcgcgtcgatggccgcggcatggaggaagtccgtccgctggctgctgaagttcacgttctgccgcgcgttcacggttccggtatgttcacccgcggtcagacccaggttctgacgctctgcaccctcggcacgctgggcgatgcacaggagctcgacaccatcttcgaggagaaggagaagcgctacattcaccactacaacttcccgtccttctctgtcggcgaaacccgtccgtcccgcggccccggccgtcgtgagatcggtcacggcgctctggctgagcgcgctctgctgccggtcatcccgccggtaagcgagttcccgtatgcgctgcgtctggtttccgaggtcatctcctccaacggctccacctctcagggctctgtctgcggttccacgctggctctgatggatgcaggcgttccgatcaaggcgccggttgccggcatttcctgcggtctgatcaccgacggcggtcaggagaccacctttaccgatattcagggcgttgaggacttctacggcgacatggacttcaaggtagcaggtaccaagaagggcatcaccgcgattcaggtcgacatcaaggttgacggtctgaccccgaacatcatcaagcaggcgttcgagaagtgccgcgttgcgcgttacggcattctggacgagatcatgctcaaggcgatcccgcagccgcgtgaggacgtttccgactgggcgccgaagatgaccaccatgcacatcaacccggacaagatccgcgaggtcatcggcaagggcggctctgtgatccagaacatcgttgctgagtccggcgcaaaggtcgacatcgaggatgacggcaccgtcaccatcgccgctgtcaaggcgaccgatgctgacaaggcaagaaagatgatcgaagcgatcgtcaaggagccggagccgggcgagatctactacggcaaggtcgttcgtctgatgaactttggcgcgttcgtaaacctgctgccgggcaaggacggcatggttcacatttccaagatggctgaccaccgcatcgagaaggtcgaggacgccgtcaaggaaggcgacatggtttgggtcaaggtcatggagatcgacgacaagggccgtgtaaacctgtccatgaaggacgttaagccggaagaaaaggtcaagtaatccggcctgaaacagaaaaaagggcttcagtgcgaaacgtgctgaagccttttcctttgtattttatcatatcctgtcggctcatgaaattgtttccctttcaaaagacgggggaactgtgctataatggaatgcaaagaaaaatcgacggaagggaaggacaagcctatgacctctgtgctgctgcccgagggcgagctgcgcgtggcgcggtgcgatacacttgacaagctgatcgcggtcggtgacggcgacgctgcgctgctttacctttatatcctgcgtcacggcagcgaggacggccggacggctgcgcgtgcgctccatttatccgacgagcgctacgagcgcgcggcgttcacgctcaacaatctgagcgcgcctgctgccgagacgaaaaataccgaaaagagcgaaaatgctgcgccgcagtacacagcggccgagcttcgccgcgcacgaaacgaggacggcgagttttccgctgtatgcgatgccgcggagaacgccttcggccgcgcgctcaccgagggcatgctgcgcagcctgctgaccgcctatgatcatctcggactggacggcggcgcgatcatcgagctgctcagctacctcaagaacgaaaagggcgaggtgcgcctgtctgacatcaagcgcgagacctatcagtgggcggacatgggcatcgtcaacgcgcaggacgcgcagcagtatctggcgcggcgcgtgggcgaaaagccgttcatcgaggcgctctaccgtgcgctcggcgcggacccggcgcagccggcccccaaggagcagcgcgtctgccgctttgcgctcgcgcacggcttcccggcggagtcggtcgagctggctgtccgccgcaccgaggcgcatcagggtcatcgtagtctggattatacgctcggcatcctgcgccagtgggaaaagagcggcgtacataccatcagcgagatcacggcgctcgagccggagagccgcacggcggcggtcgctgtcggccagaccgaggcgcagccgacggacagcggtacgctcgcggactgggagcaggcatggctcgcgcaaaaggaagagatcagacggagaatgaaggaggcggaagcgaatggcttatgataagaaactgctttctgcggcgcgcagagagctggagcgcgatcgcgaggcgcatgaggacgagctggaggcgcgccgccgggacatctatgcaagggagccgcgtatccgcgccatcgaccgcgagctttctgcgaccgccattcaggtgctccgcgcggcgctcgagcagggaagcgacccggaaaaggcgatcgcgtcgctgcgggaacgcaacctgagtttgcaggaggagcgttcgcgcctgctgcgcggtctgggtctgccggccgactggctgacgaacaggccaatgtgcgaaaaatgcggcgacaccggatatgagggcgcggcgacctgcgaatgcgtcaagcgccgctatgcccgtctgctcaagcagcagctttcctccgttcttcccatcgaggatcaaaattttgaaaagttcaatctcagctattattcgccgcggatcgaccctaatatgcacgactcaccgctggaaaacataaaggtcaatctgtttgagtgcaaggcatatgcacggaatttcggcgaaaactcgcccaatctgctgctgtacggctcgacaggactcggcaagaccttcctctccacctgcgtggcggaggcggtctcggcgcgcggcttttcggtcgcctacgacaccgccatcaacatcatcgccgcctacgagaccatcaagttcggcaacggcgacggcgcggcggcggcggagcgcgcggcgcggtatgagcgcgccgacctgctcatcattgacgacatgggcaccgaaatgggcaccgcgttcacggtctccgcactctacaacctcatcaacaaccgcctgatggcgcaccgtccgatgatcgtcaacaccaatctgctgcccgacgagctgaaaaagcgctattcgcctgccgtggcgtcgcgcctgctcggcgaattcaagcagctgcgctttttcggagacgacatccgcatgctcaagagccggatgcagaaccgttaaaaatctttcaaagactgttcaaaaactgttcacacattacggggcggagtgcggtatactgacattgtcagcaagggaagccgcaatcccgaagctgacgacctaccgatctttttatttctcttttttacccccttttattttgtgaatgacggaaaacgccccgaactcgttcccccgcgagccggggtgtttttctgtccgtttgagggaaaatgtgctctgatcgtcgcgccagctctgttaataatttttcaaagactgttcaaaaacggttcacacatcggcgcggaaagtgcggtatactgaatatgtcgaaaggaagtttcccccttcttccgatcgacagacaagtttgattcttttttctttttcttttcccctcttttttcgaacagcgaaagcgttccgcagatccggcatccccctgccgggtgcggagcgttttcgtctgtccggaagggcggttttccgccgaaacaaatctttcaaactctgttcaaaaactgttcacacattgcggtgcggagtgcggtatactaacattgtcagcaagggaagccgcaatcccgatgaagctgacgacctaccgatctttttatttctcttttttaccccctttttcaaatctgtatactggatgagcaggcaccgttttcgcttcccccggcgagacggtgctttctcgttgctttcaaaaataaaagaggcggctctgcttgcgaaaaagagaggaatagggtatactgatacatagcaagaaacgatatgttaggagatgttttatatgggttgctcgcacaactgcgacagctgttcgtcgaactgcggcggcgagaagagcctcaaggtcgcggctaacaaggctgcgaccgtccgcaaggtgatcggcgttgtttccggcaagggcggcgtaggcaagagcctgctgacctcgatgatggcggtcggcatgacgcgcaagggctacacctgcggcgtgctggatgccgacattaccggtccgtccatccccaagaccttcggcgtgcacgacaagctcgagggctgcgaggagggcatcatcccggcacgcagcgagggcggcgtgcagatgatctcgatcaatcttgtcctgccgaacgaggatgacccggtcatctaccgcggtccgatcatcgcggagaccgtcaagcagttctggtcggacgttgtatgggaggacgtagacttcctgttcgtcgacatgcctcccggcacgggcgacgtaccgctgaccgtattccagtccctgccggtagacggcatcatcgtcgtcacctctccgcaggatctggtctccatgatcgtcggcaaggcagtcaagatggccaagatgatgaacattccggtgctcggcatcgtcgagaactacagctatctggagtgcccggactgcggcaagcatatttccgtctttggcgagagccatgtagacgaggttgcggcgcactacgagctgccggttctggccaagctgccgatcgatccgaagcttgctgaggcggttgacgccggcaagatcgaggacgcgaagctgccggacgcactttccggcgcgctttcgaccgtggagggtctgttatgaacatcggcgtagcattcgacgaaggtcagatcgcggccaacctcggctcctgcaaacaggtgctcgtcgtcacgaccgagggccgtgagccggtcagcaagcacatggcggaggtgcgcggcacctcgacgaccgacctcatcaagctcgcgagcatggagcagatcgatgtactgatctgcggctcgctcggcctcgccatccgcaacgcgctcgagatgatcggtgtgctgctcgtgcccggctgcgaaggcccggccgaggaggcggtagcgaagttcctcgtgggcgagaagcagggcgacccgaccctgctcgagatcggccgcgaggaggacccggatgacccgatggcgtgcatgcatgactgcgcgaagtgctccggctgcggcccgagcgagctgctgaagagcatcccggtcgaagaagtcaagtaaaaaaacgaacccctttggcgcgacggagaaatccgtcgcgcttttgtctgtttttaccacaactgggtgcgctgtctgtgcaaaacagcaatatcttttgcgtttctgttctgctatactgaaagcaggatagaaaaggcaaaggagggatttctatgagtatgtttttcgcagacgcgcccgaaatgctgacgctctctgcgccctgcccgtggcggcggtacgcggcgcggtggctcgatttattgatttacggtctgctctggaacgccatagcgcggtgcatcttccgcctgaacctcggcagcgggttttacgctaactggctgtttacgctggttgatacggcggtcggcgtgctgctgatgctgctcatcgagccggtgctgctgcacttctggggcacgacgccgggcaaatggctgttcggtctgcgcgtccgagcagaaaacggcgagaaaatcgcgtaccgcaccgccttcgcccgcacatggctggtctacacggacggcatgggctggtatctcccactctggatcatttacaagctgtggaaaaactatcagctgtgtcagcgtgaggaaatgccctgggacgaggaaaacggctgccgcatcgtgatgcgcgagacaaaaatgaagtggtaccgcgtgccggcgtttattctcgcggccgcgctcgtttacggcgcgtcgttcggcgtcggactgcacgcttcgctgccgcacaaccgcggacgaatgacgctctcgcagtatgtggacaactgcaacgatatgcagcgctaccaccagtggggcagaattgttcgcccggacggcacgctcggggaagactcgagcacggaggggatggtcataacgctccaaaacgcccgcaaggagcagccgacctgcacggtcgagaccgatgcggacggctatgtgacggcggtcgagatgcacgtagagatggacgtggaggctgttggctatgtgccgggcacggacgtcaagactatgatgctctacgcctacggcctgccgcacgaaaagctgagcctgctgtctctcaatagcgatattacgagcgaccgcgacagctacacgcggaacctcggctcgctcaccgtcacgcagaaaatcgagatgaaggggctcaagtggctggacccggacaacagcgagggtaattttctcgtgcagacgaacgaaaatgcgaaggacgcgcactttgccctgaccttccgtattgaagaaacatgaaaaaactggaacttctggggctgtccgtcgggtgcggacagctctttttatctgcgcggacgaaaatctttccgacaaaaccggaaatttatcaaaaaatgatgatgcaatttgccatgtactgttgtataataaaactataatcggaaaatcgggtcggtagaccctatggaacgaaaggacttctgaaatggacaatatgactgccgcccttgttggcggcctgtttgacgaaagcggcatttccgcttacgcgcgtccggtgctgttcggcacggcgggcgacgcggtacgggatgcgctgccggatgcagtggaaaagtgctattttgtgcatgacgagcgggagccggagcttgcgggagcagagagccttgcgctcgataagaacaaccgctttgcctcgctgaaggcgctgccggaatgcggtcatgtgctggtgctcgcggcgccgttcggcctcgcggaggaggacgcgctcttccatctggcggagacgcatgtcacgaccggctacggcgtcagcgtgcttgcggccgagcagcagggctttgacgcggagggtcagcctgttccgcgcgatacgcactgcttcgcggctctctttaccttcgatatgctgaaaaaggcgctcgaaagcggcgcggatacgctcgacggtctggtcgcggcggcggtcgcggccggtgcgcagaagggcgtcgccatcacgaataagatttaccccatcaacgacggcgcggcatctttcatggcgcagaccacgatgatgcagcgcatcaacttcggcctcatcaagaagggcgttcagatcttcgacccgacgaatacctacatcgccccggatgcggacatcgcgcccggcgcggtcattctccccggctgccacatccgtcccggctgcaaggtcggcgcaggcgcggtcattggcccgaactccatcctcgaaaaggcggagatcggcgcgggcactacggtcaacaactcgcaggtctacgaatccaaggtcggcgaaaaggtaacggtcggcccgttcgcctatatccgcccgcagtgcgtggtcggcgacggctgccgcatcggcgacttcgtggagctgaaaaagtccaccatcggcaacggcaccaaggtttcgcacctgacctacatcggcgacgcaacggtcggcgagcgcgtaaacttcggctgcggcacggttgtcgtcaactatgacggctacgttaagaaccagaccgtcatcggcgacgattgcttcatcggctgcaacaccaatctggtctccccggtaaagctgggcgaccgcgtgttcaccgcggccggcaccacggtcaccaaggacgtaccggacggtgcgctcgcggtcgcgcgcgcgcgtcagaccacgctcgacggctggaatgaccgccgccgtgcagcgcatgaaaagaaataacagatacagataaataaatcaccggataaaaaatactatgacggaggcaaatcaatgatttctcacggaaaaaatatcaaaattttctccggcaactcccatcctgcgcttgcgatgcagatcgcatccgctctgggtctgccgctcggcaaggcaaccatctcgaccttcgctgacggcgagatctcggtttcgatctcggagtccgttcgcggttctgacgtattcctcgttcagtccacctgcggcccggtcaacaacaacctgatggagctgctcatcatgatcgactcgtgcaagcgtgcctcggcaggccgtatcactgcggtcatcccgtatttcggctacgcacgccaggaccgcaagagcaaggcgcgcgacccgatctccgcgaagctcgtagcgaacctcatcaccgcagcaggcgcagaccgcgtgctgaccatggacctgcacgcagcgcagatccagggcttctttgacattccggtggataatatgctcggctcgtccgtgctcatcccgtacatcgccggcaagttcggcgtcggcaccgaggacaccgttatcgtatctcccgatctgggttctgttacccgtgcgcgcaagttcacccagaagcttgatatgccgctcgcgatcatcgacaagcgccgcccgaaggcgaacgtttccgaggtcatgaacatcatcggcaacgtcaagggcaagaagtgcattctggtcgacgacctgatcgacaccgcaggcaccctcgtgcatgcagctgaggcgctcgtagagcgcggcggcgcgaccgaggtctatgcgtgcgcaagccacggcgttctgtccggcccggcgatcgagcgcatcaaggagagcccgatcaaggagctgaccatcctcgacaccattccgctgacgagcgagaagaagctcgacaacatcaacgtgctgtccgttgcgccggtattcaccgaagccatcgctcgcatctacgaggagacctcggtttccaccctgttcgactaaaaaacagccgaaaaccgaacatcaaccgggagctgctgccttgtgcagcggctccttttgcatttatgaagggaaagcctatgaaaattttaaccatcggcgatgtcgtcggcgaagccggacttgacgcgctgcatgcgctgctgcgcaggataaagcgcgacaccggcgcggattttgtcatcgtcaacggcgagaacgccgccgggaacggcgtgctgccgcggcaggcagaggacatctttgacgccggagcggatgtggtgacgctcggcaatcatgccttcggcaagcagcagatcgttccgtatctcgacgagcacagcgacatcctgcgtccggccaacctcgcgccgcagagcccggggcagggctggggcatttttgacggcccgcagggcagccgcctgctcgtcatcgatctgatcggccgctgcgatatgaaatacggcccggacaacccgttcctgtgcgtcgaccgcatcctcaaggaaaacgagggcagatatgacgtcgcgctcgttgagttccacgcgaacgctacgagcgaaaagctcgccatgggatattacctcgacggccgtgtttccgccgtctggggcacgcatacccatgtgcagaccgcggacgagcgcgtaaaccccaaggggaccggctatatcaccgatctcggcatgaccggcccgtatcattccgtgctcggcgtgcgtatcgagcagtccatcgccatgttccgcggcgatctgaccgagtatttcaagaccgcgccgggcgactgcgcggtgtcaggcgcggtgttcgacatcgagcgcggcggaaaatgcgtatcggtcgagcgggtgtggaaggaatacaaggtccgctgaggctgtgcgcagatgtgcattcccgcggacaagtgtccgtgacaagaaagcactcgaaatatagaatacttttgtacattctgcaagaagttgaagtggaacttgcaaaattgcgcaaaatcggttgacgagaccgagggttttgcggtatgctatatacgaacaacaatgggccttaggtgctgaccgccaaggctatggacagcatcgggagctgttttgggaagagcgcttccggtgtgtaaggaggaatatactgatgaactcgctgctcaagaaattcacgttcacagaggaactgaccgacgtgatcgaaaattgcaagggcgtttccgtgccgaccagcaaggcagagctgtacgacatggtattcggtcccgagcatgctgatgtgtacgacgttgtatttgacgtacccggcaagggtctgttcaaggaagcggacgttgtccgctgcaagaacggtgcatccgttaacttcaccgaggactatatgcgccgccgcgagccggactgcatgcgcatcgcggacgacaagccgaccgacaaaaagcgctttgctgacgtttacggctacaagttcgacaagctgcgtcaggagaccatggaatggttcaagacgcaggagcttattctgatgccgttcaattccggcggcaacgaatacggctacggctccatgctcgtctgcccgaagcagtgcgcatttttcgctttcgcactggcacatcttcagggttttgtcaacgctgaggagaccgagggctacaagccgcgcgccatcatctacgttgcgcccccgttccgtcacacccatttcgagggcaagcaggtcgttgtccacaaccgtctggacgactgccacgaagtattttcctacaacctctatccgggtccgtccgcgaagaagggcgtttactcggttctgctcgacatcggcgagcaggagggctggaccacctgccatacctccgcaggccgcctgatcacgccatatgagaacgagctggtcatcatgcacgagggcgcctcgggcggcggcaagagcgagatgcttcaggacatcgcgcgcgagccggacggcgaggtcctcctctccaccaacacggtaacgggcgagaagacctacctgcacatcggctccacctgtaagatcgagccggtatgcgacgatatggcgacctgctatccgggcgtgcagaacaactccggcaagctggttctggtcgatggcgaggacggctggttcctccgcatggacggcgtaacccactacggctgcgatccggtttacgagcgcatctgcaccgagccgaaggagccgctgtgcttcttcaacatggaaggccatccgggcgcgaccctgctgatctgggagcatacgctggactccaacggcaagccgtgctccaacccgcgcgccatcgtgccgcgctgggatgttccgaacatcgtcaaggagccggttgaggtcgatgtacgctccttcggcgtccgtatgcccccttccacccgtgacaacccgaactacggcatcatgggtatgctgcacatcattccgccggcactggcatggctgtggcgtctgatcgcgccgcgcggcttcaacaacccgtccatcgtcaccggcaatgagctcaagagcgagggcgtaggttcctactggccgttcgcgaccggcaagcgcgtcgcacaggcaaacctgctgctgcatcagatcgttgacagcccgaacacccgctatgtgctcatcccgaaccagcacatcggcgtatacaaggttggcttcgcggctgaatggatctcccgtgagtatctggcccgccatggcggcgccaagatccgcagagagcatctggagccggcgcgctgcccgctgctcggctacgcgatgaaggatctgaccatcgacggtcagaagatccgctccaagtacctgcgcgtcgatacgcaggatcgcgtaggcaccgacggctacgacgcaggcgcgaagatcctgaccgatttcttccgcaaggagctggcaaagttcgatacgccggagctcgatccgcttggcaagcagatcatcgactgcttcatgaacggcggcaagctcgaggacttcgaggcgatcactccgaccggcctttaatagacatcaaaaaagagagactgaaaagtctctctttttttgtcggcgcagctgacgcttcaccgatgatctatgtcttgtctgcgcgagcacggacgtccgaaagtccccgtgcggaggctttccccctgtaaaagcacgaaaaccgaggcgcattgccccggttttccttttttatgcgttgccgtatcgctcggcgagctgctggctgatgaactggcgtgcggtgcgcggcgaacggccgttgcggcgcagcgcaaagcgctcagcgagcaggtgcagctcgtcccgttcgagcgcaagaccgctctcgtcggcgagctgctcgacgatgtacagatattcgtccttgtccggaacggagaaggtgatctcgagaccgaagcggtcggacagggaggttacggtttcgagcgtgtcgcgaacgcggacgtcatcgccctggcggtcggccatgctctcgcggatgaggtggcggcggttggaggtcgcgtagatgacaaggttggacggcttgccggcgagaccgccctcgatgaacgccttgagggccgcgaaattgtcgtcctcacggtcaaaggtcaggtcgtcgaggaatacaataaagcggaacggcgagcggagcgtctgctcgaacagtttggggaagcaggtgatatggcgcggcgacatctggatgatcttgaggccgcggtcggcgtactcgttggcgaccgccttgacggtcgaggatttgccggtgcccttgtcgccgtagagcaggatgttgttcgcgtccttgccgtcgaggaaggcgcgggtattctggagcacctgttttttctggcgttcgtagcccggcaggtcatgcaggcggatggtgtcgggatggacgatcgggagcgccgagccgtcgtcctgcatggagaacgcagaggactgcgcgaaaaagccgtagccctcgcggcggtagtagccggcaagctccgtgccggtggtgaacggaagtgcggcggacggcgcgaaatcgggcagcgaacgcagcgcatccgcatcaaaatgcagagctgccgcctcgcacagctgactgccggagagagcgagcaggccgttcagcacctcgatgtcgtgggtcgcggcggcaagcagagcatctgccggggcgtcgatcgtgtcggtcagcgtgttgacgtcaaagtggaccgcgttcagaaaggagcgggaaatatcgccgcaggcgaagcgtgccgcgcacagcgcgccgtagcggtccgcgaaatcggccgcagagcggtcaaaggcggaaagcgtctcggcgtatgcgttcacgagcgggagcctgagtacgccgcgcagaacggaaagcgcgtgcagacgcagagaaaggtcgaaaagttgcatgggtgacacctctttatatattttgcgttgcttttaggataacacacccggacacggttttcaacataggatgaaagagaaaagttcacgtgcacggaaaacctgaatgcacggaaacatccacaggctgtggacaacgggaggcgctgatatgaattttgctctgctggtctgtcgcggacagaccgaggcttcggggatgcagcatcagctcgggcggctcggcattcctgcggaggtagcaaggccgccgcgtcacgcacgcaccgaatcctgcggctgggcggtgcgcatcgaggcacggcagaccggggaagcgctcgcgcggctgcgcgtgctggggatcgtgccctgccgcatagaatacgagggggagagaggatgaactatctggacaacgccgcgacgacgctcgtcaagccgcgtgcggtcggggaagcggtgcatcgtgcgcttacaggcgccgccgggtacgcgaggggcggctatgcggcggcgcagcgcgcaggagacctcgtgtacgactgccgcgagcaggcggcggcactgttcggcctgtacgacccgtcgcgcgtcgtatttacgcagaacgccacgcacgcgcttaacatcgccatccatgcgctcgcaaggccggggatgaagaccgcggtgagcggcttcgagcacaacgcagtcatgcggccgctcgcgctgcacggcatcgccccggccgtactgcacacgccgctctggcagccggagcgcatggtgcaggaggtcagaagggcgctcggggaagggacggagctgttcatcctgaaccacgtttccaacgtgttcggcgcggtctgtccgctcgacgagatcgggcggctgctgagtgcggccggcgtgccgctcattctggacgcctcgcagtcggccggcgttctcgagctcgatgtctcgcgccttccctgtcttgcggcggtgtgcatgcccggccacaaggcgctgtacggcccgatggggacgggactgctgctcgcgctcgatgaccggctggcgtcgcgtccgctcatggcgggcggcacgggcagtctgtcggaaagcatgaaccagccggattttctgccggacgcgcaggagagcggcacgcccaatgtccccggcatcgccgggcttgccgccggtatccgcttcgtgcgctcggtcggcgcggcgaacatcgccgtacatgagagaaagctcgtgcgcgagctggcccgggcgctcgaaacgaacgaaaggctcgaggtattcagccatccctcgcagaccggcgtgctctcggtccgcgtcaagggcgttcctgcggagcaggctgccgcgcagctggcggacgcaggtatcgccgtgcgcgccggccttcactgcgctccgctcgcccaccgcaccgcaggcacggaggagaccggcacggtccgtctgtctttctccttttattcgacgccggggcaggccgagcaggcggccgaagctttcaaattggtaaaaaaattgtgaacgcgctatacagaaagaaggatttgtgatacgataatatcagtatggccggacggggatcgaaaaaggaaaaccgcagcggcctgctgtgatttttcaaaacactgccccttcctgtgcgcaggggcagcggcataaaagggacaggagactttatgagtacatttcatacattgttttcccaggatatcgggaggctgaactggagaacggtgctggactcgtttttcagcgcgttcaaccagttccgcaccatatccttcattgatattctcgatatactgatcgttgcgtatattatctaccgcgtcatgaagctgctcaaggacacgagcgcagagcgcctgatcaagggcatcatcatccttgtcggcattatgctgctggcgagcatgctgcatctgactatgatctcgtggctgctccagcaggcgctcaatgtcggcttgttcgcgatcgtggtcgtgtttcagcccgagctgcgccgtctgctcgagcagatcggcaagggcaacttcagccggctgatcgtgccggcagacgcaccggacgaggtcgagagcatgatcaccgcgaccgtttccgcctgcgcggatatgtcgcgcaccaagaccggcgcgctcatcgtgttcgagcgccgcgagcgtctgggcgagatcatctcgacgggcaccatggtcgatgccgcgccgtccgccgagctgatcaaaaacatctttttcaagaatagtccgctgcatgacggtgcgatgatcgtgcgcgcaggccgtgtctgcgccgcaggctgcgtgctgccgctctcgggaaaccagagtctgtcgcgcgatctcggcacgcgccaccgcgcggcggtcggcatgagcgagagcgcggacagcgtgctcgtggtcgtctccgaggagaccggctcgatctcggtcgccatcggcggcatgctcaagcgccatctgtcccccgatatgctgcgcaagctgctcgaaaacgagctgctcgacagcgaaaagcaggaaaagagccgccttgccgcgattcgtgatatgtggaagggaggcgcaggcaaatgaagaacattctgaagaagcatgatatttcgctgcgcctgctctcgctgctgctgtcggtcgtcctgtgggcggtcgtcatggacatggacaacccggagcgtccgcgcacgttcgacaacattccggtgcgcatcagcggcgcagcggtgcttcagcagcagaccggtctctcgcttatcgagggcgccgactcgacggtaaagatcacgctgcgcggcccgagcaagacgctcggcgacatcaaggcgagccagatcgcggcgtcggtcgatatttccggcctgaccgaggcgaacgagtatgatctgccggtttcggtcacggtcagccgctccggcctcgaggtggaatacatctccccgtccaaggtgcatgtgcgcgtggacaaggtggatacgaaggacattccggtcgatgtgaacgtcacgggcaccccggcggacggctgccgcgccggcaagccgacctcgccggtcagcaccatcacggtgcagggcccggcggccgagcttacgaacgtggccaaggcggtcgcggtcatcgacgtgacgggcgcggagtctacgctgaccaatatcgaatgtccggtcacgctgtatgacagggacggcacggtcgtcgcctcgcagcacatcacgagcaagaccgagaagatcaaggtcacggtgccgatgtacaacatcgacacgctgccgctgaccgtcacgctcaaggacggcggcaagctgactgcgcatcaggtcaagtacagcatcaatccggagagcgtcaaggtcgtgacgagcgatcaggcgtccctcggcgacctcaaggagctcaatctcggcgagatcgatctgggcagcgtgcgcacgggcgtgccgatcgagctgtccatccgcgacaagctgccggagggcgtttcgctcgaaaacggtcagccggacaaggcaaaggtgacgataaccgtagacggcatcgcgacgcgcaaggtgcaggtctccaagttcgccccgaacgatacctcggcggacaccacgccgtacagtgtcaagatcctcaccggctcggtcgagatcgagctgcgcggcaacgagagcgagctgcaggaggtcgcgaccgacagcctgtcgatcggcctgacgttcgactcggtatcgctcggtaccggcagacacaaggtcaagggcatcgcggcggccatcggtctgccgagcgacgtaacgctcgtggaagaggacatcgaggtggaaattcagatcacagaggacggctcgggcggagcggacagcggttcctccggctggaccggcgaaaacggggaggacggcgaatgagcctgcttgtgaccggcatccggctgccgtttgacgagccggagacggcggcgctcgacagggcacgccgtctgaccggactgctatcttcggagaccgaggctgcggtgtgccgcgtcagcatcgacgcgcgccgcggccagatctcccgcgtatattcggtgcgtctggacgcaccctgcgacgagaaggcacttgcggaaaagctgcagatgccgtctgtgcgttataaggaaaatgtaaggcctgccgttccgcacggcgaaaagcgccttgcgcaccgtccggtcgtcgtgggtctcggccctgccggactgttcgcggcgtacacgctcgcccggcacggcttccgcccgatcgtactcgagcgcggcggcgatatggacgagcgcgacagggcggtagatacgttctggagcggcggcgcgctcgacccggactgcaatatccagttcggcgagggcggcgcgggcgcgtactcggacggcaagctgaccacacgcatcggcgatgcgctgtgcgagaccgtgctcgaaacgctcgccgcgcacggcgctccggcggacatcgtgaaaaaggccaagccccatgtcggcacggacatcctcaaggatgtcgtgcgcgagatgcggcgcgagatcgtgaagaacggcggcgaggtgcatttccgcacggcgctgaccggcgtttcactgaaaaacggcgcgctgaccgccgtccgcgcggacggcatggacatcccctgcgagcgggcaatcatcgcggtcggccattcggcgcgcgatacgttccttgcgctgcatgaaaacggcgtttacttcgagccgaaggcgttttcggtcggcgtgcgcatcgagcaccttcagagcgagcttgaccgggcgctttacggaaaattcgccggtcatccgctgctgccgccggcagaatacaacctgtcgcggcgcgcggacggacgcgcgtgctattcgttctgcatgtgcccgggcggcgtggtcgtcgcggcgcagagcgagcaggatacggtcgtgaccaacggcatgagctatcatgcgcgcagcggcaaaaacgccaacgcggcgcttgccgtctcggtagaccccgaggatttcgagaacggaacgcccttcggcggcgtggcgctccagcgtcagatcgagcacgcggcgtatgcgcagacgggctcgtaccgcgcgccgtgtcagcgcgtgggcgatttccttgcggacaggccgacgaaaagtctcggcgcggtagagccgacctatccggtcggcgtggagccgggacgcgcggcggcgagcctgccggatttcgcgcagactatgctgcgggacagcctgccgtacttcggcaggaagatccgcggctatgacgcggcggacgcactgctgaccggcccggagacgcggacctcatccccggtacgcatgaagcgcggcgaggacctgttcggcctcggcatcgccggactcattccctgcggcgagggcgcaggctacgcaggcggcatcatgtccgccgcagtcgacggcatccgcgctgcgttccgcatcatggaagaatataaaccagagtaagcaattaccagagtgaaaataaggactgaatcaaaatgacccaacagggaactatcaaaaagctgctccccggcggcagggcagaggtcgaggtaacgcgccgttcggcgtgcggccatgactgcgccaagtgcggcggctgcggcggtctggagacccagacgctctacgtcaccgcgcgcaaccataccgatgccggcatcggcgaccgcgtgctcatcgagggcgagaccggccgcgtgctcggccttgcggcgctcgtctatatgctgccgctcgtgctgttcttcatcggctacgccatcggcaatgcggccggcggcggtgcggccggtgcgctcgccggcggcgtgctgttcgcgctcggcatcatcggcgcgatcttttacagcagaaggatgaagcagaacggcgaagtcccgttcgagatcacgcacaggctgtaaaaaaaacgaaattatgcggaaaccgggagaatgatctcggttttcgtgctgtgagagggaaaacgtgcggccccgcgaacggaaatgagccatccggccgcatgaattctctgaactttttatgaattttcgccaattttccgtgttcgcccttgtcatatgcgcgaaagttcggtaaaataaattgataccgcgagaaggtcagtattgtcacgagcactaagtggaaaattatggcttgcctcgcggaaattctgctgtcgaaaagacggcgcgaaagggttatgcgatgtttggctttatccgaccggtgaagtccgagctgaaggtgaaagaagcggaccgcttccagcaggtgtactgcggtctgtgccacgccatccgcgcacggtacggccggttctatacaatgtttctcagctatgacatgaccttttacgctcttgtcgtcggcagcggcgagacgccgaaggcacagaccgagcgccgccgctgcgacgcgcacccggtgacgaaacgggtctgcgccgcgcccgatgacgcgctcgcgctcgcggcggatgcgagcgtgctgctgagctatcataaattccgcgacaatcttgcggacgaaaagggcgcaaagcgcctgctcgccgccgtgctgtgccgccttggacggcgcggctacgaaaaagcgagggcacgcctgcccgaggccgaccgcgacatccgcgcggcgctcgatgagctgcatgtactcgaaaccgaaaactgcgcttcgatggaccgcgcagcggacgcttccgcccggatgacggcggcggtcgtgccgcatacgggcgacgcacgggagcgcgttctccggcagatgttctaccatgccggacggtggctttacctgctcgacgcggcgcaggacgtcccggaggacatgaaaacgggcgcgtataatccgctcgtgcagcgctacgcgctgaaaacgcccgacatcacagacataaaacaaccgctggagcgcacactggagcggtcgctcgccgacgtatgcacggccttcgaccttctggatgcgcagcgcgatgcggagatcatccgcaatatcatttttcttggtatgccgaccgtgacgagacaggtgctcgacggcacataccaaccgaacggaggcaggggaaagcatggatccctataaggtactcggtgtaacgccgcagacgagtgatgacgatgtaaaacgcgcctatcgtgagcttgcgcgcaagtatcatccggacaactatgtcaataatccgctcgccgacctggcagaagcacgcatgaaggagatcaacgaggcttacgatacgatcatgagcgagcgctcgggcaagacgggcgccggtgcgggcagcaccggtcagagctataatggtcagacctacggccagagctacggcggccagcggacctatgccggcccgaacgccgcgctctatgcgcaggtgcgtcaggccatcaatcagggcaacctcaacatggccgagagcctgctcacccgcgcgtccggccgcgacgccgagtggttcttcctgaccggtacgatctacgcacgcaagggctggtacgatgaggcgcagcgcgcctacatcagggcctgtgagctcgacccgggcaacgcggaataccacaacgcgctgaacaacctcaacatgaccggcggctacggcggctaccgtccgatgcaggagatgagcgcctgtgattactgcgttcagctcgccatctgcaactgctgctgcaatacctgtctgaatggctgctgcgcaggaggcggctgctgatatgaacacacgggaaattgcgcgcggcggactgctcgcggggtttgccgtcgtgctgctgtatatcggcggactcattccgcaggcagcgcctgcgctgtgcatctcggccggcgtcgtatccgcggtgccgctcatccgcagcttcgcgctgcgcacctcgctcaccgtctatgcggcggtgagtgcgctgtcgctcatgctcgtgccgagaaagagcgtcgcggcggcctatatcgccgtctgcggcctgtatcccattgtaaaatacctcatcgagacccgcgcacgccccggcgcacgcatggcgctcaagctggcatatgcgaatcttgtgctcgccgtgctgggtacgctcgtctcaaagggcgcgttcccgcagctggaaatgcccggatttttcgcgctcgcggcgttctggttcgcggcgaacatcggatttgccgtttttgatgccgtcctgacgcgcttcatccgctttgtgcggcggtatctgccgaaaatttgactgttccgcatggaaatgcgtttatattacatggattttcctgagggggaagagataaaatgaagagtatgaccggctacggccgcgcgcgacaggtgctgcatggacgcaccgttaccgtcgagctgcgcgccgtcaaccaccgctatctggactgcacggtaaaggcgccgcgccagttcggctttttggatgacgccgtgaagaaggcggccgccgcgcgcatcgcacgcggcaagaccgagatctatgtcagcgtcgagaccgacgagggcggcgatctttccgtcacggtaaaccacgcgctcgcagagcgctatctggcagcgctgcgcgagctgtccgaaatgtacggcctgcgcgacgatgtgaccgtcatgagcctcgcaaagctccccgatgtgctcggctcggagcgcatcgagcaggatgcggacgagctgacgcaggacgttctgaccgtatttgccgaggcctgcgacggcttcgaccagatgcgtgagcgcgagggcgaaaagctcgcggaggacgtcagaaaccacgcctcggtcatcgagacgctggtcggcgaggtcgagaagcgctcgcccgagcgcgtcgcggagtaccgcgaaaagctgctcgcgcgtatgcgtgaggtgctcgagagcacggacatcgacgagacgcgcatcgtcaccgaggccgcgatctacgcggacaagacggcggtggacgaggagaccgtgcgcctgcgcagccatctgcatcagctcgacggcatgctgaacgaggtaaagcccgtcggccgtaagctggattttctggtgcaggagatgaaccgcgaggcgaacaccatcggctcgaaggcgaacgatgtcgagatggcgcagaccgtcgtgaacatcaagagcgagatcgaaaagatccgcgagcagattcagaatatcgaataaaatatcgtatcaaaccggctgtgccgtctgaaaaacgcggcgcggcatgagaaaagggggcagaccgaagtgaagctcatcaacatcggcttcggaaacatggtggcggcgtcgcgtctcatcgcgatcgtcagcccggattccgcgccggtcaagcgtaccgtacaggaggcgcgcgaccgcggcatgatcatcgacggcacctacggccgccgcacacgcgcggtgctcatcatggacagcgaccatgttgtgctgagcgcacttcagcccgaaaccgtcgccgcgcgcttcgccggcgacaccgaggaaggagcaacagaggatgcgtaagggaacactgtatgttttcaccggcccgtccggcgcaggcaagggtacggtgctgggccggctgcttgccgaggacgaccggctgtttttctcgatctccgcgacgacgcgcgcgccccgtccgggcgagcagaacggcgtgcactattatttccttgaaaagacggatttcgagaaccggatcgcgcagggcgcgttcctggagcacgcacagtatgtcggcaactattacggcacgctcgaggcgccggtcaacgaaaagctcgacgagggctttgacgtcattctggagatcgaggtgcagggcgcgatgcagatcaagaaaaagcgcccggatgccgtgatggtcttcatcgcgccgccgtccttcgaggagctggcaagccgcctgcgcggccgcggcaccgaggatgaggccaaggtgcagaagcgcctcgagaccgcaaagggcgagctggagcagaaggacaggtttgactatgtggtcgtaaacgacacggtagaccgcgcggtagacgagatcaagggcattctcgcctcccgtcgataacactggcaatcacagataaaattatacactgggtaatataaggagatttgattacaatgctgaacccttcgatgcaggaactgatgaaacgagtaggcaaccgctatctgctggtcaatctggccgcacagcgcgcgcgcgacattgccgacgaggcggagcagagcggcgtgccgctgaccgacaaggcggtaaagctcgcgctcgatgagatcgcagccggcgagatcgtttatcgtccgggtccgcgcgtagagccgatcaagaccgcaaacaacccgatcgccgccgcaatggtagacgttgacgacgacctcgacgacgaggagcgcgcgtcggactccgacgaggagaatgaggacggcgaaacgacggtttcccgccgccgcatggacgagttcgatgacgaggagctcgacgacggcgatattccggaggaggaccgctaagcgatgcgctttgcaggaaagaccgtcgttctgtgcgtgacgggaggcatcgcggcgtacaaggccgccgacctcacgagcaagctgcatcagaacggcgcggaggtgcgcgtgctcatgaccgagtctgccgcacagttcatttcgcccatgacgttcgagacgctctcgggcaaccgggcggtcgtcgataccttcgaccgcagcttcccgtgggaggtcgagcatatctcgctcgccaaggcggcggatgtgttcgtcatcgcgcccgcgaccgcaaacgtgatcgccaaggcggcgcacggcatcgcggacgatatggtgacgacgacgctgctcgcaaccaaggcgccggtcgttgtcgcgccggccatgaacaccggcatgtatgacaacccggtgacgcagagcaatctggaaacgctgcgcggccgcggcttccatatcatcgacccggcggcaggccatctcgcctgcggcgacagcggccgaggcaagctgcccgacacgcagaccctgctctggggcatcgaaaaggcgctgaccgggcaggatcttgccggaaagcacgtgctcgtcaccgcagggccgacgcaggaggcgatggaccccgtgcgttttctgtccaaccactcgaccggcaagatgggctacgccatcgcgggccgcgcggcgatgcgcggcgccgaggtcacgctcgtgtccggcccgaccgcgctcgacacgccgaagggcgtgaaccgcgtggacatccggtcggcgcgcgatatgtacgatgcggtcctgtcccgcgccgcgcagcaggactttatcatcaaggccgccgctgtcggtgattaccgcccggcggagaccgcagacgaaaagctcaaaaagggcgacggcgagctgaacatccgccttgcgcgaaacccggatattctggcggcgctcggcgcggacaagcggccgggacagcttctgtgcggcttcgcgatggagacgcagaacctgctcgacaacgcggagagcaagctgcgccgcaagaactgcgatatgctcgtggcgaattcgctgcgcgacaagggcgccggcttcggcacggacaccaacatcgcaacgctcctgttcgcggacggacaccgggaacagccgtccatcatgagcaaggcagacctcgcggacctcatcctcgaccgtctgctcggcatgagccggagataacagactgcaagggcggagtgaccggctccgccttttgcggcataaaccattatatacagcaggaaaggccgtgacgatccttggcggaaaccatttgtgctgtcgctctggatgcggcgacctacgcgatcgacaagttatattcttaccgtgtgccggacgagctgcgggaacaggtgcagatcggcacccgtgttctcgtgccgttcggctttggcaataaacgggcagaaggcgttgtgctcgcctttcgcgaggacacgggcgaataccgcctcaagcctatcgtggaagcgctcgatgagcagccggtgctgacgcaggagcagctgaagctcgccgcgtggatgcgcgagcggctgtactgtacctacttcgactgcgtgcgcgccatgcttccggccggactgtggttccggcggaacgagatgtacacgcttgccccggacgcagacccggcggcgctgcacgcgcgcgagggcgaggaaggcgaggtgctgcgcctgttcgacacggcggggcagacgctttcgctcgccgagatacgcgaacgcctcggaaagggcgcagggcgcacgctcgatgcgctcgcgggtgaggggatcctcgtctatcacagcaacaccgtgcagaagaccggcgataagaccgaaaaaatgctcgcgctcgacatggagtccgatgaagcaatgagccgggtgcggcgcagcgccgcgcggcaggacgtcgtttccgcgctcgcggacggcatctggatgagtcagaaggagctgtcctatatgacgggcgcgagcgacgcagccctgcgcgatatggtaaagaagggcattctgcgtgtgcgctacgaggagcggatgcgtgcgccggacttttccgatgtgccgcgcgcggcgctccctgtgctctccgcgcagcagcaggaggcatatgacggcatggccgcgctcatggatgagccgaaggcgcaggccgcgctgctgttcggcgtaacgggcagcggcaagacgcaggtctatctgcgcctgatcgcgcacgcgctcgagaccggaaagagcgccatcgtgctcgtcccggagatcggactgacgccgcaggtgctgcggcagttcgccgcacaattcggcgatctggtcgcggtgctgcattctgcgctgtctgccggagagcgctacgacagcttcaaaaagatcaagaccggccgcgcgcgcgtcgtgatcggcacgcgctctgcggtgttcgcgcccgtgcgcgacctcggcgtcatcatcatcgacgaggagcaggacggcgcgtacaagtccgagcagagtccgcgctaccatgcgcgcgacgtcgcgaaataccgcgccgtgcaggaggacgcgctgctcgtgctcggttcggcaacgccgtctgtcgagacatattatggcgcgaaacagggaaaatacccggtattccgtctgaccgagcgcttcctcggcgcaggcctgcccgaggtgcttatctcggatatgcgcgggcagacacgagccggacgctcgggcgtcatcggcgctgacctcgagcgcgagctgctcgacacgctcgaccgcggccggcaggccatcctgttcctcaaccgtcgcggcaacagccgggtcatcggctgcgcgatgtgcggctgggtgcccgagtgcccgcactgctcgacgaacatgacctatcattcggcctcgggccgcgcgatgtgccactactgcggcgcgtccgtcaagatcacgggtacctgcccggtctgcggcggcgaggagctgttcaccgagacccccggcacgcagcgcgtcgagcaggagctgaacgagcgcttcccggatgcgcgcgtgctgcgcatggacgcggacacgatgaacaccaagggggcgcacgaaaagctgttttccgcctttgcgcgcggcgaagcggacatcctgctcggcacgcagatggtcacgaagggactggatttcgaaaacgtgacgctcgtcggcgtgctcgacgcggaccagagcctttacgcgcaggattaccgtgcgagggagcgcacgttttccctcatcacgcaggtcgtggggcgtgccggacggcgcttcgacaccggccgcgcggtcatccagacctacagtccgacccatccggtcattctgaccgcagcgcggcaggactacgaaaaattctatgaaagcgaaatggaaacgcgcgaggcgctgcgctgtccgccggtctgcgcgtttacggtgctgaccgcggcgggcgaggtcgagcagcaggtactgaaaagcctgctcgcgctcaaaaaccgcctgctcagcctgatggaaggccagtatgcggacgtaaaagcgcccgttctggggccggcggcggcgcaggtcgtcaaggtcatggggcgttaccgctaccatctgaccatgcgcgcgagagacagcgcgcggtttcgcggtctggtctcgggcgtgctgcgcgagttcatgctcgacagccgcaaccgcggcgtgaccgttttcgcggacagcaacccggatctgtaagcggaccccggacttctatttcattgatcccggcaaggagcgatacccatgagcaagttcattattcgcagagcgaaggcggaggacggtgcggcgctctgcgcgatctacgcaccgtacatcacggacacgaccatcacgttcgagtacgaggtgccgacggacgcggcgttttccgaccgcatccgcgagaccgccgcgcagtttccctatctcgtgtgcgaaagggacggcgagatcatcggctacgcctacgcgcaccgcatccgtgagcgcgcggcgtacgactgggatgcggagctgtccgtctacctgaagcagggtacgcacgggcgcggcatcggcacggtgctgctcgcctgcctcatcgagctgctcgagatgcagggccttcgccatctttacagctgcgtgaccatgccgaacccgagaagcgtcggcatgcagcacaggctcggctttgaggatgcgggcgtctggcataaatccggttggaagttcggcgcatggcacgacgtcgcgtggtttgaaaagcacgtgggcgggggcgagccgaagccggtcgttccgtttcccgagcttgacggggacaatatacagaaaacactcaatatctacacagaaaagctgaatttggaggataaataatcatggcacttcgcaaaattcttaccaagggcgacgaacagctggcaaagcactgccgtccggtcgaaaagttcgacgaccgtctgcatgtactgatcgacgatatgcgcgagacgctcgaaaactcgggcggcgtcggccttgccgccccgcagatcggcattctccgccgcgttgtcgtgctgctcgacatcaacaaggacccggaggaaatggtcgagcttgtaaaccccgaggtcatcgagcagcgcggcgcggagcgcgtcgtagagggctgcctgtccgttccgggcgtttacggctacgtcacccgtccgacctgggcaaagatccgcgcacaggaccgttacggcaactggttcgagcgcgagggcgagggcgtcgttgcgcagtgcttctgccacgaaaccgagcacctcgacggccacctgttcatcgaaaaggtcgaggagtacgttgacgttgagatgccgcaggagggcgaggaataatgcgcgttgttttcatgggtacgccggatttcgccgtaccgagccttcaggcgcttctggacgccggacatgaggtcgcggcggtctacacgcagccggacaagccgcagggccgcaagcagatcctgaccgcgcccccggtcaaggagctggcgcttcagcataacattccggtctttcagccggatacgctcaaaaaagaggaggagcaggcgcgtctgcatgagcttgctcccgaggtcatcatcgtcgttgcctacggcaagctgctgccgaaggccgtgctcgacattccgccgcgcggctgcatcaacgtccacggctcgctcctgccgcgctggcgcggcgcggcgccgattcagtgggcggtcatcgcaggcgacgagaaagccggcgttaccaccatgctgatggcggagggactggacaccggcgatatgctgctgacctgcgagacgccggtcggcgcacgcgagactgccggcgagctgttcgaccgccttgcgcagtcgggcgcggaacttttgaccgaaacgctcgtcagactggatgagatcacaccgcgtccgcagaacgacgcggaaagctgctacgcgcatatgctcgacaagaagatggcggtcatcgactggtcgaagtccgcgcgcgagctcgactgtctggtgcgcggtctcaatccgtggccgatcgcgctgaccagccttgcaggcgagcggctcaagatctatgcggccgagcagacaaacggctgcggcgagccgggcacagtgcttgaggccgacccgaaaaagggcctgacggttgcgtgcggcgagggcgcgctgacgctgaccgaaattcagctcgtcggcggcaaacgcatgaaggcgaccgatttcctgcgcggccatgccgtcgaaaagggcagcagactgggcgagtaatcccagcaatcaagggaggtttttccatgccgtatatgggttattacggaattgatatgtactatatcgtgctggtgctgccgtgcgtgctgttcgcgttctgggcgcagtcgcaggtcaacggcacgttcaaccgctactcgcgcgtcatgagccgccggggactgaccggcgcgcaggcggctcaggccgtgctgcgtgcaaacggcgtgtcgggcgtcaacatcgaatatgtcgccggaaagctgaccgaccattttgatccgcggacgaacaccatccgcctgtccgcgtcggtctatcagtccacctcggtcgcgtccatcggcgtggccgcgcatgaggcgggccatgcggtgcagtatgcggtcggctattcgcccatccgtctgcgcaacgctatcgttccgctgacgcaggtcggcgcgaccgccgccatgccgctcattctgatgggtctcgtgctgaatttcggtgtgctcatcaaggtcggcatcatcgcgtttgcgctttcgaccgtgttccagctcgtgacgctgccggtcgagcttgacgcctctcaccgggcgctcgaagccatcggttcggcgcgtctgctcgatgaggacgagtacggcatggcgaaaaaaacgctgacggcggctgcgatgacctatgtggcggcgcttgcggtatcgctcgcgcagctgctccgactgctgctcattttcggaggaagaaaccgcgatgatcgataaaagacccaaaacgccgcgcgaggtcgccgctttttcgctgttttccatggcggaggagggcgcgtggtcggacggcgcgctgcatcattatctctcccgcgccggtctggacggccgggacgctgcgctcgccgcgcgtctgacctacggcacggtgcagaacgagctgctgctcgactggtatctgcgcaggttttcctctctgcggcttaaaaagatcgcgccgcgcgtgctcgcgtgtctgcgcatgggactgtatcagctcattctgatggacaagatcccggcgcacgcggcggttgcggaaacggtatcgctcgtgcggcactactgccacgcgaacgaccgcacggtatccttcgccaacgccgtcatgcgcaaggcggcggaggcggtcgaaaagaacgcgctgccgcggctcgactgcccggacaaggagagctactacgcgctccggtacagccatcccgaatggctcgtgcgcctgctctccgagcagttcggtcagaagctgaccgagcgcatctgtcaggcggacaacgccgacacgccggtctcggtgcgcgtcaacaggatgaagaccacgccggacgaggcggaggccgagctcgagcgcgccgggatgacggtcacgccgcaccgcgcgttcgcagacatcctgctgtgcacgggcggcgacgcggccgcgactgaggcgttccgtgagggacgcatcaccgtgcaggacgcggcgagtgcgctcgcggcgttcgtcgccgatccaaagccgggcacggccgtcctcgactgctgcgccgcccccggcggcaagagcttcgcgatggcggagaaaatgcaggggaagggcagcctgacctcgtgcgacatctacgagcacaagctgaagcgcattcaagagggcgcggcgcgtctcggtctgccgaacatccgcaccgagcttcaggacgcctccgcgttccgcgcggagtgggcggagagcgcggataccgtgctgtgcgacgtgccgtgctcgggcctcggcatcatccgcaaaaagccggaaacgcgctacaaggacccggacgagatcgcaaagctgcctgctttgcagctcgccattctggaaaactgcgcacggtacgttaaaccgggcggcacgctcgtttactcgacctgcacgattttgcagcgcgagaatgaggacgtggtgcgtgcctttctcgcggcgcatccggagttcgcgcccgcgccgtggtcgcatccggtctgcggcgggcgggcggacggcatggtgacgctcctgccgcccgagcacgacacggatgggttctttattgcgaaattaaaacggattggaaattgaaagagccatgacagaaatcaaatgtttaacgatagatgaattaaaatcggctttgaaggacatgggggaaaagccgttccgcgcaggacagatcttcaagtggctgcacgagggcgtttcctccttcgacgagatgagcaatctctccaaggagctgcgcgcacggctcgcggagaacttcatcctgaccgttcccgaggtcgcacgcaagcaggtaagcaaggtagacggtacggtaaagtacctgtggcgcatgcgcgacggcgactgcgtggagtccgtcctcatgcactacgagcacggcgtttcggtctgcgtctcgacgcaggtcggctgccgcatgggctgcaaattctgcgcgtccggcctgaacggcaaaaagcgcaatctttccgccggtgagatcttggacgagatcctgttcatgcagaaggacagcggcgaaaaagtctcgaatatcgtgctgatgggcacgggcgagccgctcgacaactacgacaacgtgctgaaattcctgcaccttgtcagctgcccggagggaattaacatcggacagcggcatatatccttgtcaacgagcggaattgctgataaaatagagacactggcaaaggaaaagcttcagatcacgctttcggtatcgctgcacgcgccggacgacgagacccgttcgtccatcatgccggtcaacgacgcctatcccgtggaacggctgatgcaggcgtgccggtattatttcgataccacaggccgccggatttcctacgagtatatgatggcacgggacaagaccgaccggccgtggcaggcggaaaagctcgcgaagctgctccgcggccggccgggccatgtcaacctcatcccgctcaacgaggtggaggaaagtccgctctcgccctcgaagccggagaccgtgcgccgctttcagcaggcgctcgaaaagcgcggcgtgaccgcgaccgtcagacgaaagctcggtccggacatcgacgccgcctgcggtcagcttcgccggcgcgagatgaaggagcaaggataacctgtgtctgaggaggcagaaggcaatggaatacttcggaattaccgataaggggcgcgtgcgtccgaccaatcaggatatttaccgaatcgaagcgtgcccggacagggacagcgcgctcgttctcgtgtgcgacggcatgggcggcgcgaacgcaggcaatgtcgcgagccgttttgcggcggaacgctttgtcgaggaggcaaagccggcgctcgaggctggtgcggacgagacgatgcgccacgagacgctgcggcgcgccctcgaccgggcgaacgacaccgtgtttggtctcgccggccgccagcctgagttccgcggcatgggcacgacgcttgtcggcgccttcgtgcagggcgggagcgcgagcatcatgaacgtcggcgacagccgcgcgtacatcatgagcggcggaatgctgcaccagatcagcgaggatcattcctacgttgaagaaatgcgccgcctcggccgcatcagcgaagccgacgcgcgctcccatccgcagaaaaatctgatcacccgggcggtcggcgtggatgcgacggtggagggcgacctgtttgagcagacgcttgcggacggcgacatccttctgctctgctcggacggcctgaccggcatggtcgaggacgggaagatcgccgaggtgcttgcgggcgcaggcacgctcgaagataagggccgggagctgctgaccctcgcgctcgagggcggtggccgcgataatattacggtcgcgctgtttacctgcggcgcgaaacaggaggcgtgaccctcatggaaaacgacaagtatatcggcaggctgctcggcggtcgctatgagctgatcgatgtggtcggcgtcggcggcatggcggtagtctaccgcgcgcgcgataccgtactcggacgatatgtggcgatcaagatcctcaaggaggagttcgccaaggaccccgacattcgcaagcgcttcgccatcgagtcccgtgctgtcgccaagctcagccatcacaatatcgtttcggtctatgacgtcggaaacgaggacggcacggattatatcgtgatggagctcatcgaaggcgtgaccctcaaggaatatttgcagcagaagggccgtctgtcgtggcaggagagcattttcttcgcagaacagatctcgagcgccctcgttcatgcgcattcgcgcggcatcatccatcaggacatcaagccgcagaacgtcatcatcctgcgcgacggcaccgcgaagctgaccgatttcggcatcgcgtccttcgcgacgacgcaggagacgcgcgtggtgcaggaggccatcggctcggtgcactatatctcgcccgagcaggccaagggcagcaagatcgactaccgcacggatatttattcgctcggcgtggtcatgtacgagatgctgaccggcaggctcccgttcgagggcgagaccgcgctccagatcgtcatgcagcatatcaacgccgtgccgccgatgccgagcgagctggtcccggacatcccgaagggactggacgccatcgtcatgcacgcgatgtgcgcgaacatcagcagacgctatgcttcggcggacgagctgtgcgccgaccttgcgcgcgtgcgcgaggacccggacacgcagttctattataccgcctcggacgacagctcgggcgagacgcaggtcatcggacgggaggtgcagcgcgccgcccgtcatgcggcagcggaggatacggccgccatcccggcggcaccgcgccgccgcagtgaaccgcacagcgcacgccgggaggctccggcgcgccgccgcacctctgtgcgcgagcgggagtcgtcggatttcttcgaaaagctgagcgagcgcccggcgatggctgccggcatggcggtcgcggtcgtcgcggtcatctcgctgctcgtcgttgcggtgctcatgttcaccggcggcagcaaatccgcgaaaatcgacgttcccgacctcatcggccgcacgatcgatgacgtttacgcggattccgatgtcatgaacaacttcgagatcaaggaagcctcctcgcggcaggaatccgaccgcccggccggagagatccttgaccaggaccccgacgagggccagcaggccatcaagggctcggtcatcaccgtcacggtctcggccggcggcgacaacgtcaaggatacctacaaggtggtcgactttaccggaaaatctctcgattacgtggcggcgtcgcttgacgcgcacggcatcgagctcaaggaagaaaaggaatacagcgacgacgtcgaggagggcaaggtcatccgcaccgaccccgaggccggcacggagcttgcgcgcggcgagacgctgacggtctatatcagcctcggcaaggagcaaaaatccgccgatgtgccgagcctgaccggcatgacgcaggaggcggcgcagcgtgcgctgtccgagcgcggtctgagcctcggctcggtcgatcaggtcgagagcgacaagccggagggcacggtcgtatggcagtcgatcgacgcgaacagctcggtaaatcagggcacgacggtcaatatccagatctccaagggcaaaaaggccgacgagcagaagccggacagcggcacgaccggcggcaacaccggttcgagcgaggacgacacgccgggcagacttccgcccacaccggcggaaggaagcgcgaccattccggtagcgctgcccgacagcgcggataccgcccatgtcgtgatctatgtagacggcgtcattcagtatgacgacactccatccaccagtcagggcagcatcgccgtcaccgtgcagtctacggccggcgaccatgaggtcacggtgagcgtagacggctcgtccacgacacagacgtacagtttcaattaaacgacacaaagggacgcaccgcacactgcgcggctgcgtcccttgcagaatgaggaaaggaagcgtatttttgaccgaaggcattattctcaagggcatcggcggattttattatgtggatacgccggaagggctgatcgagtgcaaggcgcgcggaaaattccgcaagaccgttgggaaacccattgtgggcgaccgcgttcagcttgaggtgcagccggacgggacgggctatctcatgagcatcgcgccgcgcagaaacagcctcatccgtccggcggtcgcgaacctcgaccttgttgtagcggtcgcgagcgccgcgcctcccgtgaccgacccgtttctcatcgacaaggtgacggccatcgcggtacacaaggagatcacgccgctcgtcgtgatcaacaagaccgacgcggacgcgggcgacgagctgtatgagacctaccggaagagcggtatcgaggtgctgcgcgtgagcgcgcggacgggcgacggcatcgacgcgctgcgcgagcgcatctgcggaaaggtatccgccttcgcaggcaactcgggcgtcggcaagtcgagcgtactcaaccgcctcgacagctcgttcggtgcggaggtcggcgcgatctccgaccgcattggccgcggccgccataccacgcgccatgtcgagctgcatcctatcgagggcggcggctatatcgcggacacgccgggcttttcctcgttcgagaccgagcagatggatctcgtgctggcgcgcgatctggaatacgcctttccggagttcgcgccctatctcggccggtgcagattcaccggctgcgcccatgtcaaggaaaagggctgcgccatccttgcggcggtcgaaaacggcgaaatcgcgaaaacgcgccatgaaagctatgtcaaactctatgaaagcgtaaaggatctgaaggaatgggagcttacgaagggcggcacgcgctgatctttgcagccgcgcccgaaacagattacagttacatccgcgcgttcctcggggagcatccggacgcgctcattgcctgcgccgacggcggtctgcgccacgcgcgcgcgctcggcctgcacccggacttcatgatctcggactgcgactccatgcccgagaccgagggagacgaggtcatccggctgaagcccgagaaggacgacaccgacacgcagtcctgtctgcgcgaggtgttccgccgcggctgccgcgaggcaacgctcgtctgcgcgaccggcggacgcatcgaccatatgctcgcaaatctctcgctgctcgaggaggcgcgagagatgggagggcgcctgaccatcctcgacagctgcaaccgcatcgttttgcatgagggaggacgggaaaaattcataatgccgtcagcttacaggtatttctccattgtgcctctggacgcggttctgacgggcgttacgattgaaaatgcaaagtatccgctcgaaaacggacgggtcacgcgcgccggcatggtttcgatctcgaacgaagcggcgcccggcagcagcttttccgtgacgatcgaaaaaggtgcggcgctcatcatctttgcgcatgaccctgcgcgccgcccctgaatttagactgtttccacaaacaaaaccgccctcgggggcggttttttctatctgaatatttttgcagtttttgcagcgcagacttgcaaaatcacaatgggaagcatataataaaaaatacagaagacaatttttttgagagatataagggagtgctgagcagtggcattgaaaccgatttccagaattgcagcgggtgtacaggcgtctacgacgctcgctatcgactcgctgttcaagcagatgaaggcagaaggcaaggatgttgtcggctttggcgccggcgagccggatttcccgaccccggagcacatcaagcaggccggtatcgaggctattgagaacaaccagaccaagtacaccccggccgcaggtctgatggatctgcgcaaggcggcgtgctaccgtctgaaggaggactgcggtctggactatgagccgacgcagatcgtcgttgcctccggcgcaaagcactcggtctatatcgcgctgatggcgctgtgcaacccgggcgatgaggtcgttatcgcggcgccgtactgggtcagctattccgagatggtcaagcaggcgggcgcggtcccggtcatcgtcgcggcgaccgaagaagcggacttcaagatcaccgcagagcagcttgacgccgccatcacggacaacaccaaggtattcatgctcaattctccctccaacccgaccggcatggtctacacccgcgcggagctggaggcgatcgcagaggtctgttgccgccgcaacgtttacgtgatcgcggacgagatctactgcaacctcgtatacgacaacaacgagttcgtttcctttgcttcgctgagcgaggacgcgaagaaccgcaccattctggtcaacggcgtgtccaagagctatgcaatgaccggctggcgtatcggctattcggcctccaaccccgcactggccaaggtcatggcgaactacctcagccactccacctccgcaccgagcaccatctctcagcacgcggccatcactgcgctgaccggcccgcaggaggatatgcaggtcatgaaggaagcgttcgagaagcgccgcgaccatcttgtcgagcgcatgaacaggatcgagggcgtttcctgcatcaagccggagggtgcgttctatgtcatgatgaacatgaccggctttatcggcaagaccatgtacggcaaggtcatcgagtccgccgaggacttctctcagctgttcctcgaaaagggcctggttgcgaccgtaccgtgcaccgcgtttgcggctccgggctttgtccgctggagctacgcgacctcgctgaccgagatcgacaagggtctcgaccgtctggaagtgttcattaaaaacgcctgaaaaccgaatagatgctgagcggcactccttccggagtgccgcttccggtctgtcgataaagtttgttttcatgcaggaacagcagccgcgcggcagcgcacacggaacgagaaatcgcgcagtgatttcaagaaaaccggggacatatgcctcggctttcctgccttaggagggagaatgtttccgtatgggaacgttcggacgatccgtgttctgcgaagtcagaacacatattgtcggaaaaatgaagtttttcgacagtatcggcggttctttgtttattgctacaagatagcgcaaagaagggcggttattcttgaaaatcgaccgataaagtggtaaactgaaaacagactgccaaaaggctgttgttttgctcgaataatcagtaaactacaccggaaaggacgaaaaagacatgaacaacgtgtacgaaagcccgctttcttcgcgctatgcctcgaaggagatgctgtataacttctcctcggacatgaaattctcgacctggcgccgcctgtgggtatcgctggcgaaggctgagatggcgctcggcctgcccatcacccaggaacaggtggacgagatggaggcgcacatcaccgatatcgactatgatgtggcccgtcagcgcgagaaggaggtgcgccatgacgttatggcacacgtttacaccttcggcaaggtcgcgcccaaggccgcaggcatcatccacctcggtgcgacgagcgcgtatgtcggcgacaacactgacatcatccagatccgcgagggtctgctgctcgtgcgcaaaaagctcgcgaccgttctggacaagctcgcgcagttcgccgacgcgcacaaggcgcagccgaccctcggcttcacccacttccagccggcgcagctgaccaccgtcggcaagcgcgcgacgctctggatgaacgagctgctgatggacctcggcgaggtcgaataccgcatcgagaacctgcgcatgctcggcagcaagggcacgaccggcacgcaggcctccttcatggagctgttcgacggcgacgagagcaaggtcaaggagcttgagaagcgcatcgcggacgatttcggcttcgcgggcgtcgttccggtttccggccagacctactcgcgcaagatcgacgcgcagaccctcgcgaccctcgccggcatcgcggagtccgcgtccaagttcgcgaccgacctgcgcctgctccagcacctcaaggaggtcgaggagccgttcgagaagaaccagatcggttcctctgctatgccgtacaagcgcaatccgatgcgctccgagcgtatctgcgcactcgcgcgctacgttatcaccgacagcctcaacccggcgttcacctccgcgacccagtggttcgagcgcacgctcgacgactccgcgaacaagcgtatttcggttccggaagcgttcctcgcggtcgacgctatcctcggcatcatgatcaacgtcgtttccggccttgtcgtttaccccaaggtcatcgaggcgcatgtgatgaacgagctgcccttcatggctaccgagaacatcatgatggacgcggtaaagcgcggcggcaaccgtcaggagctgcatgagcgcatccgcgagcactccatggcggccggcaagcgcatcaaggaggagggcctcgagaacgatatggtcgaccgtatcgcaggcgacccgatgttcggcatgacgcgcgagcagatcctcgagcacctcgacccgtccgcctacatcggccgctgcccgtcgcaggtcgatgagttcctttccgagtgcgttcgcccggcgatcgcgccctatctgaccggcgaggagatcaaggtagagatcaatctgtaaaactcgcggcatccgaggcggaaatctgccccggatgcacgactgtgcgattgacttttctgcgcttttgcgctatacttattcagttacgaatcaaccattaaggaggcactttcattgaaaaagagtgtagtttcctttatcgctgtactgctgctgatctgttttctcggcgttacggcggtaacgggagtgtacattccgggcggctggaccatgcccttccggaatgcagagaccacccagtccgactctgcggacacgcagacggacgcagcatccgatagcacggatacttctgccgaaaccaccactagttcggctgatgcggcggagtccgctgacaccaccgctgcatcgtccctcaaggcgatcatcccgagcatcctcgacaacgaaaacggcatccgtctgggtcttgacctggtaggcggctcccgtattgtctacgaggcagagatcccggacggctataatcaggccaacctcgccgacgacatgaactcggtccagaaggtcattcgtcagcgtctgaccgacaagggcttcaccgaggcgaccgtcgccctgagcggcgagaaccgcgtaacggtcgagatcccgcagatcaccaacccggaggaggctgtccagaccctcggcaccaccgctcagctgacctttatcgacgctgacggcaaggaatggctgaccggctcggacatcaagaaggcaacctacggctacggccgtccgaccggcaacgaggtcaccgacgttcactacgttcaggttcagttcacctccgagggccagaagaagttcactgaggcgaccggcaatatcgcagcccgcaccgacggcaccaacatcatggccatcgtcatggacaatcaggttatctcctctccgtccgtttcctctcagatcgacagcgacagctgcgtcatctccggctcgttcacccgcgacagcgcggcagagctggctgacctgatcaacgcaggccagatcccgttctccctcaagcaggtagagcttcgctcggtcggcccgcagctcggcgccgacgctatgcgcaccagcctgatcgccggcctgatcggcatcgcgctcgtcatgctgttcatgctgatcgtttaccgcatcccgggtctggtcgcgtccatcgcactgtgcttctacatggtaattgaagcgctcatcttcagcctcgttcgcgttaacctgtccctgccgggcatcgcaggtatcatcctgtccatcggcatggcggtagatgcaaacgtcatcatcttcgagcgcgtcaaggaagagctcaagaatggcaagaccgtcaagagcgcgattgactccggcttcaagcgtgcgttcaccgcaatccttgactccaacatcaccaccctgatcgcctgtgcggtactgttcttcctcggcaccggtacgatcgtcggcttcgccaccacccttggcatcggcgttatcgtttccatgttcaccgcactgaccgttacccacttcctgctcaaccgcatggttgacttccgcgtccgcaatccgaaggcttacggtctgcgcgaccgcgaggcaggcaagcagcgcttcgctatcctcaaaaacttcaagatcttcggcggcatttccgcacttctcgttgtcaccggtctggttgccctcattcttctgccgttcggcaagaacctgttcaacctgagcattgacttcgcaggcggcaccgagatggagttcaacatgcacactgtggtaacgcaggatatccagaccgaggtttccgacctgttcaaggacgcgaccggcgtggacgcttcctccgtcacctcctccggcgacggcaacgaggacgttcttatccgctcgacctcgatcacctctgagcagcgtgcggctgtcatcgacaagatgctttcgcagtacagcctcgctgacaccgacatcctgaacaacaacgacgtttctgcgtcggtcggctccgaccttcagcgctcggccgttgtctgtgcggtacttgctatcgtgctgatgatgctgtacatcaccttccgcttcgagctgacgagcggcatggctgcggtttgctgcctgattcatgacctgctcatcatgctgagcgtttacgtatggctccagattccgctcgacagcaacttcatcgcagcggcgctgaccatcctcggctactcgatcaacgcatccatcatcgtattcgaccgcgttcgtgagaacctgcgcaccgcgcgccgcgaggacttcgcgtctgttgcagagcgcagcgtatggcagaccatgggccgtaccatcaacaccacgctgaccacgctgttcaccatcggcatggtattcatcctcggcgtaccgtccctcaagcagttcaccctgccgctgatcgtcggtatcctcgcaggcggctggtcctcggtactgctgtcttgcagcctgtggaacgtattccgcaagaagttccgcaaaaagcgcatctgatcatgcaaaaaggacaccttcgggtgtcctttttcatgctggtatactaaggcaacaccgcacaattaaagcggcggtgctttgcggaaattttgtgccctgactttgttgcagtttcacggtaatacatcaagtattaccgcaaaactgtgcctcgtcagtacgcaaaattcactcgcaaatcactcttgttcaattatgcggtattgccctaaattgaagtgcagttgttgacatggagatacaacgggtggtataatatccgcagagtattacaggttattgtatcatgaaggggtggagccgaatgaaatgtccgttttgcggccatgatgacagcaaggttgttgattctcgaccgaccgatgagggaacgagcatccggcgccggcgcgaatgcctcaagtgtttcaagcggtttaccacatacgaaaccgtagaacgcatgccgctcatgctcgtcaagcgcgacggcacgcggcagccctatgaccggcagaagctgctcggcggtctggtcaaggcgtgcgagaagcgtccggtttcgctcatgcagctcgagcagatcgtggataatgtcgagcagcgcgtattcagtgcgctcgagagcgaggtctcgagcaagaccatcggcgagctggtcatggagcagctgcgctcggtcgacgaggtggcctatgtgcgctttgcgtctgtctaccgtcagttcaaggatatcaatacttttatggacgagctgaacaccttgctcaaggacaagtaaacagcgaaaatcaggggagtctttgcgccggcggccgcgcggaaggctccttttctttgcatttgaccggacagtgtggtatactaatactatctgaacgtatacagctgggaggatacagacttgcgagtgatgcatgtgatgggcggcggcgacgttggcggcgccaagacccagattatgaataccgtaaccggactgagccggacgaacgacgtcatgctgatctcgttccgggccggtccgttcgcggacgaggcgagagaacggggcattgatgtgcgcgtcatcgagcggcacaatccgttccgcgcggcacggaccatgcgcgatctggtggacgagttcaagccggacatcatccactgccacggcgggcgcgcgaacctgatgggcgcgatggtgcggcgcagccgccgcatccccatcataacgaccgtgcattcggactaccgtctggactacctcggcagtccgctcaagcagcacaccctcggcacggcaaacgccatcgcgctgcgctttctcgacttctatcagccggtcgcggaccgcatggcgcgcacgctcatcgagcgcggctttgacccggagcgcatcgtaaagatctacaacggcatggaattcaaccgcccggagggcgagttcgaccgtgcagcctacctccgcgagacctacggcgcggagatcgaggagggggatgtgctctgcggcatcgcggcgcgtctgaccgccgtcaaggacatcgcgacgaccgtgcgcggcttcgcggaggcgctcaagaccgcgccgcagctgcgtctgttcatcgcaggcgacggcgaggatgcggatatgctgaaaaagctgtgcgaccagctcggcgtgcgcgagcgcgtgacgttctgcggctgggtttcgcccgttatgccgtttttccgtgcgatggacatcaatctgctgtcctcggtgtccgagaccttcccgtactccattctcgagggcgtgtgcgccggctgcgcgaccatctgctcggacgtcggcggcatgccggagctcatcgacacgggcgagaacggctatatcttcccggtcggagacgacaaaaagctcgcggaatacatggcgcggctcgcgaacgacgcggcgctccgccataccttcgcggaggcgctctacgccaaggcgtcccgggatttctccaaggacaagatgtgcgagcggcaggaggcgaactaccgccatgtcatcgcacgctttcaccggccgaaggacgagcgcgagagcatcgtcatctgcggcgcatacggacgcggcaacgcgggcgatgacgccattcttgaggcgatcgtgcaggagatgcgtgaactcgatccgctgcgcaccatcacggtcatgtcgcgccgtccacgcgagacccgtgtggtctaccgcacgaacgcggtctatacattcaacgtgttttccgtgctgcggaagttccgccgcgccgcgctctacatcaacggcggcggctcgctcatgcaggacgttacctcgacgcgctcgctgtggtattactgctacacgctccgcgcggcgaaaaagcgcggctgcaaggtcatgatgtacggctgcggcatcggcccgatcaaccgcgcggccaaccgcaggatggccgcaaagaccatcgacgcctcggtcgaccgcatcacgctgcgcgacgacaattcccgtgcgttgctgagcgaaatgggcgttgtgcatccggatatctgcgtgtctgccgacccgaccatcatcctgacgcccgcgccgcacgagatcgtcaatctcgcgctcgaaaagtgcggcatcgacccggacgggagctatatcggcttcggcctgcgcaactggaagggactggacgacgcgctgcccgagatcgcggcggcggcggactatgcctatgaaaagcacggcctcacgccggtgttcgtgcccatcgagttcccgagcgacctcatgccggccgagcgcgtgggcgcgctgctgcactgcccgtggcacgcggtccgcatccgccagccgatcgagacgaccatcggcattctcgcgcgcatgaaaaccgtcgtgggcattcgcctgcactcgctgatgttctcggcggggcagggcgtgccggtcgtcggcatgagctacgacatcaaggtggacggcttcctcaagtatatcggcagccggacctgccttcagctctcctccgtccgcgcggacgagctgtgccgcctgatcgacgagtgcgtttcgggcgcgctcgacagcgaggtgcaccgcacggcggaaatgctgcgcgacagggaacaggaaaacgtaaagggggcagctgcgctgctccggctgtccggggactgacatctgaccggcagtccgtgttttcttcgcgcttaaacaaccaaaaggggttatgatatgaaaaaccatgtcgtttgtctttcgacaaccaactatcatccgctgccgacgcgcaagcagaacgtcatgagccggctgcggaacagcgaggtgctgtatttcgaccctccggtgtcgatcattgcgccgctcaaggataaaaaggcatccgcctacatcagcaaatacaggcagcccggcgaaaaggtcgaagggcatgagaatatcacggtctatgccctgccgcccgtgctgccgttcttcaacaagttccgctgggtaaataagctcaaccagaagcggcaggcagctttcgtgcgcagaaagatgcgcgaacacggcttcggagacgagaccgtgctgtggtgctattcgccgtcctcctgcgacatcgttgagcaggtgccgcacagcagtctggtctatgactgcgtggaccgccattccgcctacaagggacacattacgcccgaggtcgtggacggcatggagcgcgaccttgcgaagccggcggatcaggtgttcgcgactgcggtcggtctggcggaaacgctcgaaaagatcaacccgaccacgaaaatgatcccgaacggcgcggcctatgagatcttctcgcgcgtgcagaccgaaaaggacgcgctgtcctgtccggaggacatgaaggggctgaagcatccggtctacggctttgtcggcatgctgcaggagtgcatcgactacgcgctcatcgaaaagctcgcgaaggagcgcccggacgcgaccatcttcctcatcggccgcacgctgcccggcgtcgacctgtcgcatctgaagcagtacaaaaatatcgtgttccacggactcgtgccgcagcccgagctgccggcctacctcgcacagatggacgtctgtctgaacgtattccgggcgggcgcgctctccaaggacgtttcgccgctcaagttctatgagtatctcgcgaccggcaagccggtcgtttcgacccgtgagccgcttcaggtcgaggatttcagggacgtggtgtatatcgcgcatgatgcggacgaatttctcgcgctgtgcgacgaggcggcacgagaaaatgcgccggaaaaggtcgaaaagcgccttgcctacggcgagcagtgttcgtggaccgagcgcgtccggcagatggaggacgttctgtataaaaagggcgttctgcacgaaaccccggaaaagtaacgggtaagtttgggcatttgcacaaagaaaagaaaaaacgtgtaaaagccttgcattgcaaggtttaattcgatagaatattgttgtaacaccaccgatagtttcaggaaagaggtgcagcacatgaccggcagcgtattcttaaagcgaaatgcaatcgcacagttctgcgttttcggggattactgcaatttttttggcatcggtgcagctaattgagcatctttaggacacgggtatatctccgtgtcctaatttgtttttgaggaggagtaccacatgaaaaaggttctggtcgtcatgggctcggacagcgacctcaaggtgatggaaaaatgcgtcgatcgcctgaagtccttcgacattcccgtcgaggtccgcatctgctcggcacaccgcaccccggctgtcgcagagcagcttgcgaaaaatgcggcggcggagggcttcggcgtcatcatcgcggcggcgggcaaggcagcgcatctgggcggcgttctcgcagcctacaccacgctcccggtcatcggcgttccgatggcgacgagcgtgatgggcggcatggacagcctgctttccatcgtgcagatgccaaagggcatcccggtcgcaacggttgcgatcgacggcgcggacaacgcagccatcctcgcagcgcagatgatcgcgctgtcggatgaggctctcgcagccaaactcgcggctttcaaggccgacatggcagcggaagtgaccgcaaaggacgaaaaggttcgcgcacagttcgcgtaaccccgtatccccggcgaggtaaaggcgctccgccgcttccattgacggcgcggcgtacaacctgcaaacgctgaccgggagcagcgcttccggtcccgcagtagtttcaaattaacacacatatattaaaatggaggaattggacatggaaaagaaagaacagctgtacgaaggcaaggccaagaaggtattcgcaaccgacgacccgaacctggtcatcgtagactacaaggacgatgcgaccgcattcaacggcctcaagaagggctcgatcgccggcaagggcgtcatcaacaacgtcatgagcaaccatatgttccagctgctggagaagcagggcgtgccgacgcatttcgtcgagcagctctccgagcgcgagactctggtcaagaaggtctccatcgtaccgctcgaggtcatcatccgcaacatttccgccggttccttcgcaaagcgcttcggcgttgaggaaggcatcgtgttcgacgagccgaccatcgagttctcctacaagaacgacgatctgggcgacccgctgatgaacgcttaccatgcggtagcgctcaaggctgcgacccgcgaggagatcgagaccatcaagtccatggcgttcaaggtaaacgaggtcatgaagcagtacttcgactcgctgaacgttatcctcgttgacttcaagctcgagttcggcaagaccgccgacggcaagatcgttctggcggacgagatctccccggatacctgccgcctgtgggacaagaccaccaaggagaagctcgacaaggaccgcttccgtcgcgatctgggcggtgtcgaagaggcatatcaggagatcatgaagcgcgtcatgggcaagtaagccgcgcgcacggacaggaaaaggctaaatattctatgaaatatcgtattaaaagacagagcagcactccgtttgacaaggtacacgaggagtgcggcgtattcggcatcgcggcgcccgagggcaaggaaatctccgccgcacacgacgcctacaccgcgctgttcgcattgcagcaccgcggtcaggaggcagccggcatcgccgtaaacaagaacggcgtcattcactgccataaggatgtcggtctggtcagcgccgttttcgaccagaaaacgctcgaccggatgccgggctccatggcgatcggccatgtccgctactctacgaccggcgacacgcgccgcgagaatgcacagccgatctccatcacccatgtcaagggcaacctcgccgttgcgcacaacggcaacctcgtaaacgcgggcgagctgcgccgcgagatcgagctggacggcggcattttccgttcctcgaacgataccgaggtcctggtctacaccatcgtcaaggagcgcctcaagtgcgcctccatcgaggaggccgtgctgagcaccatgaagcgcatcgagggcgcgtattcgctcgtcgtcatgtctccgcgcaagctcatcgctgcgcgcgacccccacggcttccgtccgctctgcatcggtctgctggacggcgactgctacgtattcgcctccgagacctgcgcgctcgacgcgctcggcgcgaagtttatccgcgacgtggagccgggtgaggtctgcgtcgtagaaaacggcgagctgcgctcgatgcactgcgacattgagtgcaagacctccgcctgcgtatttgagtatatttatttcgcccgtccggactccatcatcgacggcgcgtcggtcgagcttgcccgtcaggaggccggcaagtatctgtccattgagcatccggtcggcgcggacgtcgttatcggcgtgcccgactcgggcatcccggcggccatcggctacgcgaagttctcgggcatcccgtacggcgtcggtctcattaaaaaccgctatatcgcccgtaccttcattcagccgggtcaggacaagcgcgagcgctcggtgcgcctcaagctgaacgccctgcgcaccgcggtcgagggcaagcgcgtcatcatggtcgacgactcgatcgttcgcggcacgacctgcggccgtctggtcaagctgctgcgcgacgcaggcgcggccgaggtccatatgcgcatttccgcgcccccgttccgtcatccctgcttcttcggcacggatatccccgagcgcagccagctgctcgcccacaatcgcacggttgaggaaatgcgcgagatcatcggcgtagactcgctcggcttcctgtcgctcgaggcctgccgcaagatcgcggtcggctgcaagctcggcttctgcgatgcctgcttctcgggcgagtaccccattccggtacccgatgaggcggagaagaatatgtttgagatggaaatccctctcagcaacaaagagtaaatgaaagtgagtgtgtaaatatgagcgagagccgttctgaaagctacaaggcagccggtgtagacgtcaccgcaggttacgaggcagtcaagctgatgaagccgatggtcgagagcacctacgtcaagggcgtcatgggtacgctcggcggcttcggcggtctgttccgcccggagttcaagggcatggccgaccccattctggtttccggcacggacggcgtgggcaccaagctcaagctggcgttcctgatggacaagcatgacacggtcggcatcgactgcgttgccatgtgcgtcaacgacatcgcctgctgcggtgcacagccgctgttcttcctcgactatatcgcagtcggcaaaaaccagcccgaaaagatcgcacagatggtttccggtatcgcagagggctgccgtcaggcaggctgcgcgctgatcggcggcgagaccgccgagatgccgggcttctatccggtagacgagtacgacatggccggcttctcggtcggcatggtcgataaggaaaagatgatcgacggcacgaccatcaagccgggcgatgcgctgatcggcgttgcgtcctcgggcgtacattccaacggctattccctcgtgcgcaagaccctcggcatcaacgagaagtcggtccgccgctatatcgatgagttcggcaagagcctcggcgaggagctgttgaccccgaccaagatctacgtcaaggcgatccagtcgctcatcggcaaggtagacgtcaagggcatcagccatatcaccggcggcggcttctatgagaacgtgccgcgcatgctgccggagggcatcgtcgcgaagatcgagaagaaggccgttccggttccgccggtattcgacctgatcgcaaagaccggcaagatcccggagcgcgatatgtacaatacgttcaacatgggcgcaggtctggttctggctgtcgcagcagaggacgtttcccgtgccgtcgcagcgatctccgctgcgggcgagacggcgttcgtcatcggcgagtgcactgccggcgataagggtgtagagctggtataagactgtcgcgaaactgacgtttcgccgacaatctgcgtaggagtgaatcttaacgacagacggaaacgggcgctttgccgcccgtttcccatcgaaacgcgcacgactgtgcgaaaattctggagaatacaaatgactaatattgcagttctggtttcgggcggcggaaccaaccttcaggcgctgatcgacgccgaggaggcgggaaagatcgaaaacggcggcatccgccttgtcgtttcgtccaatccgaacgccttcgcgctcgagcgggcggcgaaggcaggcatcgagaccgccgtgctgcgccgaaaggaatacgactcggcggagcgctacggcgaggcgctcgacgcgctgctgcgcgaaaaggagatcggtcttatcgtcctggcgggatttatgaccgtgctgcccgacagcttttgtgcaaaatatgaaaaccgcatcatcaatgtccacccgtcgctcatcccgtcgttctgcggcgagggattttacggcctgcgtgtgcatgaggcggcgctcgccaagggcgtcaaggtcacgggcgcgaccgtacactttgtaagtgaggtcgtagacggcggcgcgatcatcgcgcagaaggccgtcgaggtcgagccgggagacaccccggagagccttcagaagcgcgtgatgcagaatgcggaatggatcctgctgccgcaggcagtgtcggatttctgcgccggcagactttcggtcagcggcgccatcgttacaagacaggagtgacagctatgagtaagaacgtttttgacatcggccaggagctgatgagcaacgcttatccgggtcgcggcatcattctcggccgcacgtcggacaataaaaagaatgtcatcgcatatttcatcatgggccgctcggagaacagccgcaaccgcgtgttcaccgagaccgaggacggcatccgcaccgaggcgttcgacccgtcgaagatggtcgacccgtcgctgatcatctatcatccggtccgcctgtatgacggcacgctcgtcgtgaccaacggcgaccagaccgacaccatcgtcgatttcctcaagcagggcaagagctactttgaggcgctccgcacccgtcagtttgagccggatgccccgaactatacctcccgcatctcgggcgtggtcaacccggacggctcctacagcctgtccatcctcaagaacttcacctcggaccgcaccgcgaacaagcgctttttctacgagtatgacaagccggttgccggtctgggtcactttattcatacctaccagtgcgacggcgacccgctgccgccgttccgcggcgagccgaagtgcatccgcatcgagctgccgatcaaggaattcaccaacctgctctggaacagcctcaacgagcagaacaaggtctcgctcttcgtccgctacgtcgacctcgagaccggcgaatatgagcaggagatccgcaacaagaacgcagaataactgcgtcctgatgagcagaaaggactatttatgaaagaattagccttaaagtacggctgcaacccgaaccagaagccggctcgcatcttcatgaccgagggcgagctccccatcgaggttctcaatggcaagccgggttatatcaacttctgcgacgccttcaactcgtggcagctcgttcgcgcgctcaagaaggcgaccggaatgccggcagcggcttccttcaagcacgtttctccggccggcgcggcgctcggcaagccgctgaccgatattgagaagcagatgtacttcgtcgataccgacaaggagctgtctcccatcgcctgcgcctacatccgcgcacgcggcgcggaccgtctgtgctcctacggcgactgggcggcgctgtccgatacctgcgatgcggacaccgcatcctacctcgcacacgaggtctctgatggcatcatcgccccggatttcaccgcagaagcgctcgagatcctgaaaaccaagcgcaagggcggctataacgtggtcaagatcgatccggactacgagccgaagccgatcgagcagcgcgacattttcggcatccgcttcgagcagggctacaacaactacgagatcagcgagagcctgctgaacaacatcgttaccgagaacaaggatctgccggagagcgcgaagcacgacatgatcctcgcgctcatcacgctcaagtacacccagtccaactcggtctgctacgtcaaggacggcatgaccatcggcgtcggcgcaggtcagcagagccgtatccactgcacccgtctggcgggcagcaaggcggacaactggttcgttcgccagcacccgaaggtgctcggccttcagttcgttgatggcatccgccgcccggaccgcgacaacgccatcgacgtttatacctcggatgagtacgaggatgtcctcgcagagggcgtatggcagaagaccttcaaggtaaagcccgaggtgctcaccgcagaggagaagaaggcatggatcgcgaagaacaccggcgtgaccgtcggctcggatgcgttcttcccgtttggcgataacgtagaacgtgcacgcaagtccggcgttcagtacatcgtacagccgggcggctccatccgcgatgacaacgtgatcgagaccgcgaacaagtacggcattaccatggcgttcaccggtatgcgcctgttccatcactaaaaatgaagctgctcaagggctattatgcctatttagccatcgcaggcggatttctgctctgccttgccgcacaggagaactgggcgctgcagatgctggcgttcgcgctggtatcggcgggtgcgttgtccgtgcagggcgtgtcgcgctggtatatgcgggcaagcatcgcagccgatgtcaagatggtattctcgcttgcgctcggcccggccgttattccgcccggactgctgcgcatcgcgctgtactatatcggtcttgtgccgctgctgctcaccggctgtatgctgctgatgggcgtgaaagagcagatgcagaagatcgagcacagcaccctgcccgaatgggtcctgctggtgatctggagtgcgggctacatcctcgtgctcgtcagcgcccccggctggctgaacgattatctgtttaacaccgtgtggacgctggccaatacctgcatctccatcggcacagtagcactgatcgtagaaatgttccgcgcacagcgcatatacctacaaacggaggaacaagaatgaaagttttggttatcggcggcggcggccgtgagcacgccatcgtccatacattgaagaaaagccccaaggtggactacatttggtgtgccccgggcaacggcggcatcgccgctgaggcagagtgcgttgccatcaaggcgaccgacatcgacggcatggttgctttcgccaaggagcacaagccggatctcgttatggtcgcaccggacgacccgcttgcactcggcatggttgacgcgctcgaggccgcaggcatccgcgccttcggtccgcgcaagaacgctgccatcatcgagggcagcaagtcctttgccaaggatctgatgcagaaatacaatatcccgaccgcaggctatgccgtttttgagaactcggcggacgcgatcgagtacatcaagaagaacggcgcgccgatcgttgtcaaggcggatggtcttgcgctcggcaagggtgttacggtcgccatgaccgaggaagaagccattgaggcggtcaaggacgcgattgacggcggtgcattcggcggcgccggcgcgcgcgtcgtcatcgaggagttcctgaccggcccggaggtttccgttctggcgttcgttgacggcaagcacctcaagaccatgccgtctgcgcaggatcacaagcgcgcctacgaccatgacgaaggcccgaacaccggcggtatgggcgctttctcgccgtcccgtttctataccgacgacatcgcggcggagtgcatggagaccatcttcaagccgaccgttgctgcgatggaaaaagagggccgtccgttcaagggtgtgctgtatttcggtctgatgctgaccccgaagggcccgcgcgtcatcgagtacaacgcccgcttcggtgacccggagacccaggcagtcctgtcccgtctggacaccgacctgttcgatattttcaatgccgtcattgacgaaaagctcgaggatatcgacatcaagtgggcagacaacgcagcgtgctgcgtctgcatggcgtccggcggctacccgaaggcttacgagaagggcaaggagatcaccggtctggacgatgtgaccgattcgttcgtgttccacgcaggcaccgctgtcaaggacggcaagctcgtcacgaacggcggccgtgtcctcggcgtgactgcgactgcgcccacgctcgatgaggccattcagaaggcctacgccgacgtcaagaagatccactttgacaaggtgcattaccgtacggatatcggtgtaaagtaaaaattccgctttattacagggtgggctgaacttggcccaccctgtattctgcgttaatgaaagaaggggaaaaaatgaaaactgaacagcaaaatcagattttaggctgtatgaatgacgtgctgaaccagaacggcttccgtgcggagatcatgcagaaagagggcgcgccgactattctccgctgcgaggcgatgcggcagggcaaggtcgcgaaggacgttgtgatcgaggcgtgctttatcccgatgcagcttccggacgaaaacatgggtctgctccagttcttcgtgacactgtttcagggtgcgccggaaggccacgagaaccagctgcgccgcgcgtgcgactactgcaacaacttctgcgccctcggtgcattcggcttttatgagcaggcgggccagatctacctcaagcacaacacgcttgttgacggctctctcgagctggacaagatcatcccgtttgtggcggacaatatctccgtgctgctcgcggcagtctcccgctttatcgacggcctcgcgcaggtcgcatatgccggtatgacgctcgatgcggtcattgatcaggagctgttcccgaaaatgaattaaaaaaggctctgttcgcggtgtaaaccggcagaacagagctttttttattacagtttttccagctggaagggggtagtctggtagacgtagtagttaatccagttggtgtagaagaggtgtgcgtgtgccttccaggtaacgagaacgtccgcggacgggtcgtcgttgcggaaataatgcctgggcacatcggggttcagtcccttcgcgaggtcgcgctcgtactcttttttcagcgtgtccgagtcgtattcgccatgaccgagcacaaagatctgccggccgttgacggcctctacgatataaacgccagcctcgtgggactctgcgagcaggcgcagctcggaatgcttgcggatgtcgtcggcgcggacttcggtgtggcgcgagtgcggcgcacagaacagatcatcgaagccgcgcatcagcggttcgtgcgggaacagcacgtgatgcttgaaaataccgctcattttgtgcgaaagctcgtattttgggataccgtaatggtaataaagaccggcctgcgcgccccagcagatgtgcagggtggaatgaacgtgcgttttcgtccattccatgatttcaaccagctcgtcccagtactcgacctcctcgaacggcatcagctcgaccggtgcgccggtgatgataaagccgtcgtatttctggtcgcgaatgtcgtcaaaggtcttgtagaacgtcaggaggtgatcctccggcgtgtttttggaatgataggtcttggtctggatgaggtcgacctcgatctgaatgggcgtgttggacagacagcgcagaatctgcgtctcggtcacgatcttgagcggcatcagattgagaatggcgatgcggagcggacgaatgcgctgggtcgtcgcgcggtgttcggtcataacgaagatgttttcgctctcgagaaccgcacgcgccggcagg

SEQ ID NO: 12835 - DNA, 73987 bp, Unknown
  gut microbiota DNA sequence
tccaaaggagggtctggggtgtcaagaggggaaagggaaccatcggtgccctgtcccctcttgtctccgccgccagacggcggcaatgccacgccatgtcatggcgaacatccccccgcccgggagggccagtctcgcctccaccggctgcaccgctgtatcggcgaggaggaaagcgctcggccgggcagcgtttgcaataaagtaaagatgctttaattcatgggaaaatccccttgcttttctatgaaaaatgctgaacaaaaccgaggcttttaccgtatttcggtaagctatttgaagcaatcatagcaatttaactgataaaaccgggttttgcaggaaaaaattcattcaaaaaacaaacatgccggagagaaattctccttgacgaactacggaaaaagagatagactatatataacggatttgaagaaataggagcgatgcagattatgtattcaaaagaggtacaggttaccaatcaggtaggcttatatgcccgtccggcaactttttttattcagaaagctaacgagttcaagtcgacgatcctcgtagagaaggaagagcgtcgtgtcaacgcgaagagcctgctcggcattctctcccttggcatcaccaagggcacgaccatcaacctgatcgcagacggcccggatgaagaagaggctgttgctgcactggtcgagctgatcacgtccaattttactgactaagttatcgcatcctgaatgagcaccgatcttttgttttaggtcggtgcttttttatcgaaacaggacgaaaaccgagagggaggaacggcctgccatgacaagagaacagctgaaagagcgcgtgcgccggctccccatgcagccgggcgtatatatgcacaaggacaagaccggcagggtcatctatgtcggcaaggccaagctgctgcgcaaccgtgtggcgaactattttcagccgcccgagcgcctgaacgccaaaacgcgccagctcgtcagccatatcgacaccttcgacatcattgtcaccgagagcgagttcgaggcactcgtgctcgaaaattcgatgataaaaaaatatcagcccaagtacaacatcctgctaaaggacgacaagggctatccttatatccggctggacacgacgcaggactatccgcgctttacggtcgtttcgcagcctgcggaggacggcgcgcggtatttcggcccgtacatgggcagaaaggccgccttcagcgccatcgacacgatcagcgaggcgctgcatctcgcgacctgctcgcgcgtctttccgcgcgacatcggaaaggacaggccatgcctgaaccagcatctcggccgctgctgcgcgccctgcacgggcaaggtcagtgccgaggaataccgcgcgctgatcttacaggcggcgtccatcttcgagggcggcgcgaagcagctcgagcgcgagctgaccgagaagatgaacgaggcggcggaggaattgcagttcgagcgagcggccgaccttcgcgaccgtctgcgcgccatccagaagctcggcacgcggcagcatgtggtcgccggggcgttcgccgagctggacgcgatcgcgttcgtacagggacagacccgggcgtgcgtgtgcgtgctgcactacggcggcggctcgctgcaaagcaaggaatacaccctgttccacctgaccgggggcgacccggccgaggtgctgtccgccttcgtcaagcagtattacgcccagcgcggcgccgcgccgaagaccgttctgctctcgcatgagatcgaggacgcggacgcggcaggggagtacctgtcctcgctcgccggacgaaaggcagagcttgccgtaccgcagagaggcgaacggcgcgtgctgacccgactcgcggagaagaacgcctatgaggagatcgagcggcgcgaaaagcagtccgagcgccgtcacaagtcgctcgagctgctccagagcgtgaccggcatggcggcgctgccgttgcggctcgaggcctacgatatttccaacttcgccggacaggacacggtcggctcgatgatcgttttcgtcgagggacagccgaagaagtccgactaccgcaagttcaggatcgcctgcgccgcgaacgggcaggacgactatgcgtccatgcgcgagatgctgacgcgccgcgtgcagcgctatgcggacggggacgagaaattcgcgccgctgccgaacgccttcatgatcgacggcggtctgggtcacgtgcgcatctgcaaggaggtgctcgactcgttcgggctgtcggtaccgtgcttcggcatggtcaaggacgaccatcaccgtacccgtgcgctcatcgcgccggacgggcgcgagttcggcatttcggcaacgcctgcgctgttcgcccttgtcggccggatgcaggaggaggtgcaccgcttcgccatcgagtacaaccgaaagctcggcggaaagcgtgtgcgcggctcgacgctcgaccggatacccggagtgggcgacaagcgccgcacggagctgctgcgccacttcggcagcgtggagaatatccgccatgcggaggagaatgagcttgccagaatcgtcccgcggaacacggccaaggaaatctacgatttcttccataaggaaggctgagagccttgccgccgtccggcggcgggggattgtcggcgcccgccgacaggggcaaaaggggaaaagggcaccgtatggttccctttccccctcttgactcccccaaaccctccttcgagccgctcagcaaagcattcgcggctaaacgggggagacgggggctcggttccgtgcgtcgggcagcttatgggacgcttgtccgccctgaggttactttgcgtgagctgccgcgcatatcagtgcgcggccagacggtgcagagcgcttgctttgcgctgcgaaaagctccgcttccatcaagcgttgacccttggggcaccaaacgcccctgtgggcccctcgcatttagacgcgcgaccggagggagtcgcgtcctaaggaaaggttggggagtcaagaggggcagggaaaccttggtgtccctgccccttttgtctccgccgggagaccccggcactccgtctccgccgggagaccccggcactccgtctccgccgggagaccccggcactccgtctccgccgggagagcccggcactctccgccgccggacggcggcattacccccgtccgccgaaggcggccaatgtccgcgctcaccttgagcgcaaagctcgcctccggcggcgcaccgctgtatcggcgagaaattcaccgcctgccaggcgcttattagataaaatctcgatttaccgaggaggtaaaacatatgcgcgttgtttccggttccgcacggggctgcaagctccagcccgtccccggcatgaacacccgtcccaccaccgaccgggtcaaagaaaacgtctttaatctcattcaggaccatgtccgcgacgccgacgtcctcgacctgttcgccggaaccggtcagctcggcatcgaagccctctcgcgcggtgccgcgcactgcgacttcatcgagcacaacggcacggcgtacaacgtcgtctcgaagaacgtccagaccgcccgggtgcaggaccgcgcctcgctccaccgcgtcgaggcacgcgattttctggcgaaagctgccgcgaaaaagtattccctcatcttcctcgacccaccctacggcggaactattctggaaaatgcactttccggcatagaaaggtttgacattctctctgcaaatggtataataatttgtgaaagtgcagtagaggacaggttcgcccacggctttgaggtcatcagggaacgccgctacggcgcgaccatgattaccgttctgcgtcggcaggacggcggaacggatgagtaaaagaaatatgagaattgcgatctatcccggctccttcgaccccgtgacgctgggacatctggacatcattcgccgcgcttccggtcttttcgaccggctgatcgtcgcggtgatgcacaaccagaacaaaaagccgatgttctccgtcgaggagcgcatggaaatgctccggcgcacgacggcagacctcccgaatgtggagatcgagagcttcggcggcctgctggcggactacgcccgcagaaaaaacgcctgcgtgctcgtaaagggtctgcgcgcagtatcggacttcgagtacgagttccaaatggctctggcaaatcggaaattaaacgccgatcttgatacggtattccttatgaccagttcggagtatatgtacctgtcatcctcggtggttaaggacatagcagtacatggcggcagcgtggccggtttcgtaccggatgagatcgtgcaggatatcgtgcgccgcacacgaaaggaagactaaatatggcaactttggacgaactgattaaccgtatgtacgacatggtgcaggatgcgaagggcattccgctggccggcgagaagtgcatcctcgagcgagaccagatgctcgatctgctcgacgagctgcgctccactctgccgaacgacctgcaggctgcgcaggacatcgtagccaagcgcaacgacctgctcgcctccggcaagcgcgaggctgaggccatccgccgcaaggccgaggaggacgcgcgccagatggtctccgagaccgagatcgttgtcgccgcccgcaaaaaggccaaggaagtgcagggaaacgccgaaattcaggcgcgcgagctgcgcagagttgccaacgagtactgcgaggacaccctcaagcgcaccgaggaggctgttgctctctcgctcgacgaggtccgcaaggcccgtcagcgcttcaagagcatcgcaaagtaaacacagagaaatcgggggactgtttcgcagcggtccctctttttctgtttcgtgggaaaagtgtgcaggacggaaaaagcacgcggcaaacttcgaacaagtgttcggagttgcaaaatctgctcaaaatcgcaaatacagagcggtaaacttctgcaaaatataacaaattaaatcttgcattcaaggcgctgtgccgttataatgttaataagagtggtgagatgtggggcaaagtgtcacgcattccatcgaggcggcaggaaagcgagtgtgaggtgagacagggtgaagggcgaatacaggcataccatcgacgcaaaagggcgccttgccatgcctgccaagctgcgcgacgagctcggcgagcacttcacggtcacaaagggcctcgacggctgtctttttgtctaccccgacgcggagtgggcttcgctcgaagcacgcatccgcagtctcggcaacggcgaaaaggcgcgccgcatcaagcgctattactgcgccaacgccttcgatgcacagctcgacgcgcagggacgtatccttattccgggtaatctgcgcgaatttgcatgtctggaaaaagatgtaaccgttgtcggcctgctcgatcatgccgagatctgggacaccgaaaagtggaacgagtacaacggctcgatcgacgcggaaagcatctctgcggacatggaaggaatcgatttttaaccgggaggctgtgaatatggaatttcatcatgtttccattctgctccagccttgtctggacgcactgaatatcaagccggacggcgtttatgtggatgccacgaccggcggcgcaggccattcgctgcacatcgcgcaggagctcggtgagggcggcagactgatctgcatcgaccgcgacgacgaggcgctcgagaacgcaaagacccgtctcgcgtcggtctgggaccgcgtgaccaccgtcaagagcgacttccgcgacatcgaccgcgtgctcgaggggcagggcctttcgggtgcggacggcatcctgttcgacctcggcgtttcctcgccgcagctcgaccatgcggagcgcggcttctcctatatgaaggacgcgccgctcgatatgcgcatggaccgtcagcaggcgctctccgcgtgggatgtggtcaatacgtggagccgggaggacatccggcacattctgttcgaatacggcgaggagcgctatgctccgctgatcgcagccgccatcgagcgcgaacgcgagaaaaagccaatcgagaccacgctcgaactggtggacatcatccgcggcgccatgccggccaaggcgctgcgcgaaaagcagcatccggccaagcgcagctttcaggccatccgtattgcggtaaacgatgagctgggcgcggtgcgcgaggcgatggaaaaggcgatcgactgcctgaatccgggcggccgtctcgctgtcatcacgttccacagccttgaggaccgcatcgtcaaggccgcgttcaatcaggcagcccagggctgcacctgcccgaaggattttccggtatgcgtctgcggcaaaaagccgaaggtgcgtctgacgccgcgcaagcccatccttccgagcgatgaagagatcgaggagaacccgcgtgcacgcagcgcaaagctgcgcgtgtgcgaaaaaatataagcacggcgcgccgtgcacggacttagcagaaagggtaatgctttatggcagcaatagcaacgagagacagtgccgcctataaacgatataacgaaaagctgccggcggtcacggcggagagcaagagcagccttcagctggcgaagccgccgaagaagcgccgcagaaagagcctgcgcaggagcgtcattctgagcattctggcggcggtaggcgcatccgcgtacattctctactgccagatgcagctgacgcagctgaccgccgaggtgagcaagcagagcgacaacctcagcgagatgcaggcggagaacgtttcgctgacgaccaagaagatgaacagcatggacatgaccgaggtagagcagcacgctgtgaacgatctcggcatggtcaagatggataattcgcagatcgagtatgttgagctgacccgtccggacgctgtgacggtcgcgcacagtgagcactcgcttgaaaacgtggtttccggtctgacggagtggttttcctcgatcgtggaatatatccgctgacggaaggaataggatatatacaggggagtgagaaggggatgcttctgacttccctttatttttccaggggggaccggtcccccctggataccccgtcggttccggagaaaccgccggggatacccccctcgcccctgcacggcaggggcggctcgggacacgtgtcccgaggcagagggataaaagtccggcagagctggagttttatggggaatttaacgcggcctgctgcggcaggcctgtcctgcctgttccggctttgccggaatgcggcaggagatgctttggatttcattcggaggaaatttttctatgggagaaaaaaagcccagagttaatatgacgatgcgtctgcgcgtgctcacggcgctgtttctggtcatcggcttcggtctggtcggcgtgcgcctgctctatatgcaggtgttccaccacgacttctatatccagaaggccacgtcgctccagacgcgcgataccttcatcaccccgaaccgcggcaagatctacgacgcgaacatgcaggtgctcgccgagtccgccgaggtcgagcgcatcacggtttcgcccaaggcggtcgtgtccgagaccaaggagaagaacggcgtgaccgccgatgtccagcgtcagacgctcgcgaccatcctttccgagacgctcgacgtcagctacgacagcgtcatggagaagctgaacaagaccgactcggaatacgagatcatcgcgcagaaggtcgacaaggacgtcaccaaggagctcaacgccaagctcgaggccgccggctgcaccggcgtgtactccgagccggacaccaagcgctattatcagcacggctcgttcctttcggcggtgctcggctacgtcggcaacgacaacaacggcgcctacggcatcgagtcgcagtacaacgacgagctttccggcacggccggccgcatcgtgcgcgtgcagaacgcccagaacgaggacatcgttccggatacgcagcagtatatcccggccaaggacggcaactcgctcgtcctgaccatcgacagcgatattcagaactacctcgagaagcatctcgagaccgcgttcgcggacaatccggaggcgcgcgacggcgtttccggcatcgtcatgaacgtcaagaccggcgaggtgctcgcgatggcgaacctgccggacttcgacccgaacgacgcctaccatctgaccagcgaggtctatatcaacgagctcaagaccgacgtgcagaagatcctgaccgacgcgaagatcaatgcggtcatcccggataaatggtacgaggagggcggccttgcgaacctgcccgaggagcttcagaagaacgacgacatcgtcaacaagctcggctcagcgcgcgtcaacatcctcatgaagacctggcgcaacccggtcgtttccgacaactacgagccgggctccaccttcaagctcatgaccgtcgctacggcctacgagctgggcgaggtggatgcggacagctcgttctattgcggcggctcgctgatggtaggcgactggaaggagccgatcaactgcgcgaacacgagcggccacggcatgcagacgctgaccgaggcgctgatgaattcgtgcaacgtcgcgatgatgcagatcgcccaaaaggtcggcatggcgcggttctatgaattctacaaggccttcggcctgctcgatcagaccggcatcgacctgccgggcgagagccgcggccagttccacaataccggtgagacgagcgactggaacgaggtcgcgctcgcgactgcgtccttcggtcagcgctttaccgtcaccccgatgcagatgatcaccatggtcagcgcgatcgtggacgacggcaagctcaaaaagccatacgttgtcaaaaacgtgctgaatgccgacggtacgatcaagtccacgaccgagcccgaggtgctgcggcaggtcatctccgaggacacctccgcctatatgcgcgaggcgatggagcaggtcgtagcagccggcaccggcaagaacgcctacgtcaccggctaccgcatcggcggcaagaccgcgacctccgagatcgagaaggagcgcgacgagaccggcaagatcaccgacaccgaggaccgctacaccgcctccttcatcggcgttgcgccgatggatgatccgcagatcgcggtgctcgtttccatcaacgacctgcccgaatccgtgccccacggcggcggcgcgatcgccgctccggtcgtcggccgcatcatggaggacgtcctgccgtacatcggcgttaccgcttcctacgaggagaacgagagcgaccgtcgcgagcagaccgtgccgaatgtgatcggcatgacgcgcgacgcagcggacgaggcgctgacgaacagcggctttgagtacatcatccacggcgagggcgagaccgttaccgatcaggtgccgtcgagcggcatccgcatcccggcgagcggccgagtcatcctctacatgggtgaagataagccgaccgagcagatcgaggtgcctgatgtgagcggcatggacccggatacttgccgggatacgctcgaggagtacggcctgtacctcaagcagcgcggcgtcgccacctcgcagatcacgggcgacaccaccgcgagcagccagtcgcctgcggcgggcacgaaggtgagcataggctcggtcatcacagtagaattttccgatacgaccacggtcaacgaccgataggaggacgttttatgaaattgcaggaacttttgaagggcgtcgccgtgctttcgagcacggcagacggcgaagccgagatcggcgaagtgcgctacgactcgcgcgcggtcggcaagggcgatctgttcgtcgccatccgcggctacgcgaccgacggccacaaatatatcgaaaaggcgctcgagcagggcgcggcggcagtcgtgtgcgaggaggcgcccgagggcgcaccggcggtcgtcgtcgagaactcgcgtaaggcgctcgcggagatcgcggcgaaccgcttcggccatccggcggacagcatggtcatgctcggcgtgaccggtacgaacggcaagaccaccacgacctatcttgtcaagcacatgctcgaggacgctggccacaaggtcggcctcatcggcaccaaccagaacctcatcggcagcgaggtcatcgagaccgagcgcaccacgcccgagtcctacgagctgcacgcgctgttcgcgcgcatgcgcgacgcaggctgcacccatgtcatcatggaggtctcctcgcactcgctcgtgctcgaccgcgtgcacggcatccgctttgcggtcggcgcgttcaccaatctgacgcaggaccatctggacttccataagaccatggagaactaccgtcaggccaaggccatcctgttcaccgtcagcgacaagggcgttatcaacctcgacgacgcggcggcatccaagatgctcgcggacgcaaagtgcccgtgcctgacctactcgtgcggcaagccggaggcgaccctgtgtgcgaccgcgcttcagctgcacgcggacggcgtagagtttgatgccgcctatgagggtgcgtctgcgcacgtaaagctgcccattccgggtcacttctcggtcgagaacgcgctcaacgccctcggcatggtgctctcgctcggcatgccgctcgcagacgcggcgaagtccatggcgaccgcgaccggcgtcaagggccgcgtggaagtcgtcccgaccgacacggactacaccgtgctcatcgactatgcccactcgccggacggcgtggagaacgtgctgaaggccgtccgcggcttcgcaaagggccgcgttgtcgcactgttcggctgcggcggcgaccgcgaccgcaccaagcgcccgaagatgggtaaaattgcttctgaccttgcggatttctgcgtggtcacgagcgacaacccgcgcaccgaggagccgaaggccatcatcgacgatatcctcgagggcatgaaggacagcaagaccccgatgcaggtcatcgtcgaccgcccggcggccatccactgggcgctcgagcatgcacagaaggatgacatcattgtcctcatgggcaagggccacgagacctatcaggaggtcaaccatgtgaagcatcacatggatgaacgcgagatcgtcgcagatttttttaataaataaacggacagaagaaaaacattgggggaaacggcatggaacgatttacactggcgcaggcggcggagtggacgaagggcgagacggcgggagacgctgtgctcaccgcagtctcgaccgactcgcggcgcattccgcaggaggcgctgttcctgccgctcgcgggcgagcgcttcgacggccatgatttcatcggaaaggcgctcgaaaacggcgcggcggcggtcatgagccatcgggcgtgcgaggagtatccggtcccggcgctctacgtcgagaacacctcgcaggcgctgctcgacctggcgggcggctaccgcatgatgtgcggcggctcggtcgtcggcgtgaccggttcggtcggcaagaccacgaccaaggagctgctttacgccgtgctcgcgcagcagttccgcgcggaaaagaccgagggcaacctcaacaacgagatcggcctgccgctgacgctcatgcgcatgacgaaggacaccgaggtcatggtcgcggagatgggcatgaaccacttcggcgagctgtcgcgcatgacggcgagtgcgcagccggattacgccgtcatcaccaacatcggcacctcgcacatcgagtttctcggctcgcgcgagggcatctgcagggccaagctcgaaattctcgagggcctgcggcagggcggcgctgccgttctgtgcggcgatgagccgctgctctgggacaagcgtgacagcctcggctgcacggtctatacctacggcatggagaaccgggcgtgcgacctcgtcgcgcacctgcattcggacggcagctttaccgtcacaaacaacggtctgccgtcggagacgctgccggtcggcggcagcttcaccgcaaagctgtccatcccgggcgcgcacaatgtgctgaacgctctcgcggcggcgtccgtcggtctgctgatgggcgagacggtcgagaacatccgaacgggtctcgtgtcctacaccgcgagcggcatgcgccagaacatctatgagcagaacggcttccgcatctacgccgactgctacaacgcaagcccggacgcgatggaggccacgctcggtgtgctcggcacgatgggcgataccggccgtcgcatcgcggtgctcggctcgatgctcgagctcggagactataccgaggaggggcaccgccgtgcaggcagagctgctgcggagcacgcggatgtgctctacgcctacggcccttcggcggacgccatcgcgcgcggcgcggaggaaaaggggatgacagcggtccacgccttcaccgaccagaacgagctggtcgaaaagctgcgtgcagacgcaaagccgggcgacgcgctgctgttcaagggcagccgcggcatgcgcatggagcgcgcactcgcattgtttttaggggaggaagttgaataaatgaagcaggcacttatctgctgcgcgatcgcgtttgtgatcacggctgccatcggcccgtcggtcatccgctatctgcgcaagatgaaattcggtcagaaaatccttgagatcggcccgaagtggcatatgaacaaacagaacatcccgacgatgggcggtttcatgttcatcatcggcatcgcgctcgccgtcatcctcggcggcctcattaccggcacgctgtcggttcacgcgctggccatcctcggcctgtcggcggcctacggcgcggtcggtctggtggacgactacgcaaagatcaagaagaaggagaacgcaggcctgacgcccagacagaagctcgtgcttcagatcctggtcgcggcggtgttcatcctcgtgctgttcctcgagtcggacggtctgccgtcgctcatgatcccgttcaccggcatctcgatcgatctgccgtggccggtctacatcatcttcgcggccttcgtcatcgtcggtgcggataatgcggtcaacctcaccgacggcatcgacggcctcgccgcgagcgtcacggtgccggtcgcggtattcttcgcggcggtcggcgcgcgcatcggcaacaccggcgtgaccatcttcgcaggcgcgctggcgggcggcctgctcggctttctgatctataacttcaaccctgcgaaggtgttcatgggcgacaccggctcgctgttcctcggcggcgcggtcgcaggcatggccttcgcgtgcgatatgccgctcatcctgctgctcgtcggtctcatctacatcatcgagaccctgtcggtcatcctgcaggtcacttacttcaaggcaacgcacggcaagcgcctgttcaagatggcgcctatccatcatcactttgaaatgtgcggctggggcgaaaagcgcatcgtgctcacgtttactgcggtcacgatcgtgctgtgcctcgcggcgtattttgtcgcgctgccgtaacgcatccccctcggaggtggcacaatgacatcgtcaacaagacagccgcgcggctcgggcagccgccggagagcgggacggcccgcaccgggcggcgcagcctatccggcgccgcgtccctcgcgccagccgatgccgcggcagtcctaccgcccggcgtccgcaaagcgtccggcaaagccgcagcgacgcgcgcgaaagccgcacacgatcgatatgccgaccatgtgcgcaacgctgctgctgctgctcgtcggcctgatcgcgctgttctccgcgagctactcgaacgcgctgtacacgcagggcagcgcgacctacttcatcgcaagacagctcaagtgggcggcgggcggcctgattgccatgttcctgctgagcaagtgggactatcacgactataaatatctgaccatcccggcgatcgcaatcagcgttttcctgctgatcctggtgctcattccgggcgtcggcacgacgaccaagggcgcgacgcgctggctgttcggctttcagccgtccgagctcgcgaaggacgcggtcatcatctgcttcgcagcgtgggcgtccacgaaataccgcgatgtgcggcactggaaaaagctgctctacccatacggcgcgctgctcgcggtctatattttcctgctcgcgaaggagccgcataactccgcgatcatcatcacctgcggcatcggtctcatcatgctgatcgccgccggtctgcgcatctggttcctcattccggcaggcatcctcgccgttctcggcgcgttcgcctcgtatctgacgttcgagcatgtacgcaaccgcgtgaatatctggctcgacccgttctcggatatgcgcaaaaccggctttcaggccgccatgggtcagatcgccatcggctcgggcggactgttcggccgcggcctcggcaacggcatgcagaagcagctgtacctgcccgagccgcacaacgacttcatcttcgcgacttggtgcgaggagatgggcctcatcggtgcgctcgccgtcatcgcggtcttcgcctatctgatctggcgcggtctgcgcatcgcgcgctcctcgcccgaccgcatgggcatgctgctcgcgaccggcatcaccgcgaagctcgccatccagaccatcatgaacctgttcgtcgtcacgggcctcatgcccgtcaccggcgcgtccctgccgtttttcagctacggcggcaccgcgctcatgctccagcttgcggaaatgggcatcctgctcaatgtctcgcggtatatgcgcatagaggcgcgaacagaatagcaaaagcagttacagaccgccgcggcggagggagagatatccgttccgccgcgcggagggctgtgaaggggagacagaaacgcgctgtctgccgttcaaagcattccgcacattcagttatattcagaataaatttcgcctgccgcgcaggcgagagggggaaaatttacgatgagactttatattaccggaggcggaacgggcggtcatgtcacgcccggtctcgctattgcacgatattttgaaaagcgccagccggagacggtcatccgcttcgccggctcggcccgcggcatcgagaacaagctcgttccgcgcgagggctatccgctcgacgccatcgagatcatcggcctgtcgcgctcgatgagcccgaagggcatcctgcacaacatcaaggccgcaaagctcgcggtctccgcggtcgcgaaggcgaaaaagctgctgaaggcggcgcgtccggactgcgtcatcggctgcggcggctatgcgtccttcgcggtcgtcaaggccgcgcaggagctcggcatcccgaccgtcctgcttgaggtcaacgctctgcccggcaaggtcacgcagatgctcgcgaaaaaggcggaccgcgtgctcgtctgcttcgagcaggcgaaaaagctgctcggcggcgacgaaaagatcatcctgaccggcgcaccggtgcgtggcgagatcctcgcggcaagccgggaaaaggcgcgcgcgaagttcggtctcggcgagaacgaccagcttgtcgtttcgttctggggctcgatgggcgcgaagtatatgaacgagcacatggccggaaccctcgcgctcgagtgcaaaaacggcgtttcctaccaccatgtccacgccaccggcgcggcggcgcgcgactggctgccgaaaatggcgcgcgagcagggcgcggacttcgagaaccatcccaatatccagtacaccgaatacatctacgacatggcggaccgcatggcggcggccgacctcatcgtgtgccgcgcgggtgcggcgacgctcggcgagctgtgcatgctcggccgtccggcgctgctcgtgccgtcccccttcgtcgcagagaaccatcaggagaagaacgcacgcgcgctcgagtcggcaggcggctgccgcgtgctgctcgaaaaggacgccacgccgcagaagctgtatgatgagatcggcgatatgctgtccgacccgctgcggctgcacgcgatgggcgagaacgcgaccgtgctggcggcgcacgacgcgagcgacaagatctaccgcgagatcctccgggcgatcgaaaaccacggcaagtaaggcggaacacgcatgaatgagaacagaaaagcgccggcgcctccgcgcagaaagcgacggcgccggcccggaaaattcagacgcgcactgcacgccttgagccgtgcggtgctgctcctgctgctgacagcggcggcgatcgtgatgatgaccatctttttcaaggtgaacacgatctcggtcgagggcgcggaaaaatactccgtcgaggagatcacgaacgcgcttgacatcagcaagggcgataatctctatctctggaacaagatgaaggtgcaggagcatctgctcgaaaagctgccctatctcgactctgtgcgcatccgcaggcatctgcctgacgcgctcgtgctgaccgtgaccgagtgccacgcggcggcggcggtcaaggcggaggacggctcgtactactacatcagcagcacgggcaagatcctcgagcagagcacctcggacggcggccttgcggtcgtgaccggtcttgagggcgcacagatgcagaccggcgaggagatcgcgccgcagaccgatgcggcggtgagcgcctatctcgagatcatgcaggcgctcggtgagcagcagatggccgacgaccttcagttcatcaatttgcaggagctgaccgatgtgcgcatcggctgcggcggacgctttgacctgcgcatcggggcggtggacagcgacctgtcctaccgcatccgcttcgcgcagacggtcatgtccgagcggctttctccctcggacatcggcaggctgtattgggacgatgagggcaggatgcactttgtgcccgagacggccgaggaggtcgcgcgttcgggcagcgtttcgggtgcggcggatgcgatgaacaccatcgcacagaacccggacggcgaaaacgggctgaccgattcgcagaagaacaatgcgcagacctcgacggacagctcgaccacggacagcagcgatacctcggacagcgccgacaccacggacagcacggatacctcgtcggacgatacgacgtactacgatgacagcagctacgatgacagcggcgattactcgtatgacgacagctatgacgattcgtatgacgactcggactattccgacgagtcggattacagcgaataacgtatttgtgcaaaaaaagtccgcaagcacgcaaaaatgtgtgcaaaccgcccttgtccgccgcgaaaggcggcgagggacgggaaaacggacggaaaaccgcaagttttttttcacaggttcgctattttctgttgcaaaatcgggaaaatagaggtagaattataacaataggggcagactgtccgcgcggagcggcaggggctgtccgtcaaaggcacgttaaaaattatctgtacgatctttaactataaaacggaggatgtcaacaatgggttttgagtttgaacagggcttggataatgtagttagtatcaaagtcatcggcgtcggcggcggcggcggcaatgcggtaaaccgcatggtcgagagcggcgtgcagggcgttgaatttatttcggtaaacacggatatgcaggcgctgaacttctctcaggccggcaccaagatccagatcggcgagaagctgaccaagggtcagggcgcaggcgcgaacccggagatcggccgcaaggctgccgaggagagcaaggagcagatcgcagcagcgctcgcaggcaccaacatggtattcatcaccgccggcatgggcggcggcaccggcaccggcgcagctccggtcgttgcacagatcgcccgcgagatgggcatcctgaccgtcggcgttgttacccgtccgttcgcgttcgagggcaagaagcgcctcgagcaggctctggccggcatcgacgagctcaacaagaacgttgactctctcgttatcattccgaacgagcgtctgaagtacgtctccgagcagaagatcaccttcaagaacgccttcgagatcgcagacggcgttctgcgtcaggcagtagccaacatctctgagctgatcaccgttccgggcttcatcaacctggacttcgcggacgttacctcggtcatgaaggacgcaggctacgcgcacatcggcaccggccgcgctgctgggaaagacaaggcagctgaggctgcacgtatggcgatctccagcccgctgctcgagacctcgatcgacatggcgcacggcgtgatcgtttccgtcatcggctcggacgacatcggtctggacgaggtcgagaccgcagctaccatggttcagcaggcggctcatccggatgcacacatcatcttcggtgcgttcatcgacgacaccatggatgacgagatccgcgtcgtcgttatcgcgaccggcttcgacaacatcccgaattccgcaaagatggacatggacggcgccggcctccagcgcaaggcggctccggcacagaccggctccggcctgttctcgaatgcttccgctgaggctgagcagaagccggcagcaaagccgcagtcctcgagcgacgtcggctcggacgatgcagccttcgatgttctgatgcgcatcttcgacaaggaccaccgctaaaaactgaatggattcaaaacagcccctcggggctgttttggtctgatgatacaggttaaatctctgtaaaatgagagatggctgaattcctgtaaacctgagagagaaaggagagtgatcgctgtgagtacggaccctggaagtagggagaacaatctaactcgcggcggtgctttccgataagaccgccgaagaaaggcggttttattatatggttgaatttttcaagacgatcgacggcaggatcacggagatcaacgaattttctgagggctgctgggtaaatatggtacatccctcctcggacgagctggcgcagatcgcgaaggcggccgaggtagaggaggagttcgtccgtgcggcgctcgacccggaggaaagctcgcgtgtcgacaccgaggacgagcagctgctcatgatcgtcgacatcccgatggtcgaaaagagctcggtcgaggacggcggtcagctgttcagcaccatccctatgggtatcgtcgtggccaagagcgcggtcatcacggtctgcctcgaggacagcatcatccttcgctcgatcgcggagggcgcggtcaagggcgttcataccgcgctgcgcacgcgctttgtgttccagatcctgctgcgcatcgcaggccgcttcctgaaaaacctgcgcatgatcgagcgcgacttcacgcgcatcgagaagcgcctgtacgactcgctcaagaacgaggagctgattcagctgctcggcctgagtaaatcgctcgtttacttctcctcctcgctcaagggcaacgaggtcacgatggagaaagtgctccgcggccgcgtgctcaagctgtacgaggatgaccgcgacattctggaggacgcgctgatcgaggtgcgtcaggcgatcgagatggcgaacatctactcgaacatcatggcgggcacgatggacgcctatgcgtcggtcgtttcgaacaacctcaacatcatcatgaaggttctgaccattctgaccatcatcatgaccatcccgaatatcgtgttcggcttcttcggcatgaacatcggagagggaaatataccgggcgactgggtctggtggatgccgctcgcgattaccgtgatcggctgcttcttcgcgtggtatatgctcaagaaaaagaacctcgactgaatttctccaagaataaaagcacccccggcgcagaaaaagactgcgtgccgggggttttccataaaacaggtttcaagaaacagataatatggcagctgccggacaagggttgctgacaaaaaggggtatgtgccgttaggacacatatccctttgtttttgctgttttaacggttgattatgaccgattatttgccgtcacgcatctttcggagggcgcttgatgggatttgccgccctacttgaaaagtgggctggaacagtcgctttgccaaaggaaaagtgagagctatgtactatccagaggatactgcaaggaagatcaattctgattcattccgaatggttcataggtcagcagctttttcttccagagggtctctgcatcaatgatttgattgtccggaagtgccttggacaaaacctgcaacactgtaaactgcaaatcgtggcaactatgatttgcagacttcaagtgactgatcattcccttgttgtttccgtgaccgcccgtagcgacatagaccgaccaacgacccagcaggccgtcatagccataggtcgagccaacatatctgttccccgtcttggtgtccacaatcagatagaccgcgttgaccgcagccatggccgcttgccacagctcatagtccgtatcgttttcgacgacttcttttagttcatcaaaggataaaataaggttttcgaatcccacaaaaggcttctggttctttgactcaattgccacgatgggcttttcggtggtggctttttgatgccacatccgagctgacccgccccagtcaatcaccagctttccctcgtactctttcagcaaatccacatattgcaaatcaaaaaacgccatttcgccacggtattccatggcttcacagtcaggtaatccggcaggacatacatccggtgtatcaggcacagaaccattgacacgataacaagagtgcagtctcgcgtatgtaccgccatcgctgatgaatgtgatccagtaggaatatcctttgctgaacccgtctttttggtgctgtgtgtattcatgcgccataccggctttataacattctctgaaacgctcgtcagataatgcatgacggatcagcttgacatccttcgggtcaagcccgacattttttaacgcatcggaaaagttcagaatcgccacggaagtccctcctcaagttgctctctatttcaaattctaccacatattttttcgttgtaaagcgtgccttcccactcatgcagaatctccgccagctccggggtcagacgtttgcggcactcctgctgcagttcctccggcacgccgtagaaagcctcagcgatgctgccggtgatggcagcaagggtgtcgctgtcaccgccgagggataccgccgtgcgcagcgcgtcttcaaaatttgcgctttccagaaatgcaataatagcctgcggcacggtttcctggcagctctccacatggtgataggtagggcgaatctcattgcagctgcgactgagatcgtagccaaactcgcactccacatacgccttgatttccgcttttccgtgacctgtgcgagcgagaaagatcgccgccgcagcagcctgcgcgcccttgatgccctcggggtggttgtgacttacttcggcggtgagccgcgccagacgaagcgcctccgccatgtctgttgccagccatgcggcagacgacacccgcatggcgctgccgttgccgtagctctggtagggctgcgggtcatcctcatagagccagccgccaaaatggatgccatagccccggtcagggtaggcgcggcccagtcgctgcatctcccgcaccagtgctgttttgatggcggcatcgttttgcccgcgagtgctgagcaacgccttcgccaccgccagcgtcatcaccgtgtcgtcggtgaagtcggaacggcggctgaacagcggaaaatccttggccttgtagttgttgcagtcgaactcgtaggggctgcccacgatgtcacccaaaatcgctccgtacatatttcttacctccctcttttctgcacgtcctcgtcgatgcggcgcttccagtcggcgctgaggggccgggcggcgcggacgctgcacacggcctcactgatgacctcgtagttcagcgccgtgccagcctcgtcacacttgtagttcaccgcacggtcagcgccgatatcgaagcgcgccgcctccttggctgcgtcgatgtttgcgccgaggaacaggaattcccagccgtatcgctccttctgccgctcgatcatgcggcgcactcgctcataatcgtagcggcggctggcgttttcgtagccgtcggtggtgatgatgaacatcgtcttttccggcacatcctcccggcgggcgtacttgtggatgttgccgatgtggtggatggcgccgcctacggcgtccagcagcgccgtgcagccgcgggtgaaatattccttctcggtcaggggcggcacttcgcaaagcggcaggcggtcgtggatgaccgtgctgtcgttggcgaaaagcaccgtggagaccaccgcttcgcccgactccttcttttgctgtgcgagcatggagttgaagccgccgatggtgtccgtttccagtcccgacatagagccgctgcgatccaaaataaaaaccaattccgtcataaaaaaagccctccttcgtttgattacgctcatattgtagcgcatccgaaggagggtttggtcgcctgtggggcgacatttatgtttgatccggagttgaccccaaatatagcgtgtcatgattgaatatcagcgtaaccggctcattatagaggcggttgacggcattgatattatcaataaacgggcgaacgcagctgctttgtctctctaaaagttgctgcatggtggtctgcactcggcgatttttgtaagcgcctattctttcaccggcttcgatcaaagtttcatctatctgcgacttattgatacccggtatcttggcaatcgccgttccagctcccttgtttattgcagacaggccgccaaacagatgcgcttggagagaggatttcgacagattctcgatttgagaatatgccagcgaataaaactctctgtattggaaggccatttcatctattctctttgcaatagcggatagatatgctttctcgtagttctcttgtagcacaacctcgaggaaataggcgaaaccatagatgtagagagccaactggtattctttaaactcaccttgaactttttcaagcattttctgaacatcatgatcactatggagcagtgctttcttgcccaattgctttttgatctgctcttgatagaagtcaatttgacgagcagcttcttggcgtatgtccaaaacctttgcgtggttggcagccttgtacttttcgctgttccagttgtacttgtagttgttttggatgtccatcagaaagttcaaatctgctttcaatgcggatttttctttctgcgcaaggaaatccagcatttcctgctgtacttcttgaatagcgtccagcttcttatctatgttggcaagtgtcgcagctgcaaggagcgtggtggggtcacacagcaatggattcagctgtgcctgtcctactattccgtgctccccgacagctgtcccgagaaagcctgacttctccttgaactgagcgagatgcgtgcctttgggaatggtcactttataaaatccgctcgtggcttgtccgtggcttgttacctgctgtatggcggatacaacaggttcaaaccccgttccaagtgccgtcagcctcgacaaaggtattttgctatatgtctgcacgctgatttcatttttgacttccagcggcgcaagctctgttgcagacattgctttcaagagctcgttctttcttgctgtctcaagttcgttcatctcggtccctcgctttcgtgatttcacaagagagcttgttatttttgcgaatcatatcttagccgcaactctcacgctcccagcagactttggtcgaacgcgaacaacgcctcgttgatcttgaaaatgtcatagtcccgctgcatgatgaaatactcgatgatgacgtcaaacttgctgctggggctgagggcgtagcccgcgcgggcgatgaggtcgcgagtctccggcaggctcagctccagcgcgatggcgaaggccaccgccgtgggcttggagggcttgtagtccgggttgttgcggattttcgagaacagtctgcgatctacattcgccttcctgtaaacctcggcgtcctttttgccgctgcggtcgatgagctttaaaagcgtttccgaaaaaccggcgtccagatgcgcaagcgcctcgtccagcccgcccaccgccataggtgcgtccttgcaggcggtcagcgcgcggctttcgacgacgcctatccggcgcatccgctcccggcggggatcggtatgggcatccacatagtggtcgtcgatgtaggcggcgatgtctgcgaacagcttattgccggtcgcatacgccgcgcggtcgaaaatgacgatgtataccgtcatgtcgttttccgcgagaaattcgctgatggtgtccaccgccacgcggagcgcctgatccttggggtagccgaagatgccggaggagatcagcgggaaggcgaccgtctcgcagccgtgctcctttgccagcgcaagactcgtccggtagcaggagacgagctgttcccgctcgccgcacctgcctccgttccacacggggccgacggtgtggatcacatatttgcacggcagacggtatgcgccggtgattttggcgttgccggtccggcagccgcccagcgttcggcactcttgtagaagctccggcccggccgcgcggtggatgcagccgtccacgccgcctccacccagcagggattccttcgccgcgttgacgatggcgtctacgctcatttttgtaatgtcgtttcgaacgatgataaggggcatgatactcacctctgtaaatttattgtagcataacaaaaacggttccacaatgactaaatcatttcaagtgctcttctctaagggcttgggactatctcaaaatacaaaaatgcgcgtctcggctgcgttggtttcctgccggagagcatcattgccgaactgttcactcatgcagcaaaaagcagaacagcgtgacttccgccacgctgttctctctaaacgttataaacctgtcttatgcgctgctgcgcgccgggggtgctttttatgtttatggttcctcgccctcgatggggtgggggcggccggcggcgtagagctggcggcggatcgccgcgaacatacgctcggccatgtcgagatagcgccgaatctcgacctcgttgatctcaaacggcaggtcggtggggtagcgcgtttcgatgtacagatcgttgagcgccgcgctctcatcgaggtactccgagaatccgtccgggtcgagtcggatggcctgacggcacaggtaggtcaggttgtgaccgtcgaagtgcttgccggtgcggtagagcaggtagcctttgagcgccttttcgatggcctgctgacagtggaaggcgatattgtaggcgtcgcctccgtaggtcagcagcaggcgtgcgcattgcaggtcgcacagcgccttgtcgagccatttgtagtaaaaatgactgtctgagccgcccttacgccgtctggtcatagattaccctgcctttccgggcgatccatgcggcatacgaggtcttgtccgaaatcagatcgtcccattcaccgatcgtgtaaacgctcaggctgaccggcacatcgaccgtgatcgccagatgcaggtgggtgcgcaccgcgcgggcgtccgcatcgtcggaaaggatgacgcaaaggctgaacgccttgagcttgtcggtcgccatggtgcgcttttccgcatagagaatgactttccggggtgtgcacgccgtgaggatgtcgcgcacagcctgttcgatgatctctgtcatttaggcttcctccttttgcggcaggggagagagcgaggcgagtgcctcgaagtgaggccggccctctgcttcgccgcggatatagcgcgcgccgtccacggtgccgcagagcagcgacacctgctcgccgaaggcggtctcggcggtgtaattgacctgaagcgaggacacgaagcccggctgcttctgaaggtcaagcgcatccgagatcagctcgacgacacgcacattgttgacatggttgttgatgtcgaggtcggaatactgaacggggtggatatgatgcagccgcacgttgtcgcacgacagcttgggcagcggggcgaacagctcgccgctcgtgcacgacaggcagccctgcgcggccgggagcgcggtcggacgcagaatgcggtgggtcgacggctcgagcgtgacccacattgactgcgcctcgcccacctgtacgtcgtcgatatagaatgcgaagcagcggtaccagctcggccccttgaagccgggacaccaggtctcgcagcgcacgcgctcatacggcagcagcggccgcgtgagcgtggccttgatgcgcgagagcacccagaccacgccgagcgccgcagggccgaggccgagcgcctccgcgtgcacggtggcggcgtcctgcatcatgctccagagaaaggacggctttgcgacgccgcggttgtcgatgtggctgtagctgatctcatattcacgggaaagaagctcgaccatgggaaacacctccgaaaaatcaggcgaaaagacttgcgatgagcgtcgagagcatgttcagcagcgtgacctgctgctgggtgcagccgtccggctcgttcgtgctcgggggcgtgggatgcttggcatcctttgccttgtagtgcgcggtcagcatggccgggcagccggcaacgcgctcgagcgaggcatagctgaaatagacctcgccctgaatgtcgatgctgtcgtcgagcagcgcgagctgacgctcgagctcggccgtgccgtaccagatatcgccctgctgcgcttcagccgagcggtacgcgccgagaccgatatagagcgcaacgtcgctcgtcgagaccgccttctgccaccagtgcacgagcgtttcgaagtcggcggccttgtagccgatcgcccagtaaagctgcggacagatgtaatcgaccgtgccgcggcggatccattcgagcgagtcgcagtacagctcgctgtaggaggactggccgtgggtgttgctgccgcgggggttctcggacttgttcgcccagataccggccgggctgacgccgaaggagagctcggggtcgagtgtgtgcagcgtctcatcgagcgaagcgatgagcgtgttcacgttgtcgcggcgccagttgtcgatactgctgaagtccgcgccgtagcgtgcgaaggtctctgcatcattgaaatccgtgccgggatagaagtagtcgtcgagatggatgccgtccacatcataattgcggacgatctcggccgcgccgtccatgacgagctgctgtaccgccgggagaccggggttgaagtagtagttgccgtcgtattcaaccacccattcaggatgctgacgcgccgggctgctctcgggcagggcgtcaagctcctccctgccgtttcgcgtgatgcggtagggattgatccaggcgtgcagctgaagaccgcgcttgtgcgcgccctcgacccagtacgcgagcacatcgaagtccccgtcgggcgaagcgccgcaggtgccgctgacgtagcggctctgggggaaaaggccggaccggtagagcgcatccgccgagggacgcacctgaagaaagaccgtgttcaggtccatcgccgcgatgttgtcgagcatggtgtccgcctcggcggcgagcgcctgcgcggtcatgccggcagaggacggatagtcgatgttcgctacgcttgcgacccagacgccgcgcatattgtcctgtgcggtctgcgccgcgccggcaaacggcacgagcatggcgagcacaagtaaaaccgaaagtatacgtcgcttgagcatattgttctcctttatatttatctgtatagcatgcttctctgggtacattatagcacagggcagacaaaaaagcgaggggaagagaggaatggaaaagcgtgtttccgccccggcgcacgcgacggaaatccgtgcgtttcggcaggaaaatgaccgggtttatgcaaacaaaatgcacagcgcacgaaaacttcaattattcaggaagattccagggaaaataaagaaaagttaggcaaaatgtaaacaatgtaatgaaatacgcgaatgaaaactctgataaaaataaacagtattttggcggagtttttgtgcgaagagtgaaaaatgtttaattcgtacaaaaatatgttgcataatacggcaatagtgctatgataatacgagggaaaaaccagagggtttatattcagagagaaggagacgtggcctgccatgttacgatttttggagaatatgcagtttgcgctgtttgttttcttcaccgcagcatatgcgtatcagatcgtctacctgttcgtcggtctcatcggcaaaggcaggggcggcagagaggacgcgaagctgcatcgctatgcggcggtcgttgcggctcgaaacgagtcggcggtcatcgcaaaccttatccgcacattaaaggagcagaactatccgtcagagctgctcgatatatacgtcatcgcggataactgtacggacaatactgcccagatctcgcggaaggcgggcgcttatgtctacgagcgctttaacaaggtgcaggtcggcaagggctacgcgctcgagtacctgttccgccatatcttcgaggacaagggcgagacggcctacgacggctttttcgtgttcgacgcggacaacatcgtagacagggacttcgtccgcgagatgaacaagatgttcgacaccggtgagtacaccgcgctgacgagctatcgcaactcgcagaatttctgtgcgaactggatcagcgcaggctatgcgctgtggttcctgcgcgagtcgcgcttcctcaaccgtccgcgcacgcagctcggcgtgaactgcgcggtctcgggcaccggttttctggtctcggcgcaggctgttcgcgaggatgccggctggccgtaccatctgctgaccgaggacatcgaattctccatcgcctgcgctacgcgcggccgccgtatcggctactgcggcaaggcagtcatctacgacgagcagccggagaagttcaagcagtcctgggaccagcgtctgcgctggagcaagggcttctatcaggtcgacgcgaagtatactggctctctgctgcgcggctgcacgcgcggcggccgcgatggtatgtcctgctacgacatgctgatgacggtcgcgccctgcaacctgttcaccatcgcggtgctcgcgctgtcgatcatcgtatgcgcggtgagcctaacgcagccggcgttcattacataccgcgcgatgcgtgttctgggccgcattttctggctgaccctgcgcggcatcacggcaagcctgttcctgttcggcgcggtcacgatggcggccgaatggaagcgcatcgcaggcccggtgcacaagaagatcctctataccttcacgttcccgttcttcatgctgacctacgttccgatctcggtcgcggcgctcgtcggcaaggtcgagtggcgtccgatccgtcacggcatcgcctcgtccaactcctccatcgagagctgaaaaccagaatgaatatgcacaaaccgccggatgcagctgtatccggcggttttctgttgacagagggcgaaaaactctgtatagtggatgttacatggacagaatggatgtgttttgaatgcagaaaaaggtacttgcgctgcatgatctatccggcttcgggcgctcgtcgctcgtgccgatcatatcggtgctgtcggcgttcggccatcagtgcgtcccgctgccgacggcggtcttttccacgcacatggcgataccgggctgggtcaagagcgacctgaccggggagatgcacccgaccatcgaccagtacgaccgtctcggtctgcggttcgaggcggtgtatgccggcttcctcggctcggcctctcagatcgacagcgtgcgcgaggcggccgagcgcctcaaggcggagaacggtctgacgctcatcgacccggtcatgggcgacaacggcgaggtgtacagcagctatacgcccgaaatgtgcacgcggatgcgcgagctctgcgcgatcgcggacctcatcaccccgaataccaccgaggcggcgatcctgctcggccgcgacccggcgtccgcgccgcagtccgagcgcgaggcggaggagtggatgcgcgcgctctatgaggagtacggcgcgtcggtcgtgctgaccggtctggactacgagccgggacgggtcggctcgggatgtctggaaaacggagagctgaccatcagcctgcatgagcgtatcgactgttattatccgggaacgggcgacgtgttcgccgcggtcatgctcggcgcgctgctgggcggcgcaaagctgcgcgatgcctgcgtcaaggccggtgagttcgtgcgcgacaccatcgcctacaccgcgcagcaggggactgacccgaatttcggcgtgcagttcgagaagctgctgccgcagctgtggaataagtaaaaaaacctgtgcaccgcgaaaaaacggcttgcacaggttccttttcgtgtttattttctgaggaattccggcagacggcggcgcgcctcgacgcggtagatgcgcgcaccctccgaggaaaatttctcctcgtattcggtcatgacgttgccctcgaagtccgagttgtgcaggtcgagcgagatgttctggagcagccagccgaactggcagatctcctgaaggctccactcgaaaaagcgctgattgtcggtcttgaagcacaggtcgccctgctgccgcaggatctcatcatagacctccagatacgcgcgccaggtcagacggcgcttgcgctggcggttgggcggccacggatcggagaagttcagatagatgcggtcgacctcggccggagcgaatacctcgcgcagctcggccgcgtcgaaggagacgaagcgcagattggggagcggatgctcctcgcagcgctcggccgccatgatgagcgcgccctcctcgcgctcgaccgcgatgaagtttacgtccgggtgaagctctgccatgccgatggcgaagcggcccttgccgcagccaatctcgaggtgcagcggattgtcgttgccgaacagcgcacgccacttgccgcgcagctgcttcggctcaaagaccatgacgtccgcacaggcggcaaagcgaacgtccagatttttcttcttgcgcattctcatgcgtgatatattcccctttatacagcgtattttggttcagtgattccaacactttattatagcacagacagacggcagagcacaatataaaatgcggaatttgttcgaaaactgtataaatatgagtaaaatgcactttggtgttgggaaactcgtgcagttgtgctataatgatagtagttcggtgcacagtatatacggcaacaccgcacaatgaaatcgcttttgttccactatgcggcattgccttaaaaagcggcgcacggaattgcttctgagacaaaggggagataaatatgttcaaacgttccagcggcgtgctcgcgcacgtgacctcgctgccctcgccgcacggtgtcggcacgatgggcaaaaccgcctgtgacttcatcgacttcctcgcggacgcgcaccagacctactggcaggtgctgccgctcggtcataccggcttcggcgactcgccgtaccagtgcttctctgcggcggcaggcaacccgtatctgatcgacatggatctgctcgcagagtacggtctgctgacggcggatgaggtgcgctccggcgactttaccgcttcgccggacgccgcggacttcgagcagctcgccgatacgcgctggccgctgttccgcaaggcgtattcgcgcgtcacgccagagatgaaggcagctatcgcggacttcaccgaggagaaccgcgaatggctgcccgattacgcgctgttcatggcgctcaaggaggagaagtaccaccacgcgccggtctatatgtggccggagaaggacgtccgcgaccgcaagccggaggcgctcgcacgagtgaccgaggagctgcgcggcgagatcgacttccgcattttcctccagtatatcttcttcagacagtggaacgcgctgcgtgcgcacgcaaaggagaagggcatccagatcatcggcgacatcccgatctatgtttccgccgactcgtccgacgtctggacgcatcccgagctgttcaagctgaagcccgacctcagccccaagctcgttgccggcgtgccgcccgactactattccgcgaccggccagctctggggcaatccggtctataactgggcggcgcacaaaaagaccggctacgcctggtggatctggcgcatgaagagcaatatggcgctgttcgacgtcgtccgcctcgaccatttccgcggcttcgcggcctactgggaggtcgacgcagccgaggacaccgccgtagacggcaagtggcgcaagggccccggcatggagctgttccgcgccatcgagaaggcgctcggccccattccgctcatcgcggaggatctgggcgtgcagaccgacgaggtgcgcgagctgctgagcgcgagcggcttcccgggtatgcgcgtgctcatcttcggcttcaccccggactatgacaacgagcatctgccgcataactacctgccgaacagcatcgtctacacctcgacccacgactcgcagaccgtctgcgagcagatcatggacatctgcaccgagccggagaagcagttcgcctatcgctatctgcgcacctcgcacgcggaggcaatgggctggagcgcgatcaagtgcgtctgggcatccccggcgcatatcgccatgaccacgctccaggacctgctgtcgctcggcgcggacgcgcgcatgaacaccccggcgaccatcggcggcaagaactggcgctggcgcgtgcgtgcagaagcgctcaacccgaccgtagccgcgctccttggcgacatcacaaaaacctatatgcgcggataacgcataccccggacacagacaggaagaggacagcaaagacaatgaaaatgaaaactgcgatttttgatttggacggcacgctgctcaacacactgggcgacctgtgcgacagcgtcaactgcgcgatcgttccgcgcggctttccggccgtagacgaggagctgacgcggcagcgcgtcggcaacggcgtgcgccgtctggtggagcgctgcatccccgaggaaaagcgcaccgaagcgatgatcgacgaatgcctcgacgatttccgcacggcatacaacgagcgcatgatgaaccgcacgcagccgtatgacggcatcgtcgatatgctgaaaaagctgcgcgagcagggcgtctcgattggcgtcatgtcgaacaagtacgacttcgctgcaaagaccctcgtgcgccactatttcggtgatctcgtgcagctgacgctgggcgagcggccgggcattccgcgcaagccggacccggcgagcacgctcgagctgatgcacgagctgggcggcgtgccggagaccacgctctatatcggagacagctcgaccgatatgcagaccgcctgcaacgccggtctgacggcgatcggcgtcatgtggggcttccgcagtccggaggagctggaggagaccggtgcatccgcgctcgtcgcggagcctgcggagctgctcccgctcttcgagcgcggcctgctgaacgtagatgcactcacgcgggcgttcacctcgcgcggcttcgcgttctcgtacttcccgacagcgaatgaggcagcgcgctacattgcgtccgcctgcgcgggaaagagcgtgtcgctcggcggctcgatgacctttcaggagatgggcttcccggaggcgttcgcggacagcacggaggtgcactggcactggatcacgaagggcgaatattaccagacgccggatatttatctcacgagcgcgaatgcgctgagcgagagcggtgaggccgtcaatatcgacggcacctgcaaccgcgtggcagggacgctgtacggcccgaagcagtgtatgttcgtgtgcggcatcaacaagctgtgtccggatctcgcgagtgcggtcgagcgggcgcgcaatgtcgccgcgccgaagaacgcgcagcgtctcggcacgagaacgccctgcgcggcggacggcaaatgtcacgactgcaagagcccggcgcgcatctgccgtgcgctggtggtgcatatgggtgcgccgaaggggttcgagaaatgcgagatcgtcctggtgggcgagtcgctcggttattaagacagcatatcggaacgggggcagggaagagcctgtccccggcctgtcgaaaaaagttttggagaaactgaaaaaatatgttgacaacaggcgaaaaggttgatataataaatatcgttctgatgcggtgtgcatcgaacgggaaagcgaatatgcggctgtagctcatctggtagagcgccaccttgccaaggtggaggtagcgagttcgagcctcgtcagccgctccactttctcaaaaatcacatatcggtatgcggctgtagctcatctggtagagcgccaccttgccaaggtggaggtagcgagttcgagcctcgtcagccgctccatatggtaccatagccaagcggtaaggcgtgggactgcaactccctgatccccagttcgattctgggtggtacctccataaaagactgatacttcggtgtcagtcttttttgtcgttctccggagaaaaagcaaggaaaatgttgacaaaaatcgggggggtaatatactatattatatacaggatacgcaaacgtatccgcaaaaaaaggaggataccccaatgaaaaaattaaagaggattgcagcgctgacccttgcagcggcgtgtgccgcgactgtgtgcgccggtgcggcgttcaccgatcagagcgacatcaaggtcgacagcagggtgatcgacacgctggtcgagaaaaacgtcatcaagggctatgagaacggctcgtttcagccgaatgagacggtctcgcgcgcggagatggcgaagatgatctacgttctgcgcacgaatggcggcacagacgctacgacatatgcagtaaaaatgtctactgattttaacgacgtaaataaccactgggcaagcggctacattaaatactgttacgcctatggcatcgtcgccggcaaatcgagtacggttttcgcgccggatgcccccgtgactacggttgaagcggcgaaaatgctgctggtatactcgggcgttgatgcagcgcagagcggtctgaccggtgcacagtggaaggccaatacgatgaaacttgcagatcaggatggtctgctgaagggcgtagaggcagatattgatgctccgctgccgcgccagtatgccgcgcagatgatttacaacgaactggcgtacagcttataaggaaatacagcactctgaaaaatcccctcttttaaggggattttttcaatcttaataaaatcgaaagaaattccctgcggaaaacaacagaaacctgtggtaagatagaagcatggaaagggggagagagaaatggaaaagctgaaggtactggtggtggacgacgaccgcgagatcgtggacagcatcgcgattttccttcgtgcggacggctacgagatcgagaaggcctataacggtctggaagcgctcgacatcgtgatgacgcacacgatccatctgatcatactcgacatcatgatgcccgagctggacggcatcaagacgctgctcaagctgcgcgagagccgcaacattccggtcatcctgctctcggcaaaatccgaggacgcggacaagatactcggtctgacagcaggcgcggacgattatgtgaccaagccgttcaatccttccgagctggtcgcgcgcgtaaaaagtcagctgcgccgctatacgcagctcggcgcgatgcagaagaccgccgcgcagatcgtgatacgcggtctgtcgctcgataccgagagtaaaagtgtgatggtggatggcgaggcggtgcggctcacgccgctcgagtacaagatactggagctgctgtgccgccacccgggcaaggttttctcgaccgaggagatctaccggcaggtctggaatgacgacatcgtgagcgataatgccattgcggtacatgtgcggcacatccgcgagaagatcgagatcaacccgaaggagccgcggtatttgaaggtagtgtggggcgttggatacaagatagagaggagcgagtgaaaatgaacatcaaggggatcttacgcagtacggcagcaaaattcatcgcgtttgcgggcattgtggggtgcttcgcggcggcggtgctcattggagagaacgtcctggccgatttcggcagggacggcatgatttatcagtttgaaacgaatttctctcagtcgagctacatggccgggcaggtgaacaacacggcggtaacgctggaggcggctctggagggacacatatccagacaggagttcgagcagcagacccgggattttccgggcagctactacggcgtcatgaacggaaaggtgatttcgaacgccgaactcagcgacagcgcgacgcagaacgcggcgttttacctgattgcccggccggacgacgcgacgcagagcaatatttcgtggtactatatgccatttcacgatgagccgattgacgacagctttgacgatgagccgactgatgaatacaacgtccggtctgctacttatccgctcggcacggtcatcagggtgtgcgtcacctccgagcaggcggcgcagtatcaggaaatatggagcgcacagagggatacgttcgcgcatacgatttatatcgttctcacgctgacggcggcggcgctgctgctgttcgtgtatcttctgttcgtcaccggacgccgcccggaggacgaggagatgcacctcgcaacgctcgaccgtctgccggtcgaggggaacgtcctgctgttctggagcgttctgggacttgcgggcggcctgaatatcgcgctcatggaggaaatcgcgaacggttcgagcgaaatgacgttcctgctggtgccgtctgtcgcgtttctgacggcggcgttcgcgttcgcgctggagcttacgctgtcgctcgtgcggattgttaagaaccgcagctttgcgcggcagtgctggtgcgtccgctttgtccgctggtgccggcgcggtgtgcgggagagtacgcgaaagctgatgcacctgctgacacgcgactacaagacgcgcaacgtcctgctcctctttttcggctacacggtcgttctggcgcttcttgccacagtattcggcgcggagggcggctcgtttctcgcattcgtgctcggtatcgcgtggttcctcgcggcgggttatttcctcgcgcggcgcattcacggctttgagcgcatcgtggaggcgctgcatcggatgcgcggcggcgatatggaatcccggctgaccgatatgccggagggcgtgttcgccgagatggcagaggatctgggttcgctcggtgacggcatgcaggcggcgcttcagaacgagatccgcgccgagcgcatgaagaccgagctgatcacgaacgtcagccacgacctcaaaacgccgctcacgagcattctcagctactccgacctgctctgccagatggagctgacgcccgaggaggcgaacgactatgcgaaaatcatccaccagaaaggtctgcggctcaagaacctgacgagcgacctgttcgacatctccaaggtgcgctcgggcgtggagcagatgaactgcgagcgtctggacgcggccacgctcgtgcggcaggcgctcgcggagcaggagaaggccattcaggcgagcggccttgcgctcaaggtgacgctgcccgaaaaggagcttcccatccgggcggacggccgcaagatgagccgcgttctcgaaaacctcatcggcaactgcgtcaagtattcgctgcacggtacgcgcgtctttatctcgcttgcggagtgcgatgggcaggctgtgcttgaggtcaagaacaccgcgaactacgaaatggacttcgcccccgatgaaatcaccgagcgctttgtgcgcggcgacgcggcgcgttcgaccgagggcagcggtctgggtctcgccatcgcgaaaagctacaccgaagcttgcggcggcgcgttcgaggtaacggtggacggcgacctgttcaaggtgcgcatcagcttcccggtttacggtttataaaatcttttctgccgcgcttgcaatttgaaaaacaaccgttataataggaaatgatatgaatgctgcaaaacagcggcgacaggaaaggcggagttttattatgatgacgactgcaagcgagcataaaatcgacaaggtagagaagatggccggcggcaagggtcatgtgatcatcgagcacttgctcggcgaagcggagctcgacggcaagtgcggcctgtacgcgaaggtaacgatcgagccgggctgcacgctgggctttcacgagcaccacggcgagaccgagacttattacatcctgagcggcgaaggctcgtacaacgacggtgagaagtccttcccggtcaagaccggcgatgtgacgttctgcccggacggcagcggccacgcgctcgacaacaccggagacaccgacctcgtgttcatggcgctgatcatcaagaagtaaacagggttaaaagaaaaggacgctttcgaaaaacggaaagcgtccttttagtttgtcggaaaacgcagttttcgaccgtcttaaaacaaaaaaacgaaccgggagcggttcgctttcctgcgcgaaatcgaaaagggagtttcgatttcacaaagaaaaaagagtaaaaagaaaggaaaaagagaggtggtctatgttagaaaatgctgcgctggccgcagctgcaaggatgtattttatggggaagcgtttccttgctcttccctttgacaagttcagtatagcgcgaaagttgcacaaatgcaagttaaatatttcgtcatttcgactaaattttcgttgagttagcgcgtgcttatttgatggctggaaatgggcatatgcaacaaaaataaagagaaaggtttatacaaaacgctgtttgtgaaagttgaataatcgacggcaggggacttgacaaagcgtgaatattgtatataatgagtatatacaataaacagaggagggagagcgtgaacatcattctttccaacacggacagcgccccgatctacgaacagatcacgcggcagctccgggcgaagatcgtctcaggcgagcttacggcagggcaggcgctgccgtccatgcggctgctcgccagggagctgcgcatcagcgtcatcacgacaaagcgcgcgtatgaagaactcgagcgcgaggggctgatcgttacgcagaccggacgcggcagctttgtcgcgcaggtgagcggcgcgcggctgcgcgaggaacagctccgcgccgtggaggcgcatctggcgcaggcggtacacgcggcgaagcagggcggactgaccgcggaggagttcatggagatcgcacaaacggcttttgaggaggggaatcaatgaaaaacgcactcgaaatcagagggctgaccaggaaatacgaaggatttgcgctggacagcgtcaatctgactctgccgcgcggctgtgtgatgggtctgatcggcgaaaacggagccggaaagacgacgctcatcaagaccgttctcgaccttgtgcggccggacagcggtgagatcgaggtgctcggcggacggccggatgatgcggcggtacgtgagcgcatcggcgtggtgctggaggacggcggctttctgagcacgatgaacgccgcgcaggtggacacgctgctcggcagagcctaccgcgcgtgggacggggcacagttcgcggcctgtctcgaccgcttcggcatcgaccgccgcaaggccatcaaggattattcgcgcggcatgaaaatgaagctgtccatcgcggcggcgctctcgcacggcgcggagctgctgattctggacgaggcgacgagcggacttgacccggtcgtgagggacgaggtgctcgacctgctgtacgatttcatgcaggacgaaacgcacgccgtgctgctgtccagccacatcacgagtgacctcgacaagatcgcggacaatatcacgttcatccatcgcggccgcgtgctgctgagcgagggacgggacgagctgatcgaccgccacggcgtgctgcgctgcacggaggagcagctgaacgcgctcgacccggacgcagtccgggcggtgcgaaagggcgcatttggctgcgaagcactggtcaaacgggacggcattccggaaaactggccggtcgagccggtcagcgtggaacagatcatgctgtttctgacgagaggggaggaagcataatgaaggcgatgctttttgcggactggatgagtatccgccgttcgatgaaggcgctgttgtgggtattcgctgtcatggcagtcgcggcgtttgcctatggaggcagcgcattcattccgttcatggtcacgatgctgtcggtcatgggtccggcgacgctgatgagcacggatcatgcctacggctgggacaggctcagcctgacgctgccggtgtcgcggcgcgatatcgtgagcagcaagtttacggtcagccttgcgcttaacgccgcgctgatgctggtcggcgtggttctgacgatggtgttcagcgcagtgaaccgcgacggttcgcttgcggaaaacctgctcggcctgcttgcctgcgaggcagctgctctgctgctgatgggcatggaatttgacctcatcctgcgcttcggcacggaacgcggccggtattttctgatgggcgtcgtttgggtgccgatcatcgcgctgaccgcgctgaaaaaccatccggcgtttaaccatctggtacaggcggtcggcggcatggacagctggcctgtgagcaggtttacagcgttcctcgtgggctgtctcgcggtctgcggagcggtttacgtcctctgctggcagatcgggatcaaaatctatcagaaaaaggaattctgagcaggcaggcggcagccggccggataatcctcgcgctctccgcatatgatatggcaaaggagaggggagaatggggatttttctgaccgtgctgccgcttgccgtcggcgggaccgccgcggtgctgacgatggatgccatggcgcagtacagtgcgctgccgcagccgccgctcgcgccacccgcatgggtgttcccggccgtctggaccgtgctttatctgctgatgggggcggcgagccgcagagtgtaccgcctcggcacacaggagagccgaaacgcgctcatgctttattatgtgcagctcgccgcgcattttgtctggccgctgctgtatttccgggcgcaggagtacgctgtcgcgttctggtggctgctcctgctgctcgcgctcgtgcttgcagcgctgtcggcgtttttccgcctcgacaaagtcgcaggcaggctgctcatgccgtatgcggcatggctgctgtttgcggcgtatctcaattacagcatgatgcggatggcatagaccaatatgcgaaatgtaacaacaatgcaacataatgaacgagcgcaggcgtaaagattgcgtttatttttcatcctttggaattgacaggatgcgctcctgctgatacacttaaaatgtatgcgtttcgtaaagagataatttagagaatgtgaaacggaggaagcgtatggaattcgatgtgctgtcaatcgtgcagatgatcggcggactggcgctgttcatttacggtatgacaacaatgggaaagggactggagcgcgctgccggttccaagctggaaaaaactctggaaaaaatgacgggcaacgtctttaccgctcttatcatgggcatggtcgtgacgatggtcattcagtcctcgtccgcgacgacggtcatggtggtcggctttgttaacgcaggcatcatgacgctcaagcagtcggtcggcgttatcctgggcgcgaatatcggtacgaccgtcaccgcgcagatcctgcgtctgagcggcggcgacggctcgggcaacctgttcatggatctgctcaagccgaaaaatctcgcctacatcatcgttctggtgggcgttatcattatgatgctcgcgaaaaagcgccgcacgcgtgacatcgcggacattttcaccggcttcggcatcctgttcatcggcatggcggtcatggagggcgcggtcgcgccgctcgcggatctgccgcagtttgccgatctgtttgcagcgatctccaacccggtgctcggcgttgtggtcggcgcgggcgtcaccgcgatcatccagtcgtcctcggcgtcggtcggcatcctgcaggcgctgtccacgacgggcgcgatcacctattctgccgccatcccgatcatcctcggtcagaatatcggtacctgtatcaccgcgttcctgtcctcgctcggcggctcgaagaacgcgcgccgcacggcgatggtgcacttctacttcaacctcatcggttcgatcgcgtttctggtcgcgatctacgccgtgcagtacacggtcggcttctcgttctgggaaaatccgatcgacaagggcggcatcgcaaacttccacacactgttcaacgtgacctgcaccctactgttcctgccgttcaccggcctgctggtcaagctcgcgaagtggagcgtgccgaccggcgagacgcaggaggacccgcttgcgaagctcgagccgcgttttcttaccacgccggctctcgcgctcgatcaggcgcagcgctgcatcgctgacatgggcgaggcggcgaagagcaacttccaccttgcggtcgacccgatgttcggcggcagtgcggccagcgaggagatcttccgtgagcatgaggcgttcctcgaccgcgcagaggttgagatcggccgctacctgaccacgatgcacaacgtgcgctcggtcgatcagcgccgccagagcgcagagatgatgcactcgctgtccgacttcgagaagatcggcgactatgcgcagaatatcttcgaccgcgccgacgagttccgtcaggcgggactcagcttctccacgaccgcgatgaacgagctgcacgccatgacggacgcagtcagcgaagtcctcgacatgacggtcgaggcgtatgttacgcagtcggtttcgctcgcgcgcagcgttgagccgctcgaggaggtcgtcgataccatgaaggagcagctcaagagccgtcatatcgagcgtcttggcgagggcggctgcacgatgcagaccggcattcacttcctcgacatcgtgcacgaccttgagaagatcagcgatcactgctcgaacatcgcgatctacaccattcagctcgtcgagggcgcagaggaattcgacacgcacgcctatgcgaaggcggaattcaagtccggccctcagttcgagagcaagctgaagttctatcagagcaagtacctgtcccgtctgaacgacgcggcgcaggcgtaaaaacgcacacctcgcagaaatgctgtctgcgaggtgtttttctgcgcaaaaaagcaccgcctccatgtggaagcggtgctttgcagtatgcggtcaatcgtccgacgcgaacacgccggtgatggcggtgaacagctttttgaagatgttgcagatgcgggcgaatacgccttcgtctgcggcgtcctggtcggaagtgccgtcgtcgtcatcatcgtccaccgagatctcctcggtgcgcaggatgaactgaaggctggacggggaggggttcatgctcgaggtgacagactcgaggtcggccgaggtgtcgatgttgagcacgttggtgtcgtcctcgaggtcggtctccgcgtccttgacggcggagtgtatggagtcggtcgcggtctgcatctgaccggatgcggtcgaaccggagagcttgccgagcgtatcgagcaggctgtcgatggtcgcctgcgtgcttgcgtccgcctgactgcgcaccgagcgcagaacgctgttcgcggtgttcacgaggtcgtaggaggtcgagagcgccttcttggtcgagttcatgaggtcggtcgtcttgtcgatggacgaggtcgcggtcttggtgaggctgtcgagcgactcgcgcagcgccggaatatcggcgagcatcttgttcacgcggtcgagagagccgttcgcaagctcggtcagcttcttgccctcctgcgtgaagtcctgcggcagacccttgtactcgtcgaatacgtccgcgatgtcctcaaggtccttgagcagggagttcgtcgcgtcgagcagaccggacattttctctgtgagacttttgagctgcttggtcatggactgcatgtcggacgtgacagccgaagaaccgctcttgatgccggtcatgagtgcggcgagcgcctgtgcgttgttgtaggcggaagcctgcgcctgagaagcggcggagctggcagcggcggaagcatcggaagaagaagcggcggcgtcggcaatcttgttcgcctttgccttagcatcttcctcggtcatctggccggcatcgatggcaggctggaactgctccatggctttttcataagcctgctgacgcaccgtttcggtaacggttgaagaggcggtagacgccatcttcttgacataattcgtcagttccgtggtaacttgcttgtcgaggtcgtctggcagagttttcaggtttttagacagcttttcaaaatcatcttggagcgcgcccagctccttctggagatcctcgcttgcgctgcggattcgggcgatggtccagctgctgttgtcggtctcgtcgtcgaggtcgtcgaacagatcctccagattgccgagcgaggtcttgacgtcgttcagcagcttctggtactccggaatatccttgccggactcctcgagggtggtgaggatgctgctcgtggtggcgttgagggaggtgagcgtctccttggcggagttcagctcggggatgagcgagtcggacttgccggtcagctcatcgagcgcgttcagcgccgcatccgttctcgggtcgagcgtgccgcggtccttgatgagctgtttgcgcacctgatcgataccggaaatgccgctcgacatcgaggaaaggctgctctgtacggcctgcatggtgctcagcatggagctgacgccggtatagaggttgtcgcccgaattttccagacggtccttgatgtcgcgcatgctcgacatgatgtcgagtgcggaggtggtcgccggggtcatgaacatgatgagacccatgctctcgaagtcattcgagccgatgcggacggtgaaggtgttttcctcgcccggcagacccatgaacatgacgagcttgtaggtgccgaacgactggatctgtgcgcccggcgcgtcgatggagagcgccttgctcatgtcgatgccggtcgcgcagaccagcatcatgttgttcttgtagtagtcgctcgcgtaggtgttcggcacggcgtgaatgtccatctgaatggtgccgctcgcgccggcgcactggtctgcttcgaccggaacgccgttgagcttgtaggaaacatcgaagttccacggcatctggatgttgaccgtgtcgttcgggatgcactcgtagtagaagcggttcttgtcggtgtcgagcttccagtagaccgagccctccttgagggtcggctcgtcaaaggtggacatattgtaaacgtccttgtagtctccgaaatctgtgaattcggtgtggccgttgaggtttacgcccttgacgatgcgcgtgttggtcggcgcaccgtagtaatccatgttgatgtatacggtttcgtcggtctcgactgtcggagcggcggcctgggcgcactgcggcagcgcgaacgaaagcaagagtgcggtcgcggtaacgcggcgcagcttatttcttttcattgtcgttttcctccgtgttgctcttatcgttgtcgttctttcttgcggaaatcaggtcgctcagacgcgccttgcggcggtcgagccgtgccttcagccgcatgcggacgcgcttcggcagcgtgcgcttcgcggtctcgggcgtttcgatgtcctcgccgttatccggctgctcgggaagggtgaagcccttgccgtggagcagattgttccacttggcgcgcgtctgcttgtggcgtgcatgacggttttcgcggatctgctgatgcaggcgcagacgctgctcatgcagcgcgctgagcgtcggcagcttgatcttcatcgcatggatacggttcatctttgcgtgctttcgttccgcgtggtcaggcttgatgatgaaccggtcgaagatcatcagacacatcggcaggaagaacagtaccatgatgaccgaaatgaacgcaccgcggccgatcaggcggcccagactggagatggcctcgaccgaggtcatgaagtacaggccgtaggcaacggtcataacgatcatgccggaggtcatgaccgactccgcgctcatcgagacggcgcgaatggcggcttcctttttgtcgccctgcgttcgcgcgtccagatagttgccggtcagcaggatggaatagtcgatggtcgcgccgagctggatgcagccgacgatgatgaagccgagatacatcgtgcgctgaccgtagatgtacggaagagcggtattgatgaagatcgcgcactcgatcgggatgagaacgacgaagggcaggatgagcgccttgtaggtgagcgcgacaacgagcgcgacgccgagcagcgaaacgatattgacgcggttgtagtcgggcacgatgatggatttgatgtcctgcgtggacggggtgacgccgacgaggtaggtctgttcgttcggatagtattgatccacgatgccgcggatattgtcggcaaacttgaacgcatcgtcactctcgccggaggagcggacgttgatgatcacgcgcgcccagttcttcgagtgcatgatgctcgtgatgttctcggggaggaagtcctcggggatgccctcgggcagaacggacgacaggctgagcgcgtacttgacgtaaggcaggtcgtcgatctcgtcggtcatcgccttttcggtcaggctgctgtcgagtgggacgagcgcgatcatcatgttgctcttgccgtaggcggcgttcatctgctgctcggcctcatagaccggcgttccgggggagttcgcgaccgcctcgttgccgtaggtgaagttcgccatgccctgcgcgatgtagcacgggatgatgatgagcagtacgaggatgaacagcggacggcggatgcggtaggcgaaattgcccatgccgcggctctgcgtcgggatgaacggacggtgcttggtcttggcgacgatgtcctgaaagcgcaggatgagcgccggcatgagcagcagcacagtgacaaggctgatggtgatgcccttggcaaggacaacgcccatgtccgggccgatgccgaagttcatcagacacatcgccgcgaagccgacgatcgtcgtcatgccggaggcgaaaatggacgagaacgcgcttcgccatgcgttcgccatggcctgctccggctcgatgccctgcgcgcgctcctgtgtgaacgagtgcagcaggaagatcgaatagtccatcgagcaggcgagctggagcaccgcgccgaccgcgttggacaggaacgagatctcgccgaggatgatgttcgagcccatgttgatgatgatggcgatgccgagaacggacaggaacatcaccggctcgaaccacgaggtcgttgtgatggtcaggatgatgtaaatgatgatgaccgcaagcaccatgacgcgcgcgacctctttgttgatggtcgggccgaggttggtgtcggacacggcggagccggcgacgagtccgcggtcgccgacgatctgctcgatctgacggacggccttgtgcgtctgggaggacgagtccttgtcctcgaagatgacgtccatgtaggcggactggtcgtcctcgtgatagtagtcgtcgatgtcgtcgtagtcgatgaattcgctcgaaccgtagatgttggccgtcatgtcggcccacatgaccatgtccacgccctcaacatctgcgatgcggtccttgatgtttttcgcttcgtaaagcgtcacgtcatggagcattacgcggcccatgccgggataggtgaactcgtcctccatgatgtcgagcgcctgcgcggacggggaggagtcgggaaggtacttggtcaggtcgtagttgatgccgaccatcgggatgcagatgaggctgaacacgacgagtatggtaaataccttttcgatcagttttctgtggttaatgattagatcaaccggattgtgtccgttaagtttcacaaggaaaacaccaactttcgggaaaatagatattgtatcggatttcttttcgtgatatagtatagtacataaggttaacgaacacaataggcaaatataaataatgtgtacgtaaaagaacataaaatatgaaaatgttcaataatgtgcgtttagccgaaagggacagagaaaagttgaacgcattctgaacggaggaaagggaaaatgataggagcagtacaggaggataagcgcatacggcgcacgaaaaagctgctgcggcaggctctgacccggctgatgcagcagaaggattttcagagcatcacggtaaccgacgtggttcgcgaggcggacatcaaccgcggcacattctatgcgcattaccgcgatgtatatgatctgcgcgaaaagatcgaggcggagatgatcgaggatttccgcgagctgatcgcggatctgcatccgagcgggacaagcaatcttcagccggtcctggcgcgcgcggtggattatctggaggagaaccgcgagatcgtccgcgcgctcgtgcgcggcacgggcgtggaaggcttcgggcgcaagatgatcacggtgctcgaggagtgccatctggaaatgcgtccgttccgaagcgtggaggacgcttatgcggcgcgttttctcgcgaccggcatcgtcggcatgatggaaaagtggatcaccgagccgcagcccatcccgaaaaacgagatcgtcgagctcatcaatcgtgtgctgacgggaaatctgatataatatttccataatgatgcaaaataaagaccccggcaggaaacctgccggggtaaatttatctcttatctcaaatttttattcgtagcggagcttgacgttttcctgatggcacaggtcgacgtattccttcggcggttcgcggtcggtgatgaacgcggtgaggtccttgaggtggcagaaggtgacgatggcttcgcggccgatcttggacgagtccgccatgccgtagatgctgtcggcgcgatgcacgaccgcgcgcttgatctcggcctcgaggaaggtcgtgttggtcatgccggcggtcagcgaaacgccggtcgcgcccatgaacgccttgttgatgcgcatggaggacagcgcctcgatcgcggaaaggccgacgaacgagtcggtcgtggggctgtaaataccgccgagcgaaatgatgttgaggttatcgtatttggaggcctcgctcagtgcgccgagcgagtgcgtgatgatcgtgatgcgctttttcgccacgagaaaccgcagcagacagagcgtggtcgtgccggagtcgatgaagatggtgtcgccgtcctcaacctcctccgccgccagacggccgatgagcgatttgtccacggtgttgaggctggagcggatgggggtcggcaccgcgcccgagggcacggtcgcggtcacgccgccgtatacctttgtaatatggccgcgcatttccagctcgttcagatcgcgtcgaatggtatttttggacacgccgaaaacctcgcacaattcgtcgatgctgacggtttcgcgcgagatcacatactgctctatggagttcaatcggctgaccttcattttcatgctgctccttgaaaaatatccaaacaagtccacaatgtacctttatagtttatcaaattatgcgcaagttgtctactgcacagaaagccagaaatcaggggtaaaatttggtgaaaaagcaaagagacaggcggcacaggatgaaaaactggtgaaaataacgaaaataccggggtttaagggctgtaaaattttatttcgaaaaataaaaaaggtgagatgatgggtaagttatggtttttcgtgactgcacgaatatacagaaaagtgcagagtttcgcagcaaatggcggaaaacaggcagagaagccccgggattttccgtaaaaaggacggaaaacgcgagacgggagacggatgaaaaaatacgttttttgcgcatttccgcggaaaaacgacgcagcagcggcaggggatagcggaatttttatctgaaaaaacacgattttcggttgaaatctgagcggtttggtgatacactgtaatcgtatacagcggtaaggcgccgctgtgcgccggcgcggaacactgcgtcacggcgcgataagagaaaatacttatgaattaggcaggtgtatgcaatgcagaaagcagaaaagatgcaggagcttcgcgtatttgctcaggaaatccgtgtggagaccctgaagaccgtcggttcgcttggcttcggccatgtaccgggtgcaatgtccgttatcgacgcgctggcagttctgtacggtgaggttatgaaggtagatccgaagaacccgcactgggaggatcgtgactggtgcgtactgtccaagggccacgcaggtccggctatgtacgctaccctcggcctgaagggcttctatccggtcgaggaggcttataccctcaaccagccgcacaccaacttcccgtcccataccgaccgtaccaagaccccgggcgttgacctgaccaccggctctctgggccagggcatgtctaccgctaccggcgcagctctcggcaacaagctcgacggccgcgacagccacgtattcgtattcgtcggcgacggcgagtgcgacgagggtcaggtttgggaggcagctcagttcgctgctcactacaagctggacaacctcatttgcttcgtagacgacaacaagtatcagctcgacggtgcagttgacaaggtcatgagccatggcaagggcatcggcgcaaagtttgacgcttttggctggaacgtaatcgaacttcaggacggcaacgacgtagagcagatctacgacgcagttcagctcgcttacgacaccaagggcgttccgacctgcattgtgctgaataccgttaagggcctcggcgcaacgttcgctgaaggcaccggcgcgcactcctctcagccgagcaaggagcagtgggatgaagccattgctgctgctgagaagaagctcgcagagatcaaggcacagtaagggaggtaataaacatgagctttactctgattggcaagcacgagaaggactctcgtaacaaccgtgacggtttcgttaccgctatgctggacctcatggagaaggacagcaaggtaatgcacgtagactgcgaccttgagaactgcatcaacaccggcaagctggcaaaggctttcccggagcagaccgtaaacgcaggtatcgcagaggctaacgctatgggcgttgcagcaggtctggccgctaccggccgcaccgtattcatgcactccttcggctgcttcgcatcccgccgtgcatttgaccaggctttcatgtccgcagcttacgctaagctgccggtacacgtgatcggctctgaccccggcgtatgcgctgcatacaacggcggcacccatatgccgttcgaggactgcgctctgtacatgtccgtaccggaagcagtcgttatcgacccggttgactacgctcagatcaactgcctgaccaagaagctggcagcatccggtaagttctcctacatgcgcatgatccgcaagggcttcaccactgtttacggcgacggctctgacttcgagatcggcaagggcgttaccctgaaggaaggcaaggacgttgctatcatcgcttccggcatcatggtcgacgaggctctgaaggctcaggagcagctggctgctgagggtatctccgccaaggtcatcgatatgtttacctggaagccgctcgacgagcagctcatcctcgactctgctgctgagtgcggcgctatcgtaaccgctgagaaccatcaggtcaaggttggtctgggttctgctgttgctaacgttgttatcaagaacaacccggttccgatggagatggtaggcgtagaggatcgcttcggtcaggtaggcgctgagtccttcctgcgcgaggagtacggtctgaccgctgctcacatcgtggaggctgctaagaaggcaatcgctcgcaagaacggttaatttccttccgcagatacgcgaagtaaatatttgcatcgaaagcgctccggctttgccggagcgcttttttgccgttactttgcacagaagcaagcgcagattttgcatggtctggaaatagacaatatcacccaaatctgctatactgtaagcacaacagtaaaaggaggcgatccgtatgaaaaaacggcacgcagcgttagcggcactggctcttgtggggattttgagcgggtgcggacagacaaagacacagccggcggataatacgatttccatcacgccggtggagcaggctacgacagagaaacaatcgggtgcggttgtagagtatcatttttctggcaacaacacagaagccaacggaataacattcaacagctacacatgggatggcaatgcgtggcagaacatggacaaacccatcggtgtgtatggcatgggtctgaataacggcaccggcaaaatcattttccggcatgatgcagatacaatcaatgtggcgtatgatattgagatgacgttcccgagcggcggcgcttcgacccagtacggagattcgtccgaactgagcaagctgccaacggacaacctgacagtggctgtcacgggacaggagaagccaatcgacgatttagcagtcgatgtagagatacctcttgttgtgcgtgtgttcaacacggatggagcaacgcacacggtagaggtcaatgcgtttatcgaaccagatagcagtgatgcactgaaaaactgcatctatgcggatgccattacggcaacattcgtatatgataacagtgtttcccaataaaccgcgaatgccctgacctctcgtcagggcatttttctctttacgcctgcggcgaatttcactataatagagggagcagaaaggggagagaaccatgtcccaaacagacagcccactgggcacagcaccggtcgggaagctggttttgcagctcgcgataccggcgatgctggcgcagtttgtcaatatattatacagcgtcgtggaccgtatgtacgtcggccacatcgcgggtgcaggcgatgcggcactggccggcgtcggcgtctgtgcgccggtggtgacgatgatcaccgcactcggcgcgctgatcggcttcggcggcggtccgctgatgagcatccgcatggggcggcgcgatatggacggcgcgcggcagatcgttgcgaacagcttttatctgctgctcgcgctcagcgttatggcaaccgtgccgctactcgtgttccggcggcagattttgttcaccttcgggtgcagcgaggcgctgtgggagtacgccgaggcgtattttacgacctatgtctcgggcacggtgttcgcggtgatgagctacggcctcaaccagatcacgatgagtcagggcttttcttcgacagcgatgcggtcggtcatgctcggcgcggcggtcaatatcgcgctcgacccggttttcatctttgcgctgaacatgggcgtgcgcggcgcggcgcttgcgaccgtgctttcccagatctgctcgacggcgtatatcctgcgctttctgctcggcggcaaagcggcggtcggcatcacccggcagccggtcaatcccggctggatgcgccgcatcgtgcaggtcggtctctcgccggcgctcattatcgcgctggataacgtgctgctcatctcggtgaacatcatgctgcgcagatacggcggcgcggacagcgatatgctcatcgcgtgcgcggcggtcatgcagagctttatgctcatcatcaccatgccgctcggcggcatcacggcaggcacgcagtccatcctcggctataactacggcgcaggcaatacgaagcgcatcgcgcaggcgttccgcggcatcatcctgctgtgcgtggtgttctgcggtctgatgttcgttctcgcgcagacggtttccggctcttttgtacggattttcaccagggacccggcgtatattgacatggcgtcatacatgatacgcacgtattcgctcggcgtgctcggtctcgcgatacagtacccggcggtggacggcatgaccggcatggggctgatccggtggggtctgacgttctccatgctgcgcaaggggctgttcctcgtgtgcgtatttgtcctgccgccgctgctcggcgcgacagccgtcatgttctccgagccgatttccgacatcaccgccgcgatcgtatccgcttgcggtcttgcctatgtcctgccgaggctgctgcgcaggcagcaggtctgagagcaacagcgggttgcttgcctgccggccttgtttgtgataaggttctgtcaaggagatgatacatatggaaacgaaggatgttctgctgcgtctgagaacggaaaagaaaatgacgcaggatgagttggcggaaaaggttttcgtgactcgtcaggcggtctcgcgatgggaaaaaggggagaccacgccgaatgtggagacgctcaagctgctttccggggtgttcgatgtttcgatcaatacactgctgggttctccgcgacagctgatctgtcagtgctgtggcatgccgctcgaggacgggaccatgagccgggaaaacgacggctcgttcaatgaggattactgcaaatggtgctatgcagacggcgaattcaaatatgacagtgagcagcagctgatcgacttctgcgttgagcacatggcgagcgaaagctggcctgcggagcaggtgcgggcacatatggaagcggtcgttccgcagctgcggcactggaaaaaacggcagcaggagagctgaaacagcggcataggagaccggtctcgctatatgcgaaaccggaaaggaaaccggtctcgcagtctcgcagcccggtgcgggggatacagaggatgcacgctttgtacaaacttcctatttacgaaagcgaacgcgaccgttataataagtatagatatgaatttccgcccgacggaacacagaacgataacggaggaacagaacatggacgtaaaagaacgcgcactcgaggcacatgaaaaatgggcaggcaagatcgaggtcgttgcccgctgtgaggtgaacagcaaggacgatctttccatcgcctacacgcccggcgtagccgagccgtgcctcaagatcaaggacgatccgtccctcagctataaatacacgcgccgccacaatctcgttgcggtcatcacggacggcacggctgtgcttggtctgggcgatatcggcccgctcgccggcatgccggtcatggagggcaagtgcgcgctgttcaaggcgttcgcggacgtcgatgcgttcccgctctgcgttgcatccaaggatgttgacgagatcgtgcgcacggttcagctgatctccggctcgttcggcggcatcaatcttgaggacatcgccgctccgcgctgcttcgagatcgagcgccgcctcaaggaggtctgtgacattccggtatttcatgatgaccagcacggcacggcggtctgctgcggcgcggcgctgctcaacgcctgccgcctgaccggccgcaaggtggacgagatcaagatggtcgtcaacggctgcggcgcggcggcgatcgcagtcaccagattcctgatgttcctcggcgtaaaggacatcacgatggtcgagcgcttcggcattgtctgcgagggcgacgagcgcctcaacccggcgcaggaggagatggcgaaggtcaccaaccgcggccacatgaccggcacgctggccgacgcggtcaagggcgccgacgtattcttcggcatgtctgcgccgcaggtgctgactgccgagatggtctccaccatggcgaaggacccgatggtgttcgcgatggcaaatccggtccccgagatctggccggaagacgcaaagaagggcggcgcggctgttgtcggcaccggccgttcggattatccgaaccagatcaacaacgtgctcgcgttcccgggcattttccgcggcgcgctcgacgtccgcgcaagcgacatcaatgaggagatgaagctcgcggcagcaaaggcgatcgcgtcctgtgtctctgatgaagagctgaccgcagagtacatcatgccgatggcgttcgacaagaaggtcatccgcacagtcgcggatgctgttgcgcaggcggcacgagacagcggcgtggcacgcatctgatgccgaaggcggtttctgcgtaaaaaagttcagaaagctaatttgaccgcgcggggagaaaactcgcgcggttttcgctgaaaatgagtgtgcacgcgcacgcacagttgtaaacagagcgggaaacggcatcttgcacaagctgcgtccgataaaaaatgcgtttgacatttaacgtgcataagggtacaataggagtatcaaaatgtgtttgtttatgtgcagacgcagagagaagattatggagggaataactatgttagatccgaagaaagtaagactgggtatctgcccgatcggctggtccaatgatgatatgtgggatctcggcgacgagaacaccttccagcagtgcatctctgagatgaagctcgctggtttcgacggctgcgaagtcggccacaagtacccggaagacaagaccgtcctcaagcacatgctggacgctcgcaacatgaccatcgcttccaagtggttctcctctttcctggttgacaagccgtacgaagaggttgaggctgagttcgttaaggagctcgagtacctgtcctacgttggcgctaccgctatcaacgtttccgagcagtccggctccatccagggccagctcgacaccccggttctcgacgacaagaagcgcgttctgaccgacgaggagtgggaccgcttcaccaccggcctgaacaagctgggcaagctgtctatggagaagtacggcatccgcacctgcttccatcatcacatgggcaccgtatgccagaccgttgaagagaccacccgtctgatggagaacaccgatccgaagtacgtattcctgtgcttcgataccggccacttcaccttcgcaggcgaggatccggtcaagatgctcgagaagttcgctgaccgcgttggtcacgttcatctgaagaacatgcgtatgccgctggttgagaaggctcgcgctgagcactggtccttcctggacgctgtccgcgctggcgctttcaccgtaccgggcgatccggacggctgcgtagagttcgacaaggtattcgacctgcttgacaaggctggttactccggctggatcatggtcgaggctgagcaggacccggctaaggctaatccgttcgagtacgctaagatgggccgtgagtacatcaccaagcacaccggtctcggcggcgaggttgtcctcaagtaatttcatattactgcaatacaggggcggcgcaagccgccctttttgcgcgaaaaaataccccgatgcgtctgctgcaccggggtattcgtgtgctttcagggaaaatcagcactcgcacttccagaaaaacgccgagcaggggggcagttcgctgccgccgccgaaatcatgcggctctccggtgatgaggtcgaccgcgcggccgcatttcgcgtcgaagtgcgcggtatacggctggtcgtcgatattgaccgcgatgagcactcgctcgccgtctgcacaccgttcccagatgcactgcctgttggtgaggacgagctgacggaagtcgccgtagcacagtgcgcggctttcgcggtgcgccttcgccatcgcggcgatggtgtcggtcagcgcgttccgctcgggtgcgtcgaacgaggggcgcagcgcgtcgtcgccctgctgcttgtttccctccgcaccccattcgctgccataatagatgcacggaatgcccggcatgccgaacagcagcgcatagatgaggggcagatggaggcggttctggaggatggacgcgacgcgcgtcacatcatggttgtcgacgaacgagagcagatgcctgccgcggtacagcgtccagttttccgggccgaactggcgcagcagggagtgggtgatctcgaacagattgtagctgttcatcgaggaatacagacccttgtagcactcataattcgtgcaggagtgcagcagaccgtcaccgacgaactgattgtagtcgccgtgcagcagctcgccgacgaggaagaaatccgagccgaacgagtcgcagaacgagcggagctgacggagaaaatccttgtcgaggcagtaggcgacgtccaggcgcagaccgtcgatgccgaattcgtccttccacaggcggatgcagtcgaacagatgatgcacgacgtcgggattgcgcaggttgagcttgacaagctcgtagtgtccttcccagccctcgtaccagaagccgtcgttataattcgaattgccctcgaacgagatgtggaaccagtccttgtagggggagtcccattttttctcctgcacgtccttgaacgcccagaagccgcggccgacatggttgaacacgccgtccagcacaaccttgatgccgtgctcatgcagagtctcgcatacggctgcgaaatcggcgttcgtgccgaggcggcagtccacctttcggaagtcgcgggtatcgtagccgtgactgtcggattcgaagatcggggaaaaataaacggcgttgcagccgagacgcgcgatgtgctcggcccagtcggccaccttgcggatgcgcggcacggttatgccgtcgttgacacgcggcgcgccgcagaagccgatgggataaatctgataaaaaacactttcataagcccacatagatcgttgctcctttacacgggggatatattcagtataaacaaaatagacaattcatgcaatagcaaaacggtaaaaactgtgcagaatgattgaagcacagcaaagacaaaaaagtgcttgcaatccgaacgacagtatggtatgattatttggtaattatgagacgggcattcctctgctcatttacagataaatggggcaagaatgtctaagacgaaaggatgacagaaaaatggatctcgtaaaagtactgtccgagcagcagctcaagagcgatctgccggttctgaagatcggcgataccgtaaaggtacacgctaagatcaaggagggcaaccgcgagcgtattcaggtgttcgagggcatcatcattgccaagaagcacgctggcgttaaccagacggttaccgttcgccgcatctcttacggcgtaggcgtcgagaagaccttcccggtacactccccgaacgttgcaaagttcgaggttgtccgcaacggtaaggttcgccgtgctaagctgtactacctgcgcggccgcgtaggcaaggctgccaagatcgcagaaaagatctaaccaacacaagcatcgcagaaacggggagcagaattacgctctccgtttttgtttttgcacgggaaagccgaacagggacttgcgtcagccatccgctgcggctataatgaagttgaacgttttttcgaatggaaaggggagcgtgtattatggatgaaacccggaaagagggcaaaaaggaatttgagccgcgctttacgagcgagctgttcgcctggggcgagtcgctgatgggcgtgctgatcgcctttgtcattatctttacgtttgtcgtgcgcctgttcggcgtggacggcatgtcaatgtatccgacgctcgaggaccgcagcatcatgctcgtgagcaacctcggctatcacccggaaaagggcgacatcgtcgtgctgcgcaaggacggcttttacagcgaccagccgatcgtcaagcgtgtcatcgcgaccggcggcgacacagtcgatatcgaccccgtcacgggcgacgtgagcgtcaacggcgaagtgctcgacgagccgtatatcgccgagaagatcgacacgctcacgcgcatgggcgacctgtcctatccgcagaccatcccggagggatgcgtgttcgtgatgggcgacaaccgcaataactcgacagacagccgcgacagccgtctcggcatcgtagacgagcgctgcattctcggacacgtgctccgagtagtgttcccgttcagtgaatttggatcggtggagtaagatatgaatattcagtggtatcccggacatatgacaaagacccgccggcagatggcggagtatatcaagcaggtggacgcggtgtgcgaggtggtagatgcacgcattccgcaggtgtcgcgcaaccccgacatggacgaaatcgcggcgggccgtccgcgcatgatgatcctcaaccgcatcgacctggccgaccccaacaagacggcggtctgggcgaagcatttccgcgatcagggcatggcggtcatccagaccgacagccgtgcaggcacaggcacgcaggcgttctcgaatgcggtgcgcacgctgctcgcggacaagatcgagcaatggaatgaaaaggggctggtcggcaaggctgtccgcgtgatggtcgtcggcatcccgaacgtcggcaagtccacgttcatcaaccgcattctgggccgaaggtccgcgaaggcggctgatcgcccgggtgtgacgcgcggcagccagtggttccgcgtcgacagcggcatcgatctgctcgacacgccgggcattctgtggcccaagttcgacgacgagcgcgtgggcatcctgctcgcctgcacgggcgcgatcaaggacgatattctggatgtcgagacgctcggctgcaagctgatggagctgctagcggagcaggcgccgcagaccatcgtcgaccgctacagcgtctccattcccgaggaggaatgcgattttctcggctacgaactgcttcagcaggccggaaagcggcgcggcttcctgctgcgcggcggcgagatcgacaccgagcgcatggcgcgtatcctgctcgacgagttccgcggcggcgtgctcggccgcatcacgctcgagatgcccgcggcggcagagtaaggagcggacggcatgacctgggaatacgaagaaagagcatggaaaaacggcttcgaggcggtctgcggcgtggatgaagcgggacgcggtccggtcgcggggccggtgtgcgcggcggcggtcatcctgccgggcggaatcgtcatcgagggtctgaacgactcgaaaaagctcagcgagaaaaagcgcgagaaactgtttgacgagatcacggaaaacgcgctcgcgtggtcggtctcgctcgtagatgagcgcgtgatcgacgagatcaacattttacaggcgaccttccgcgcgatgcggcaggcggtagacggtctgaccagacctgcggatttcgtctacgtggacggcaaccgctcgcaggggcttgacctgccgcacgagtgcgtggtgtcgggcgacgcgaagatcccgtccgtcgcggcggcgtccatcatcgccaaggtcacccgtgaccggctgatgcggcagttcgcggagcagtacccgcagtacggctttgaaaagcacaagggctacgagaccagagcgcatgacgaagcgctgctcgcgcacggcccgtgtcccatccaccgcatgagctttttgaagaaattctacgaaaaacatcccgaagcgccgcgatgaagggcgcgtggggtgaaaaagcggcagcggaatggctcgtctcgcgcggctggcatatactggagcggaattaccgcacccgtttcggagagctcgacatcatcgcggaaaacgagcggtttctcgtctttttcgaggtaaaaacgcgccggaacgcccgatttgcggcggcctgtgaggcggtgacgccggcgaagcaggcgcgcctcattgcggcggcggaggcgtggcttcagagcgctccggccgacaagcagccgcggtttgatgtgatcgaggtctacggagaggaaggcgcggccgcgccgcgcatccgccagatcgaaaatgcgtttggagggtaagaatgaaactgtttgatcttcactgtgataccctgtatgaatgctgcgagacaggaaagcacctgcgcgagaacgatctgcatgtcaaccgcgcagcggcgcagaaatacgagcattatgtgcagtttttcgcgctgttctgcggcgcatatccgccggagtcgcagaaaaagaaacgctcctgcctgctcgacacgccgaaggacgagcgcctcgcacgcatgctgcaaaccgcgcagacggagtttgcggcgaacgcggactggctgacgctgtgccgcagcggcgaggagctgacccgcgccgcggaaagcggcaaagcggcggcgttcctctccatcgagggtgcggagctgctgcccgagcgggagggcgcgctcgatgaggcgtatgacgccggcgttcgtctggtgacgctgacatggaactaccgcagccgtttcggctgcccgtctgccatcgaccagaacgagggtctgactgacgggggacggcagcttgtgcgcgcgctcgatgaaaagggaatgctcatcgacgtttcccatctgtccgaccgcggcttctgggacgtctgcgaggagacggcgcggccgtttgttgcgacccacagcgacagccgtgcgctctgccgcaactcgcgcaacctcaccgacgagcagttcgccgagatcgcgcagcgagggggccttgtcggcatcaacctgtatacgccctttctcgtgcgccagagcgactcgatgctcgacgatgcgatcgatcatatcgagcgctttatcggtatgtacggcgagaagatcgtcgcgctcggctgcgatttcgacggctgcgaccagctgcctgtcggcatcgagggcctcggcgatatgtaccgtctcgcagaccgcatgctcgccctcggataccgggaggagaccgttcgcggcctgttctatgacaacgctttcgcgtttatacagaaaatgctgtgataatcggctgtattttttcgcatttcgctattgccgaaccataccggcttgctatacaataataaggtatggattttccatgcggcgatcaacaacacgtagtatacaataccactgcggaggttatgataaatggattatgtaagcacaagaaacagagaacgcaaggtttccgcggcttatgccatcgccaacggcatcgcgccggacggcggtctctactgcccgacctcgttccctgctctcaccgaggcagactggaaaacgcttgcggagagcgactacaagggacgctctgcgctcatcctcggcaagttcctgaccgatttctcggcagaggagctcgcggacttcgcagcgaaggcttacgctgacgagaagttcggcggcgcggataccgctccggtcgtgaagctctccgagggcaagaacctgctcgagctgtggcacggcccgacctgcgcgttcaaggacatggcgctccagatgctgccgcatctgctgaccgcgtccttgcgcaagaccggcgagacgcgcaccgcgtgcatcctcgtggcgacctcgggcgacaccggcaaggcagcgctcgacggcttccacgatgtcccgggcaccaagatcatggtctactacccggtagacggcgtttccccgatgcagaagctccagatggcgacgcaggagggcgcgaacgtcgaggtcattgccatccacggcaacttcgacgacgcacagagcgcagtaaagcgcatcttcaccgacgatgagacccgtgcacagctcgacagggacggcatgatgctgtcctccgcgaactccatcaactggggccgtctcgcgccgcagatcgcgtactatgtctccgcatactgcgacatggtcaaggccggcacgatccgccagggcgacaggatcaatgtctgcgtcccgaccggcaacttcggcaacatcctcgccgcttacatcgcaaagcagatgggcctgccggtgaacaagttcatctgcgcgtccaaccgcaacaatgtgctgaccgacttcttcaagaaggacggcgagtacaaccgcaaccgcgatttctataccacgacctccccctcgatggatatcctgatctcgtccaacctcgagcgactgctgttcttcgcgtctgactttgacgacaggatggtagccgagctcatggcgaagctgaacggcgagggcagctacaaggttgcctcggacgtattcgcgaagatcgcggccgactttgacgccggctgctgcgacgacgagcacgcagcggaaaccatccacaggctgtggacagaggagaagtacctgtgcgatacgcataccgccgttgcggtccgcgtatacgaggattaccgcgcgcgcacgggcgacgagactccgaccgtgatcgcctccaccgcatctccgttcaagttctgccgcgccgtcatcgaggcgctcggcggcacgcttgaaaaggacgacgtgacccagctcgatgttctgaccggtctgacgggcgtaccggcgcccgcgccgctcgcagccctcgcaggtaaaacgccgcgctttgaccgcgtggtggacaaggcaggcattctctcgactgtcgccctgctcaaggatctgtaatggcgctttacacgctggccgacctgcatcttgccaccgatgtcgccaagccgatggatatcttcggcggccggtgggaagggcatacggacaagattatcaggcattggcgcgagctgatcgcgccggaggatacggtggtactgggcggcgatatttcgtggggcatcagcctcgcggaggcaaagggcgattttgccctcatcgactccctgccgggcagaaagatcattctgaagggaaaccacgacctgtggtgggagacggcctctaaaatgcaccgctttctggacgagaacgggtttgcgagcattgatttcctgcacaacaactgcttcttttacggaaaaacggcgctgtgcggcacgcgcggctggccgttcgaggaggatttttccgatccgcacaacgagaagatcttcaggcgtgagctgctgagacttgaggcgtcgctgcggctcggcgccgcagagcagcccgaggagatcatctgcttcctgcactatccgccgctgtactcgacctaccgctgcgaggctatcgtcgaactgctcaaaaaatacggcgtaaagcgctgcgtttatgggcatctgcacggaaacagccttagatacgcggtcacaggcgaggccgagggcatcgagtggaagctcgtttcgggtgattttgtagattttaccccggtttttctgaaaaaatagaaaaaactatggaaatcatgagaaaaatctgatagaatgatttagatacaatcgaaagtatttagtaaggagattggcaacatggaactgaaaaacactgaaaagctcgagcacagcgtcgtagctctcacgatcgagatcaccaaggctgagttcgaggctgcaaaggacaaggcattcaagaagagcggtaagaacatcaccgttccgggcttccgcaagggcaaggctccgcgcaagatgatcgagaagctgtacggcgaaggcgtattcttcgaggaagctttcaatattctgtatccgcaggctatggatatggctgtcgagaagtccggcatcaagatggtcggccgtgcagacgtcgatctgggcgaaccggcagaagagggcggcctgaccatcatcgccaaggtaccggttgagccggaagttgagctgggcgagtacaagggcatcgaggcggagaaggagaccgtaaaggtacttcaggctgacgtaaaggctgagctgaaccgcatggcacagcgctttgcacgcaccgagaccgttgagcgcaaggcaaagaagaacgataccgttgacatcgacttcgagggctttgtagacggcgttgcattcgagggcggcaaggctgagcatcatgagctgactctgggctccggcgcattcatcccgggcttcgaggatcagctgatcggctgcaaggcaggcgacgagaaggacgtagtcgtaaccttcccgaaggagtaccacgctgaggagctggccggcaaggaagctaccttcaagtgcaaggtacacaaggtagaggagaccatcctcccgaccctcgacgacgagttcgcaaaggacgtttccgacacctgcgagaccctcgacgacctcaagaaggagatcaccgaccgcctgaagaacgagcgccaggaagctgctgacgctgcattcgaggagaagctgctcgacgttgttatcgcgggcatgaaggctgatattccggaggctatgatcgactctcaggtcgacaccatcgttcaggacttcggctaccgtctccagatgcagggcatgggcctcgagcagtacctcaagatgacgaacactgagatgggcgcattccgtgcaatgttcaaggatcaggctgagcgtcaggtcaagacccgtctggcactccagaaggtcgcagaccaggagaacatcacggtttccgagcaggagatcgctgacgagtacgcgaagatggctgagcagtacaagatggacgttgagaagatcaagaccatcgttgcagagtccgctctgtccggcgacctgcgcatctccaacgctcttgagttcatcaagaagaacgccaaggtcaagaaggcttccaagaagaaggctgaggagaccgaggagactgaggagaccgctgagtaagcatctctccatatgatatcacatggaaccggccgtatggccggttccatcagcgtatcagcgaacaaattttctccgcaatgcgacacgcatcgcggaaatccgagtacaaacaccgactctttttcgaaaggagtttttccaatgagcttagtcccaatggtaatcgagcagaccggccgcggcgagcgttcgttcgacatctactcccgtctgctgaatgaccgcatcatcatgctgtgcgaggaggtcaacgacaccaccgcatcgctcgttgttgcgcagcttctgtatctggaagcgcaggacccggacaaggacatttctctgtatatcaacagccccggcggctctgtcaccgcaggcatggcgatctacgacaccatgaactatatcaagtgcgacgtctcgaccatctgcatcggcatggcagcgtccatgggtgcgttcctgctgtcctccggcgcaaagggcaagcgctatgcgctgccgaacgctgagatcatgatccatcagccgtccgccggcacgcagggtcagatcacggacatggcgcttcacctcaagcgtcttgagatcatcaaggagcgcatgacgcgcatcctggccgagaacaccggcaagccgttcgagaccgttcacgccgactgcgagcgcgataacttcatgaccgcgcaggaggctgtcgagtacggcctgatcgacaaggttttcgataagcattgatgaaattctgctgaacagaggtgcagtatgccgaattataaagatgaaaagccgctgaagtgctccttctgcggtaaaccccagaaccgggtacgcaagctgatcgcgggtccgggcgtgtatatctgcgacgagtgcattggcgtttgcaccagcattctggaggatgaactggacttcatgcccgagcagcactgcggtcagatggctgcggcacggccggagcatctgccgacgccgcaggagctgaaaaacgtgctcgatcagtacgtgatcggccaggaccgcgccaagatcgcgctctccgttgccgtttacaaccactacaagcgtatctaccatcccgagaccgaggtagagcttcagaagtcgaatattctgatgctcggcccgtccggctcgggcaagacactgcttgcgcagacgctcgccaagacgcttcaggtcccgttcgccatcgcggacgcgacgacgctgaccgaggccggctatgtcggcgaggacgtcgagaacatcctgctccgtctgatccaggcggcggacttcgacatcgagctggccgagcacggcatcatctatgtcgatgagatcgacaagatcgcgcgcaagagcgaaaatccgtccatcacccgcgatgtctcgggcgagggcgttcagcaggcgctgctcaagatgctcgagggcacgacggccaacgttccgccgcagggcggccgcaagcatccgcatcaggagtttatccagatcgacacgaccaatatcctgtttatctgcggcggcgcctttgacggtatcgaaggcatcatccagaagcgcacgggcaagcagggcatgggcttcggctcggagatcaagggcaaggaagaggagcagaccgaccgtctgctcgcgcagatcgagccgcatgatctgatgaagtacggccttatccccgagctgatcggccgtctgccggctatcgtctcgctcgatacgctcgacagagatgcgctcgtgcgcattctgcaggagccgaagaacgcgctcgtcaagcagtatcagaccatgttcgagatggacaacgtcaagctgaacttcgagccggaggcgctcgtcaaggtagcggagacggcgctcgagcgcaagaccggcgcacgcggtctgcgcggcgtactggaaaacgtgatgaccgacatcatgttcagcattccgtccgacaagacggtttcctcggtcaccatcaccccggaggtcgtcatgggcacgggcgagccggtgatcgagcacgacgcgatgccggtggaccccgagccgccgaagaagcacacgcgcaagacaaccaaaagtgcataataagaccaccacagcatacgcggacaggatgttttttcctgtccgcgctttttatggtgccggcctttattcgtgaacaaagtgtaaaaaagtgaaaaacagagggattttgccggtttgtgacaaaaagacagaggaaaaccgctttacaaatgcgcggaaaaatactatactgtctttatatacgaattttccctgcaaggagatacactatgacagaacagcttggaacgactgtaagccgcctgccggtgcttccgctgcgcggcctcgttgcgttcccgaatatgataatccacttcgatgtgggccgtctgctttccatccgcgcgctggaagcggcgatgaagaacggtcagacgctctttctgaccgcacagcgcgacctcaagacggacaacccgtccccgagcgatctctatcagatcggcaccatctgtcaggtcaagcagatcctgcgcctgccgggcgacaacatccgcgtgctcgtcgagggcaagcagcgcgcgctcgtgcatcagttcttcgcggcacaggacgacaagagctgcatctatgctgaggtcgagcagctcgaggactatgtttatggcgtgaccgaacgccgtgcgcaggcgcttgtccgcacggcgcaggagcgctttgcggagtacgctgacaatgcgcagcgcatctcgcccgatgtggagctgacggttgccgagggcggcgacgcaggcttcctcgcggattacatcgcgcagaacatcagtatcgaggtcgcggccaagcaggacatcctcgaagagctcagcatcacgcgccgtctgaccatggtcatccgcctgctcggcgaggagaccgaggtgctgaggctcgaaaacgagatccaggacgaagttaagtcccagatggataaaaatcagcgcgaatactacctgcgcgagcagatcaaggtcatccagaccgagctgggcgagcaggatgcagcggcggaggccgagacctaccgtcagcgcatcctcgacctcaagttgccgcaggaatgcgaggaaaagctcatccgcgaggtggaccgcttcgccaagctcggcggctcgaacgcggagcagggcgtcgtgcgcacttatctcgataccgtgctcgatctgccgtggcgcagcaggagcgaggagcgcctcgatctcgaggaggcgcagcgcatcctcgaccgcgaccactacggcatgaaaaaggtcaaggagcgcatcatggagttcctggctgtccgcacgctcgcgcccaacctcaagggacaggtgctctgtctcgcaggccctccgggcgtcggcaagacctctatcgcgaaatccatcgcggaggcgatgggccgcagctatgcccgcatgagtctgggcggcgtgcgcgatgaggccgacatccgcggccacagaaagacctacatcggcgcaatgcccggccgcatcatggacgcgctgcgccgcgccggtacatccaatccgctcatcctgctagacgagatcgacaagatgggcagcgatttccgcggagacccggcctccgcgatgctcgaggtgctcgacaccgaacagaacgtcgcgttccgcgaccactatatcgagctgccgttcgacctgtccgatgtcgtgttcctcacgacggcgaacgatctttcggctgttccgcgtccgctgctcgaccgcatggaggtcatcgagctgccgagctacaccgaggaggagaagcgccggatcgcgctgaatcacctgctgccgcgccagatggacaagcatggtctggggaagggtcagctggttatttccgaagaaatgctcgcgaaggtcatcacgggctatacccgcgaggccggtgtgcgccgtctggagcgcgtgctcgccaagctgtgccgcaaggcggcgcggcatatcgcggacggcggccgcagactgacggtctcgaacaggaatatcgaggagctgctcggcgtcgcgccgttcaaaaaggatgtcgtgtccgcgaaggatgaggtcggcatcgtaaacggccttgcatggacgagcgtcggcggtgaaatgctcgaggtagaagtggcggtcgtgcccggaacgggcaagatcgaggtcacaggcaacctcggcacagtcatgcaggagagtgcaaaggcggcagtcacgttcgtgcgctcgcgcgcggagcagctgagcatcgatccgatgttctacaagaacaacgacctgcacatccatttccctgaagcggctatcccgaaggacggcccgtcggccggcgtgaccattacgacggcgatcatttccgcgctgaccgaggcgccggtgcgtcatgacgtcgctatgacgggcgaggtaacgctgcgcggccgcgtgctgccgatcggcggtctgcgggaaaagaccatggcggcctaccgcgcaggcatcaagaccatcgtcatcccgaaggacaacgagagcgatctgcaggatattgagcctgtggtacgcgaaaacgtcgcgttcgtcgtcgcggagcatatggacacggtcatggagacggcgatcgacttctcgcgccgtcccggcaaaaaaaagaaaacatcgcgtcgcatgcctcccaaggctgacgctgagacaacggcggtggtacaatgagcaacgaaaaaaaggcacccaatcttcataatgtggaattcctgcgttcggcggtcaaggagagcgattttccgtttgacagcctgccgcagatcgttttcgccggcaaatccaatgtcggcaaaagctcggtcataaacaagctgctgaaccgcaagaattttgcgcgtgtcagtgcgcagccgggcaagactatccacatcaactactttaccattgacaagcagctgtactttgtcgacctgccgggctacggctatgcgcgcgtctccaaggcagagcagcagcgctggggcgcgctgatggagacctattttgcgatgggcctgctgacgctcggcatccagatcgttgatatccgtcataagccgacgcgcgatgacatgacgatggcggagtggttccgcgcatcgcgcaggccgtgggtgattatcgccaacaagctcgacaagatcaaaaagagccagattgaaggcaatattgcagagatccgtcagacgctgctcctgcccgaagaggttcctgtcatcccgttctcggcggagaagggcatgggccgtgaggaagtcctgtcgatcatctttgatcacgtcgcgcgaaaggaagagtaacatgaattttctgcgccgatttatggcaggccggtacggcagcgatcagctgaacaacgcgctgttgctgctcgcgatcgttctcatggtgatcgaatgggtgatgaagtggaactggatgagtatgttcattctcgcgctgtttatcctgtgctacttccgcatgttctcgcgcaacattcaggcgcgctacgccgagaatcagaaattcctccagaagtgggggcctgtctcgcgccgcctgcataatgctgtgctgcgcttccaggatcggaaaatgcatcgctacttcaaatgcccgaactgtcataagcgcctgcgcgtcccgaagggccgcggcaagatcacgatcacctgcccgcactgccgaacgcagtttgtccggaaaagctgaaaaaccgttgattgcgcagatacaagacggtttcttgatttttgacgcgaaatatagaaatgtcggacgttattctgcgtaaaatctatggaatattaccagttagctcttgcaatttctgcaaaatgccgtataataaggttaacataatattcagggggcgagtccgatggccatagaccagttaacagcaaagatttacaataagctcagcaaagccaacctcgcaggtgcagaaggcaaggttgccgttcagttcaatcttaccggcaaggtaacgggcgttttctatatcgaaatcctcgatggcgttccgtctgtaatgccgtatgagtacatcgatcatgatgcaatcgtgtccggttcgctgaccaacatcgagaaaattttcagcggcaagctgattccgcaggttgcagtcgcagagggcaagatcaagattgagggcaacttcgacaaggttatgcttctggccgagctgatgaagtaaagcagataaaacaggataatgaaaaaaggctcgccgcaacgtccggcgagtcttttgtatcaaaagatgcggaaagagggcaaaatatgaagaaaacaaaaagaaatcggaacggaaaaaggattgctgttgatattgttgcgtgtgcattgtctgcggtgagtgtggctttttccattgcggccttcgtgatcagcctggttcggagaaattccgactgaatttttgaaaataatgcttgactttatgcctctcactgtggtattctattaaagctgtcgctgagaggcacggcggtcgaactgaaaagcggcttgaaaagaacgaaaaaagttcttgacaaacaggtttcagtttgatataataaataagctgtttcgaaagagacggcgatcagaaaagtttgatttttgaaagatctgcttcaaaaacttcgagaaagttttaaaaaagttcttgacaaacgaaacttcatctgatataataaataagctgtcaatgagacggcatccgaaaccttcggaggacaaaatgctaacgcattttgtgtaccttggtcgatttcattatgaaatcgacacgcggtgcaattttccactgaaggcaaaggaaaattgcaccttgtaaattaaacaacgatgtgcttaaaattttgttcgatatgaac

SEQ ID NO: 12836 - DNA, 1111 bp, Unknown
  gut microbiota DNA sequence
cccggcggcacgcacagtgtgccgaattttgtccgaacgaaaggaaatccgccatgctccgcttccagaacgattactccgaaggcgcccacccgaacgtgctgcgtgccctgtgcgacacgaacctccgcgccacccctggctacgggctcgacgacgactgccgccgcgcggccgacgccatccgtgcccgcttcgcctgcccggaagccgacgtgcactttctcgtcggcggcacgcagacgaaccagctcgccgcgtccgccttcctgcgcccgtgggaggccatggtcgcggccgataccggccacatcaacgtgcacgagaccggggccatcgaggccaccggccacaaggtgatcgccatgcccggcacggacggcaagctcacccccgccgccatcgcggacgccgccgcgcagcactgcgacacgccgggcgtgtacgacgagcacatggtgctgccgcgcatggtgtacgtgtccgacgcgacggagctcggcaccgtctacacgaaagcggaactgaccgccctgcgcgcggcgtgcgacgcgcacggcatgtacctctacctcgacggcgcgcggctggcgcaggcactcacggccgcgggcaatgacctgcagccggaggacctgccgcggctgtgcgatgcgttttacatcggcggcacgaaaaacggcctgctcttcggcgaggcgatggtcatcgtcaacgacgcgctcaggccgggcttccgccgcgcgatgaagcgcaacggcgccatgctcgccaagggccgcctgctcggcgtgcagttcgccgccgcgatggcgcacgacctctggctcgacatgggccgccacgccgatgcgcaggcgcagcgcatcgccgccgcgctcacggaccgcaatgtgccgatgtacgtgccctcgccgacgaaccagatcttccccatcctgtcggacgcgcagatcgcgcggctgcaggagcaggtcgcgttcaacacgatcgcccgcgtggacgccacgcaccaggccgtgcggttcgtgacctcgtgggccacgacagacgcgcaggtcgacgcgctgctggccgtgctggcgcaggtgctggactgagcacacaacat

SEQ ID NO: 12837 - DNA, 23772 bp, Unknown
  gut microbiota DNA sequence
cgcagcaaacgcttttgaatgcgcgctgccgcgcgactgctgttttggcgtgaaaacagactttatcgacagactgaaccgaggacagagtcctcggttttgacgtatatgggggataagatcagtcttttacaagcagccggcgcagccagtgcagcagaccgcgctcctcctcggaggcgtgctgcgcctgttcgcgcgccatgctgacggcctgctgcatcagcagatcctgcgcacagatcggttcggggacggaaggctttttctggtagctgccgtcgggctgaagcacgcgtgccttgaccgtatcgtgctgcatggcgaacagaatatcatgcagccgtgcgcggaccgccgggctgtcgatcggacaggcgatttcaacgcggcgctcggtgtttcgcgtcatcagatcggccgaggaaatgtacattttctcgttttcgccgcggccgaacacatagatacgcgaatgctcgagaaaacggccgacgatgctggtaacggtgatgttttcggtctttccgggaacgccgggaagcaggcagcagatgccgcggatgatcatttccacggtaacgccggcgcaggacgcctcgtgcagcttctcgatcatgtcgatgtcggtcagcgagttgaatttgagcaggatgtagccgtcgctgcccttggcgatctcgccgtccatgagcgacagaatattgtttttgaggctggtcggcgcgacgagcagccggttataacgtccgttgaggttgctcatggccatattgttgaagaactgcgcggcatccatgccaatggactcgctcgaggtgacgagcgaaacatcggtatactgacgggcggttttttcgttgtagttgccggtgccgacctgcgtgatatagcgcacgccgccgcgctcccggcgcgtgatgaggcagatcttggaatgcaccttatagtcctcgaagccgtagatgatcttgcatccggcttcttcgaggcgttcggaccagtcgatgttgttctgctcgtcgaaacgggcgcgcagctcgatcagaacggtcacatccttgccgttttccgccgccgcgcacagatattcgaccagcttcgccttgctcgcgagacggtagatcgtgatgcggacggagagaacgggcgggtcatttgccgcctcgcggatcatctggagaaagggctccatgctctcatacggataggaaagcagcacatcgcgctgaagcgcggtcttgagcaggctctgtccggccgggagcatggcaggctgctgcggaatgaacggaggatcactcaggcgggagcgtcggccgtcgctcagataatcgcccagagaaaaagcgtagctcatgcgcagcggcgcgctgcgagagagaaagatctgctcgtcggtgacctcgaaacgcttgtggaggcactccttgaagtgggaggacactgggcggctgagctcgacgcggacgatcgccatgcggcggcgctggcgcagcatgcgctccattttcttgcgcagatcgacctgctccgagccgaacggctcatcatcgagcggcacatctgcgtttcgcgtgacgcagaagaccgtcttttcgagcacatcgtacatttcgaaaatgctgtccgcgaaggcgaggagtatgtcctcggtcataagatagcggcgcttgtcgttcggcaggaaggtgatcggcggcagggaggccggcacggggatcaggccgagccgctcgttcttcttgtggctgagcagcacggcgatgtgcagcaccttgccctcgaggtgagggaaggggtggtgcgagtccacgacctgcggcgacagcaccggcgcgatcatggtgttgaaataccgtttgatatatttccgctcgctgctgtcgagctcgtccatggaggtgcggcacagatcctcctgcgcgaggcgggcgtcaacatcgcggaacgctgcgtcgcgccgcgcgtacagcggctctaccgccgcatagatgcggctgagctgttcttcggcggtgagaccggacttggtgtcgcggcggttcggctcgagcgccgccatatcggtcaggctgccgacacggatcatgaaaaattcatccagattgctggtgaaaatcgcaagaaatttgaatcgttcgagcagaggaacggtctcatcctccgcctcggccagtacgcgcgcattaaattcaagccaggacagctctcggttctgtgtatatccctgattccagatcgcgtctgtcatgatcgaatccccctttcagaaggccgcagagcggcataataatttttgactgacgttagtataccgcaaggatatgatatatgtgcgaaaactgtgtaaagaataagtaaaaaccgctcgtttcatggggaaataggcggttttttgaagttattcgggagatacgccgcgtatcatagcatcaatgtactgtttggaccaaggttcgacaggcaatccactcggtctgcttagatcaatacatacgacagcattgttatagtttccatagtgagttttatagttcgatatattttctgcggtgtcatataccgtgtattcaccggtatctttataatacgcgccgagcagtccacgtccagtattataaagcaggcagaatacagaacctttttgatcgagcatagcaacgaaatcgccgtcgccgttggtcagactcggaacttcggcgagtttcacaacttcactgtaacggtttttgaaaatatcatatgtgccgttatcttcgaaatttgttacttttttgccgctcttgctggcgatggtaatgaaagaggaaatgtctttgtccgattgccattcgttcgacgcatacgcttcgcttgcaacggtctgaaccgcctcgtgcagcatacgggtctccgcgacgacctggtcgcgtttggccctgtcgatatagccggtgagggcggggatgaggagggaggcgagtaccgcgagaatgacgagcacgacgatcagctcaacgagcgtaaagccgcgccggtttttgaatattttcatgaaaactcctttttttgctttcgttcagccttatgatcttattataacaaaaacgaaggcggaaaacaggggaaaagcggcagatcagcggccgcggggcagggtatttttatcctgatagtaggcgctctttgcctgatacatacgggtctccgcgatgcggagcagattttccatgcgcagcgacgcagtctcgcaggttgcccagccgagagcggcgtgataatccttctgctcgatggcaagggagaaggcgcgcaccttgtcgtgcagcctgtcctcggacaggtcgggcgcgaacgcgacatattcgtcgccgcccatgcggtaggtcagctcgttaccgaactgctttttcagctcgtccgccacctcgcgcagcatgatatcgccggcctgatgtcccttggcgttgttcagctcgtgcaggccgttgatgtccatgtaaacgcagctgagcgtgcgccgacagcggccgggaatatcgttctgctcgcgttcgaaggcgtttcgattgcgcagaccggtggtctggtcgttttccgcgacgtagcggagcctggcgcgggtgatgaaattctgcatcatcatgtgcatgacataggtcgaggcgatgatcgagatgcagccgtaaatgatgccgttgagcatatcgatctggatgatcctcgcgtccttggtgacggatacaaagagaagaaacagcacatcccagatggcgatgctgcacacgttttcgagcggcggcatgatgaacagcgtgggaagtgtgagcagaaaggcgatgaatgcggtcgccggtccgcccggactggtcacggtgctgagatagatgccgagcgaatacagcgagcccagaaacagagaaagacagatctgcagaccgattctgctgcgccgaccgacataaagcgtgatcggaagcagaaggcaggaaatgctgagcacgatgagataggccgggaggttgggcgcgagcacgacactgaaaaccgcatagacggaggaaatcagaagaaagatgatactgatagcgagaaatgcgacaagtcggttgtaattgtagagatgcatctcctgctggacctgggcgaattcttccggatttgctccggcgtagaggagaagccgcttgattttttccatagtgaacaacccttcgaagatatggtattacggcgagggaagggatcatttgatctttatggcgataccgccgcagcttgcactgtgcagtattaccttatcatagtataacacagaaaacggcggagaaaaagagaaaatgtaaaacaatagccgcgagaaattcaatataaataacgaaaaaacgcataagaccagaaaaaaggcacctcgtgcacgctggtgcataaggtgccttttccttgattcagtcaatgccgcgcatcgggaagcgctgcggccgggcctttttgccctcgggcaggagcgctgcggcgaggtcgggacgggaggtctcgatgaagttgacgccgccgcggatgagcgtgtcgagcgtgcgcgggtcgttcgtcggcagactcatggtaaacagccctgcggcgcggcaggcgcggagcagaggcggcgtaagatgagcaggcgcggcgcgcaggccgaacaggccggtcgtctgcgaggcgttcacgagcgctgcgatgttgtcgggaaccgccggcatttcgcccatgatgtgcaggtcggggttggccgaggcgatacgcgccgcctccaccagtcccagaccgacaaagaccgcgtcatccagataatcggtctgacgcagggtcatgcgcatctgcggcagcaggctcgggtcgcgcagcgtgatggcggtcttcgaccggcaggcgcgcgcgaggtcgagcgcctgtcccacagggagcagacggggcgcgaccttgcgcagctcggtataagtgtggtcgcagacggccaccgcgccgccgttcggcgcgagaacatatccgtccgacgagagcacggcgatgccgtccgaggtcatgtcgaccgagagacagcagccctttgcgccctcctcatttccggcgaggatggagtccagtccgtcgcggtccgtacccatgcagcctgcggcggacaggataaaggtatcagctgtggtatatggcaataccggttccttctttctcaaacagtctgtccgcagtcatcgtccgaaggctcagaccttctccggctcgtcgtactcgacgccctgcgtgtcgacggtaacggtcttcatgcgctgggtctcgcgcggacggtcgtgccagtcgcgcttggtgttcacgatggcgtcaacaacatccaggccctcgatgaccatgccgaaggaagcgtactcgttgtccagatgcggcgcgtcgtcggtcatgatgaagaactggctgcctgcggagttcgggtctgcggtgcgcgccatggacagcacgccgcgggtgtgcagcaggtcgttatggaagccgttgtgagtgaactcgccgcggatctcgtagcccgggccgcccatgccggtgccgtccgggtcgccgccctggatcatgaagcccgggatgacgcggtggaagatggtgccgtcatagaagcccttgctcgccagggagataaagttgcgcacggtgttcggcgcaacctcggggtacagctcggcgcggatgatgccgccgttttccatttcgatagtaacgataggattgctcattatttatcaactccataaaaattttgcgtgtagtcgcattctgtattagtattgtagcaaatttcccgatatacggcaagtggtgtttggggaataagcggcctgcgcggaaaaacaggggagaggggcggcgtctgccgcgagtaatccactttatccacaggggtttccacaggtgcgctggggataacgttgtggataaagtggataactttttgtatagggcggtcaatctgttgaccagtggccgattttgcatttaccgtctgtaatattttgtcgagcgggcggtgcacataaaaccggcgcgtctgtggaaaactcacacagacgagagaattatccacagacggagaggagcgtatccatggcagaagagatcaccgccgtcccggcgcccgagcgcagcagcatcgccgagaccggctccatcaccgcgcataccgcgcgggggaccgtgcactgcatcaccatcgtcggccagatcgaggggcatatggagctgccggcgcagaacaagaccaccaagtacgagcatctcatcccgcagatcgcggcggtcgagcaggcggaggacatcgacggtctgctcgtgctgttgaacacggtaggcggcgacgtcgaggccggactcgccatcgcggagctgatcgcgggcatgacaaagcccaccgtttcgctcgtgctcggcggcgggcattcgatcggcgtgccgctcgcggtagcggcaaggcgcagctttatcgcggcttccgccgccatgaccattcatcccgtgcgcatcaacgggacgatcatcgcggtgccgcaggcgtttgaatatctcgcgaagatacaggagcgcatcagcgatttcatcacggggcattcgcatatccagccggaacggctggccggcctgatgcgcgagaccggacagttgaccgccgacgtcggtacggtcatttccggccgcgaggcgcaggagatcggtctgatcgaccgggtcggtacgctgtcggacgcgctcgaggagctttacggcatgatcgagcggcgaaaggcagaaaaataatcagttttcctccagatagtcgcggatgcagtcgacgaattccgcgccgtaacggcgcgccttggcctcgcctacgccgcgcacgccgagcagctcgtattcgctcttcggctgccgcgcggccatgtccgcgagcgtcgcgttcgagaacacgacatacggcggcacaccggcgcgctgtgcgacctttgtgcgcagtgcacgcagcttttcgaacagcttttcatccacatcggcggacagctcctcggtgcggcggacggtctcgggctttttctcgcgcggaaggcggatatgcagttcaccccggccgcgcatgagagcgttgccggttttcgtgaggaaaagcgcgttgtagcgctcggggtcggcggtcagcaggccgcgctcgagcaggacgtcgatgagctgccgcacgcgcacggcggtctgctcgctcatgatgccgtaggtcgagagcgtgtggagactgaaacggccgatctgctcgctcttgctgcctgtgagcacggcggcgacgacgattttgccgaaatgcagccgccgctcgtcgagacggtagacgcaggacagaatcttgcgcgcgtccatcgtcgcgtctacttcctcgaaattcgtgtcgcagtttccgcagtgaccgcagcagacgggcgctttttcgccgaagtagttgaggatataccggcgcagacagtcggtcgtggtggcgtagaaggtcatctgctttaagcgttccatatcgcgctcgatgagcgcacggcgcgttttctcgtcgatggagtcgtcgtcgctctcgtggctgtgctcgatgaggaactccgccgtacgcacatcctgcccgttgtacagcaggatgcagtccgcggcttcgccgtcgcgtccggcgcgcccggcctcctgataatagctttccatgttcttcggcatattatagtgaatgacgaacgagacattggacttgtcgatgcccatgccgaaggcgttggtcgcgaccatgatggtcttgcggtcgtacaggaagtcgtcctgattggcgaggcgctcctcggggtcgagaccggcgtggtagcgcgtcgcgggcagaccgcggctcagcagcatatcgcacacctcctcgaccgtcttgcgcgtcgagcagtagacgatgccgctcttgtcgcgccgccggagcaggtgcgcaagcagggcggagggcttggaggacggtttttcgaccgcgaagtacagattggggcggtcgaagccggtcgtgatgacgaacgggtcctcgagaccgagcgcacggatgatgtcgtcgcggacctcggcggtcgcggtcgcggtgaaggcggaaacgagcgggcgctggggcagggcggcaagaaagtcgaggatcttcagatagctcgggcggaaatcctgtccccactgcgagatgcagtgcgcctcgtccaccgtcaccatggaaatcggcacgcggcgtgcgaaatcgaggaagaacggcgcggtcagccgctcgggcgcgacatagagcagcttgtattcgccgcgtccggcgaaatacagcgcgtcgcgcatctcctcgaacgacagggcgctgttgatgcaggcggccgggacgccggcctcattcagcgcgccgacctgatccttcatcagcgagatgagcggcgagatgacgagcgtcagtccgggcagcgcgagcgccgggacctgatagcagatggacttgccggcgccggtcggcatgatgccgagcgtgtcgcgcccggaaagaatggcctgcacgagctcgtcctgtcccggacggaagctgtcgtagccgaagtactgtttgagaatttcctgtgcggtcggcatgtaaaggctccttcatacatagtatgaacctattctaccacatttcccgggacaaagcaaactgatgttcgcataaatggcgtttccggcagtctcctgccggtttacaaccggcgcgtgctgtgctatactatatcattggattagaatatacacacgaatttttatttcacaggaggaaatatccatgctttgcaagaaatgcggcagggagctgccctatgcagggggcaagttctgcccgttctgcggcgcgcccgttgagcagaccggcgtgagcgacgagaccgaggtgttcaccacgctgcccgaggagctgcggaacgcaggcggcgccccggcggacggcagcatcgacctttcggcgttcgatgcggcgcgcagacagagccggcaggcgctcgaggatgccgaggagaccatggccatcgatccgctcgcagatacatccgaacagccggcggcgtcccgcgtgccgcagcagcgcccggaagcccgcccccgtccgacgcaggacgcaccgcgcacgacctattacggcggccgtcccgacccggatgaccgcgtataccgcaagccgtccaggggcaggcgcgcagcggtcgtgacgctcgtcgtgctgctcgtcgcggcgctcatcggcggcggcgtgtggttcttcatgaacaatcacaaaaacgacgaaaatctgacgcttgcggagaagtatatggaccgcggcgacttcgacaaggcgcttgactactacgagaaggcggcggaggaggccaaggacccgaccgcgatcaatgcggcgatgcagctcatccgcgactatcagaatgcggaggattatgtagacagcgagcagtacaccgaggccatcgcggcgctcaagcagctgcgcgaccgcgtgaccgataaggactccaccatgtacaagtccatcgaggatctgctcagcaaggcgcagagcgcacagtcggacagcgcttttgcttccgatctggaggaggcgcaggactatctggaggatgacaagctggatgcggcctccggcaagctcgattcgctcgagcaggactcctcgctgaccgacgagcagaggaagcaggtcgaggacatgaagaacaagctccagtccgcaaaagacagcgcacagcagcagcaggagaacgagcagaagaaatccgagcgcaagcaggcgttctcgagcgagatggacgagctggagagcgacgatctcaagatctcctcggcggcgaacgcagaggatgagctggccatgacggcaagctcgttcgagcagtgggatgagctgctgagcgaaatgtacgattatctggcgggcgtgctcaacgcagaccggtatgcgtccgaagaggaaaactacaagaagtgggtcgcggagcgcgacagcggcgcggaaaatgccgcgagtgcgaccgaggacagcacgcagaagcagctcgcgtcgtacagcttcaagcagagctataccaaggcgcgctgctacaagctgctcgacatgatgtaagagcctgtcgcgaaactgacgtttcgccgacagtcttaaaccggaggcctgtgcctccggtttttttctataaagacagatgtatttttattgtggatgttggaatttcattcttattgtgctataatcaaataaaatattgctgatatatgcgaacatacggcgtgcggaaagcagcgatattacaaaactatgagagtgagagatgcactatgagtatcacgcgagtatggatcgcgggtgcgggcggacggctcggttctgcgctttatcaccggttcagcggcaacaccgactataagctcgtcacgagcgaccgcgacgtcccgatcgaggacgcgcgcgaggccggccgctttgccgacctcaaccacccggacgttatcatcaactgcgccggtctgaccgatgtgcgcgcctgcgaggaaaagcctgaggaagcgtacaagatcaacgccatcggtgcgagaaaccttgcggtcgcggcgcgccgcatcgatgcgaagctcatccagatttcgaccgatgacgtattcggcggcgacgatgacgcggcgctgtgcgagttcgacgacgcgcatccgaccaccatgtacggcaagagcaagtatgccggcgagaagctcgttcgcgagctgaccgacaagcacgttatcgtgcgctcctcgtggctgtacggcgttggttcgtatgatttcgtcgaccgcgtgctcgacaacgcgaaaaaggacggcaaggtcgtgctgccggaggacgagatctcctctccgacttctgcggacgcgctggcaggctttatcgagtgtctgatgcacacccgtgagttcggcctgtatcatgcctcctgcgacggctcgtgctcgcgcgcggagtgggcgcgcgaaatcctgcgcctgaacggcatggatcatatcccggtcatctccgcggcggagaacaccgagctgcgtccgcgctttacgctgctcgacaacatgatgctgcgcatcaccggtctgtatcagatgccggactggaagaccgcgcttgcggactatttcagcacgaaaaagggaggtgcgcacaagtgagcggagcgaaagagaaaaagaaaatcggtctgacgacgcagatctttattgcgctgattgtgggcgccattctgggtattgtgctgcatgtcgccgcgtctgacgtggaatttgtgcagaatgtattgataaacggtgtgttctatgtcatcggtcagggcttcatccgtctgatgcagatgcttgtcgtaccgctggtattctgctcgctgatctgcggcgcgaccgccatcggcgacagcaagaccctcggcaaggtcggcatcaagatcatcggcttctatatcctgacgaccatgatggcagtcgcggtcgctctcggcattggcctgctcatcaggccgggcatcggtctggatatgtcgcaggtgcagcaggtcgagaccggcatcgagggcggccagtcggtcagcttcgcggagaccatcctcaatataatcccgaagaacccgatcggtgcgcttgcgaacggcgaaatgcttcaggtcatcgtgttcgcgctcatcgtcggcattatcctcgcaaagctccaggataagacccagctcgtcacgaacttcttccagcagggcaacgacatcatgatggagatgaccatgatggtcatgcgtctggcgccgatcggcgtattctgcctgatcgcaaagacgttcgctggtctcggcttctccgcgatggttccgatgttcaagtatatgggcgcggttctgctcgcgctgttcatccagtgctgcggcgtataccagattctgcttgcgctgtttacgcgcctcaatccgctgcgcttcctcaagaagtttgctccggttatgggcttcgccttctcgacggctacttccaatgcgacgatcccgatgaatatcgacacgctggaggaaaagatcggcgttaaccgccgtatttcgtcctttaccattccgctcggcgcgaccatcaatatggacggtacgtccatcatgcagggcgttgcggtcgtattcgtcgcgcaggcgttcggcattacgctgaccccggcggattatctgaccgttatcgcgacggcgactctcgcatccatcggcaccgcaggcgttccgtctgtcggcctgatcacgctcgcgatggtattcgattcggtcggtctgccggttgccggcatcggcctgatcatgggtatcgaccgtattcttgatatggcgcgaactgcggtcaacattaccggcgacgcggtctgcaccacgatcgttgcacatcaggacggcgcgctcgataaatctgtattcaataaaaactgagacagcaccgcataggaaaagctccggcactttgcggagttcgtgcggcgccgcgtgaaatcgttttttgcagcgggcacggtttgacagaccgtgcccgttctgttataataagtacacgccgccatggcggaactggtagacgcaggggacttaaaatcccccggagttaaacccgtgccggttcgattccggctggcggcaccagaaagctcctgtaatcttttgatggattgcaggagcttttgctgtattatcggtatttttctgaacttttcagaggtgtttgaaaatagggaataactgtgaaatcagtcggtttgaccgacttctcgcagatttctcgcaggcttgcacccaaaatggtgcttattttgtgcttattcgagaggttagttaaggtttcagcgccgtgattggaacaacaaaaacaccatcggcgcgccgataggcggcattcgacataccgcacagaacgcagagcaccgcaggcggcttgccgcgaggatcttcttcaatctgacgcttgatcttaagcagattttctgcggcggtatcgatctgatttgcaccgagcttgatctcaaaagcgcaccactgaccgtctgccagctcagtcactgcatcgattttcctctactattacgtcaatagtacgtggtttatagtttaaatggttcatttgactcacctcaacatcttgctattattatatgctaatcggtcatattttacaattacaatcggtcaaattttgcagtatcaaccgataacattttatggaacaaacgctcgagccattaagaactcgagcgttttctgtctggcagtatatcctgttggttcgcattatttttaccatttccaagcagatgctccatgcagttcgatgccgcgattttcgaggcagcatccagatgcgcataacgcagtgtcgtctgaaaggtcgcgtgaccgagatacacttgaatttcctgcagggtatagccctcatgcagcagcagtgttgcacaggagtgcctgagatcatgcactcgaatgactttcaggttattcctttggagaagttccttaaagtgacgagtaatataatctggcttgaacagcgttcccatgtcattgacaaacacgaaagccagatagtttgtatcatatgatttgcggtacagcttctgattttgcatttgttcctcacgacgctgaagcagctctttctcgattatcgggaccagcggaaggcggcggccgcagcagcattcttcggttgagagtgtacccatatcaccgagcatatatcgcagacgcggctgaacataattggtcagatcagtgatcgcaagcacaccgctctgtccgttcagcaccggttcatatgtgacagggtcaagaacctctatgatacagttttctgcagtgatgtgaatgccgccggacggacaggtgtaggcgaggataccggcatcacgtgtaccgtattcgtttgccaccggacagtcgaatacacgcgcgatcaaatcttcctgccacttttcgagcgtttctgaggtggaaacaactgctttcagggaaagctgcggtttgatgtttgcgtcatcaagcatttttgcaaaaacagtcaaaatcgttgcgtagccgtatagatattcgggcttatagcgctcaagaaaccgaacatgcttagaaaggtcgcgttccgtcagattgtaagcggacaggatacggcgatttttcagcagactttccttgatacggtttttcagctgagcctgattgctgagctcgatcggactgccccagagcatgacactgcggcttcccggggtgatgccataccagctgaggctgcgccatcgtgccgcttaacggcgaaaatgcatgtcagcagtatttaaatcagtgctcgcttgctgtgcaggcgagcaaaacgggcagcattgttaatttctgcagatggcatatcagatgcaataatcagacaatccgcttgctcgagaaaaccccggtttccccacctgtaaattcaaaattccgccataaaactgaggtttttatcatttttcaccaaaacgaccaaaaacacggcatgaatttcattattttcaacgcaatattccttgtgacgcggcacgggaaatatggtataatatacaatataaataatgaatttttatgcactttcaggaggtgtaactatggataaggacgattttatgaacgatctgtacgattacctctggatgccggaggaagagcagggagcgctgtacctgcatcagaatatcctgttcggccgcgcggctgacgaggagaaaattgcctgcgcaacccttccgtatctgttccggctcggtattacgccgcagatgcgcggttatgagattctttgccgcgccgttatcctgtacctccttgacggcattcagaattcgacccaccttaccctgctcatgacgattgctgtcgagcgcggcacctcgcttacctctgtggagcgcgcctgcgccgctgcggtcagatatgcgtggaacgagggttatatgtccgcagacgatgagggtcccgatgccctcgcgttccgcgaaatgccgacagtaacacagtttatcgaccgtcttgcagcggctgttcggagcaagatcggtgacgaaatcaagctctaaacgggccgttcatcaggtatttccgcgaaaactgcgctttatcagcgggtaaaatccgtccgctgctcgcgccggccccatatctcggcatcgttttcatttcgcagctgcttttcggcagctgcttttttgcgcagaaaagcagccgttttgacgcaaaaacggacgctatttcccctttttgggcgctcaaagaccgattgtcgtgccgtacacgagccggatcatatccgcaaacgcggtgatgcagcccttgtttgttggcttgcggcggaacgtcagaagcgccgtgcacgggtccccctttatgccgcgcagaccgccgttgttccatgccgcggcgattgcatggcgaatcgcgcgctccaccgcactgaccgtcgtaccgtggtcgagagcaatccgcggataaatcgttttggttatctcccgcatctccgacggattgagtaaaaactcgaccaccgcactgcgcagatagctgtatcccgtaacgtgcggcggaataccaagctggtaaagatagggcgtcaagcgaaattcaatctcccgtgcgagagcagagtattctttttcgacagattccgctttttccgcaacaactgcatcatccatcatcaacatcataaccacaacctccgataaataattctcttgaatatggtatgcagaaaggaaatttccttctttgagtcccattatatcatgcgaaaaaacaggaaaaaagaagaaaaattcgatgggttatccataatcttactgctgtgtcgaaaatcgaggcgcagaacagcaggttgcacaaacagacgcggaaagtcccgctttttacgctaagatcccgctatccggaagaattcaaggccgtctgcgaatgagccccggccgccctccgacccaacggcagtttaacctgtttttcacgctgcgtgtcaatattgtatgagaatatttcaaattgctgtaaaaaacgtcgaatggcacgctgtatggtttgaacggctctgctttgtgaaattttatataaaatgtacaaattcgacatgaaacgacagaatacggcatcatcggaccaccggagtgcggcgcgcgaagccgaaaccgttcttgacctttacagcgtttcatcttataataaaagatgaatagttacccttttaaagcacccgttaaacggtatcaaactctggggaggacgaaataaaatggatatgaaaaaacttgcaggcgataaggctgccacttatgtaaaggacggcatggtagttggtctgggcaccggctcgaccgcttaccacatggtaaacgcggtaggcgaaatggtcaagaacggtctgaagattcaggcgatcccgacctccaaggctaccgaggcgcaggcgcgcgagctgggcatcccgctgctcaccatcgacgagctcgaccatgttgacctcgcgatcgacggcgtagacgagatcgacccgcagttcaatgccatcaagggcggcggcggcgcactgtaccgcgagaaggttgtcgcttccatggccaaggaagtcatctggatcatggacgagtccaagctcgtcgacaagatcggcgcattccatctgccggtcgagatcgcgcagtacggctccaagcaggcgatggagcgcatgaccggctacggctggaacccggttctccgcgtccgcgacggcaagaccttcgtcaccgataacggcaactatatcgcagatctgcacctcggcgcaggcttcgatattcaggacgtttactccaagctgaccggtatgctcggcgttctggagcacggtctgttcctcaatatgtgcaagcgcatgatcgtcggccactctgacggtacggtcgatgtcatcgagaacccgtccaagtaagacgggcggcatcccacagcaggaggaatgaacatggattataacgagcgaaacggttcgtacagcgacgacgagctgctcagccgcttttcgcgcccggagacgccgcgcacgaccgtgcaggacgatatcccggacgatccggccgcgtttcgccaagaccgcggcccgcgccccggcatccgcatggcgagcggccgcccgatgcgcggcatgaaaaagcagcgcccgacaggacgcaaaggcagtccgaactaccgtgcggcgctctgcggcgcggttctcgcgttcttcgtgatcgccctgctgttcttcgtcctgtttatgtcgcgcggcggcaaaatcaaggagctgaacagccagatcgacacgctgggtcaggacaagcagtcgctttccgcgcagatcacctcgctccagcagcaggtcgacaccctgaccgcgagcatgacgagcgctctgcctgacgcgaccgtggcagacaccaacaccatcgtggacctcattccgcagcttgcagacggcagcacttatgtcgtacagagctcggcctcgcagctccgctatatcaaggtcccggagggttatctgagcgacaagctcggcgaataccgcgacaactcgtcggcttacgccgcagcacagggcgacgcgccgatctgcacgtattatgtgctgttcaccgaccgcgtcatcggccttgctgagggcaacgtcggcttcgtcagcatggacagagccgcgaccggcagcacgaccaccacgccggacggcttctacgatttcgtcgcatcgttcttcaagtaaacagcaaaggcagctgcttcgcatcggctttccgacgcggcggctgcctgcctttttcgaatagaagggagaaaggggcgatttctcatgagaacaccggaggaacagctggtggatgccagtctggaaatagggaaggcgctgctgcttgccgggggcgaggtaacgcgcgtcgaggacaccatcacgcgcatcctgcacgcctacggcatgcgcgagatcggtgtattcaccatcacctcgctcatcgaggtgacagcctgcacaccggacggcgatgagatcgtaaaggcgcggcggatcgccggcagctatgcaaccgacctcgaccgtgtggagcggctgaacgcgctctcgcgcgagatctgcgcgcagtgtccgccgccgcagacgctcgccgcccgtattgaggcgatcaggcggccgcgtaccgaggcggcgtggatcagctatgccggcgcggtgctgaccgcatgcagctttgcggtgtttttcggcggctcagcggccgatatccccgccgccgccatactggcctgcctcatctgctggatggaccgcagaggcttttacaagaaggcaaatcagctgctgttctatctgctctgctcgatgctgaccggctttctcggctgcgtgctcgtccgcatgggtgtaggtgtccacctcgataaaatcctcatcggctgcatcatgctgaccataccgggcatctcgatcacctacgcgatgcgtgatatgctgctcggcgagagcattaccggcctgttccgctttatcgagtcgctgctcatcgccgcgaccatcgcgggcggctttctgctgtccaccgtagtggcagagggggtgctgggatgagtcagatcattgcaagcataatcggcagcatcgggttttccatcgtgttcggcatccgccgggcatatatgctccccatcgccgtcaacgcaggcctgtcctgggcggtgtatctgctcgtgaacggctttgccggggactttgccgccaacatggtctccgccatgttttgcagccttgtcgcggcgctgatggcgcggcggctgcgcgtgccgacggtcgtgctgcaaatgccggcgaccgtcccgatggtacccggcggcagcctgtactacaccatctactacgtctttgcgggcaatatgccgaccgcaaagagctactttttcttcaccgcacgcgccgttttcggcatggcgatcggatttgcggtcgtgagcgtgctgttcaagacgatcgacgcaagaaaaaccgcacgctgacacgggattttcaataaaaaagcagggaaaccgaggcaactatcccggtttccctgctttttactttgtgttagaggttgtgctggagctttgccgccttgagcgtattcttcatcagcatggtgatggtcatcgggcctgcaccgcccgggaccggggtcatataggacgccttatccattacctcgggagccacgtcgccgcagaccttgccctcggcgttgcggttgatgccgacatcgatgacgaccgcaccctccttgaccatatccggggtgatgaagccggccttgccgacggccgcgaccagaatatccgcgcggcggcagacctcagcgagatcctgcgtgcggctgtggcagatggtcacggtgccgtgacggtgcagcagcagcatggccatcggcttgccgacgatattcgagcggccgacaacgacgcattctttgcccttggggtcgatctggtactcgtcgagcagctccatcacgcctgccggggtgcagggcacgaaatcgaaattgccgaccatgatcttgccgacgttgaccggatggaacgcatcgacgtccttccgcgggtcgatggcgtcgatgacggcctgctccgagatatgcttcggcaccggcatctgacacaggatacccgagatctgggggctttcgttgagctgcgcgatcaggccgagcagctcctcctgcgaggtctcctcgggcagggcgtacttttcgctgtaaaagccgcactgctcgcaggcgcgctccttgttgcgcacatagatctcgctggccgggtcgttgccgacgataatgaccgcaaggccgggcgtcacgccctttttcttcagctcctcggtctccgcgaggatactgccgcgcaccttggcggacagcgccttgccgtccattcttactgcactcatgctgtttctctccttatgattatgattattcgcccttgttttcgtccgttttcggcatataaaacgcctttgctaccttaatccggtgatactgccgcgcgagcactgcgatcgccgcgacacagctgatgatggcgagcagctgcgagacgcggaccgagccgatatacaggctgtccgtgcgcaggccctcgatccatgcgcggccggcgccgtaccatgcggcatagagcagcgcgatctcgcccttgaacctgcgttttttcgaatagaaatgcagcaggacgaagccggcgaggttccagagggactcatagaggaaggtcgggtggaccatgctctggccgtcgatggtcatgccccaggggagggtcgtcgggccgccgtgggcctcgccgttgacgaaattgccccagcggccgatgcactggccgatgagcaggccgaacgccgccagatcgcacaggctcgcgagcgagagctttttgacgcggctgtacacgaacaggccgatgagcgtgccgatgatgccgccgtagatagcgatgccgcccttccagatggcgatgatctcgcccgggtgctgcgcgtagtagccccattcgaaaacgacgtagtagatacgcgcgcagatgatgccgaggggcacgcagatgatgaggcagtcggtgaggttatccgaggtgatgccgaagtccttcgtccgggaattgacgtagagcgcggcgaggataaagccggcgcagatgatgatgccgtaccagtagatgtcctttccgagtacggtgcaggccacgcggctgagcgtgaattccagaccgaggttcggaaaaccgatagtgtgttccatgtttcgaccttcctttaggggtattgatgcgatgggggtgcacggcgcgccgccgcgcagggtaaagtttcgcctgtgaatattatacatgactccggcgcttcgtgcaatgtagattgcgtgtattttggacggcggaaggcataggaaaacccccgaggtttccctcgggggtcttgctttgccttatggcaggcttaacggagaaccgttaagattaccaagcagtgatgtcgtgctgaacgtcaactacgataacagtgatctggtcgtcagaagcgctgtcaacgaatacgcgaacgttcggtactgcatcctcggtcagggtgttgtccttatcctttgcatcaactgcatccttaccggagatcttgatgtcgttgatagccggcagcttgcccttgctccagaagtcggagtcgaaggtacgagccaggtcgatatcagccatggtgtagccagtctcgcccttgcctgcgtcggagtcaacgaacaggattacggtgttcttgctgtcaacgacagtgtaagcatccttagctgcatccttgccgcctgctgcggtccacttggtgtccttgtcatagctgtacagggagatgtcaccagaagcgtcatcgtaagcggttacgtagtagtcagcctgcttgttctcgttatactcgatgtcagccagggtgtcgccagttgcagagtaagagaagatgtcgcccttgctcatgtcagcagccttggaatcatcggtggtaacggtgatctgctcagtgccattccaagcggtgatgacgtaaacagtgccgttagcggtgccggtcttcttctcaacgttcttcagaacaactgcgtagttgtcggaagagccgccggtggattccttgccaaggtcgatgaatgcagcctgtgcgtagtagctgttgccggacttgttagcaactgctgcaactgcacgcagggtgcggtcgtagttagaagcggtcttgccggaaactaccttgtagtcgccgtcgtcgccggtcttctcatcagccttggacttaacgaatacaacgccggttgcttcgtagtacagacgggagatggtggaagcatcagacagagttacagtgcccttgatagagccgtcggtcttaacggaatcagcagttacgtactcgtcgtagccattggtctcgatgtccttagcatccttaacgtcggtgtttacagcacccagacgggtcagggtgtaaacgtccttggatacctcgtaggaaacgagcatcggctcgtagccagagttcttatccagatccttaccatatgccagagcatagttcgggttggtgttgttaccttcatggaactccttgatagctgcgccgtcgtccttgtcgtcccacttcttctcgatttcgacaaccttgtcggtgccgtctgcgaagatcatgcgagcttcccacttggagtttacgccgcccttaggagcagcctcaaccagaagtgcgatgtcgtcgatggagcctgcggtggtgtcggtgtagtaaacgtagccgtttacaactaccatctcaacgttagcgccggtgttcgggcgggtaaccatattgcccttcttaccagccatggtgtaccactcgccgtcgatagcaacgccatcgtcagacttggtgccgtttaccttgccggtaacaacggtagccttctcaacgaggccgttgccggtgccatagttgccagcagcagtcagaacaacgtagtcgttcttcttaacgccgtcgtaccaatcccagtcatcggactcgagcttggacttggaagcgatggtgttgtcgcccttcttgaaggagacgttgatgtagtcagaaccaacagcggtaaccttagctactgcgaaggtcttaacgttcaggatggagtaatcggtagagccgtcggtagcgagcagcttaacctcggtcggctgcatgtaagcagcgttggtgtacttggtatcagagtcgttgccgtaggtatcaatgaagctcttgatattgttcgaatcttttttgttttccgtccaagatttgccgtttacataaacggtgttcttatcagccagatcgtacttggtgtcgtccagcttagccttgttgccgtccatcttgaggttcttcaggatgccggtctgctgggtgttgtccttggtagcgtaaacgccgtaaaccttggacttgtcgttgttcttgtacagaacggtaaccatctgatacttcaggtcagagtagtccttcttcacgttggtgaagttgtacagagccttgcccttgtcatcagtggtcttgttctcgtcaacagtggacttgtcgagagtcagctcgaaggtctccttgccggaggtcttggaaacgtcctccagaacagcggtggtcttcttgaggttcatgaacttctcgccaacggtcttgttgtcgtcgccaagcagagttacgttggtgtaagcatcgtcacgccatacaacggtcggggtatcgattgcgttgtagatcagctgagcagcatactgacgcgggcacggaccggtgaaggaagtgtttacgtcgtcaagcaggccgttctcgtcagccagagcgttggtcttggatgcccagttgatgcctaccaggcctgccttctgagcgtcgtagccgagggttacgagcagcatcttagcagcttcctgagcggttacggtctggtccggtgcaaacttggttgcagactggccagcgatgatgccgacagactggcagtacttgatgaagccagcggcccagtggccgttgacatcagtaaagctggtcttgtcattgttgtacgcagaagcgtcagagttaccagtgcgcagcacgtagatcatcttcgccatctccgcacgagtt

SEQ ID NO: 12838 - DNA, 862 bp, Unknown
  gut microbiota DNA sequence
gcacaacatcgaaatacggaacacgcccgacgcatccgcgtcgggcgtgttttctgctttacaaatgttccttctgcatcttcgcccagcggcggggatacttcggcggcgtgggcgccgtcttgcggatgacgacgacgctgtgcgtcacgtccgtgccggggatggtgtagcgcaccgtgcgctcatacgtgccgccgagcttgcggatggcgctgcgcgcctcgtcgagctcctcggcgcagtccggccccttcatggcgaggaacaccccgcccgtgcgcacgaacggcagacacagctcgcacagcaggtacagccgcgcgaccgcgcgcgacaccgccgcgtcaaactgcccgcgcagctccggcgcctcctcggcgcgcgcgtgcaggcacgtcacgtccgcgaggccggtggcggcgcagacgtcgccaagaaagcgcacgcgcttatcgagactgtcgagcagcgtgagcgagatgtccggctgcgcgatcttcagcggcaggccgggaaagcccgcgccggtgccgacgtcgatgaccgacttgccggcaagcggctcgaccgtcagcagggcggccgagtcgagaaaatgcagctgcgccacgtccgtctcgccgtggatggccgtcaggttcatgaccttgctgcgctcgtcgagcagcgtgtaatatgtctgaaaacgggccagcgccgccgcgtcgagcggcagacccagcgcggcaaaccccgcgcgcagaagttcgtccatgcttgcctccaaaaatgatcggttgccgccatcttatcacattcccgcgcgcacgtccagccccgggcgggtgagccgaaacgccgggtaaagcagacctcttcc

SEQ ID NO: 12839 - DNA, 4633 bp, Unknown
  gut microbiota DNA sequence
atccatcttaatgaactaaaaaagagctatctgacttctctaacagaaatcagatagctctttattcttggataatctaaaatgttgtcattttgttgtcacagggcaatttccgggcgcaaaagtccagcatttgcaaggctttttggccttttgggtattactcccactcgatcgtagcggggggcttagaggtgatatcgtacacgatgcggtttacgccggcgacctcgtttacgatacggctggaagccttgtcgaggacgtcatacgggatgcgcgcccagtcagcggtcataaagtcgctcgtggtgacgccgcgcagcgcgagggcgtaatcgtaggtgcggctgtcgcccatgacgccgaccgtgcgggtgttggtcagaacggcgaagtactggttgatctgggtgtccagacctgcatttgcgatctcctcacggaaaatcgcgtccgcctcgcgcagaatgtcgcacttctccttggtgatctcgccggtgatgcggatgccgaggccgggacccgggaacggctggcgcataacgagatacttcggcagaccgagctcaaagccgagctgacggacctcgtccttgaacagcatgcgcagcggctcgatgatctccttgaagtcgacgaaatccggcagaccgccgacattgtgatggctcttgatgacggctgcgtcatccttgccggactcgatgacgtccggataaatggtgccctgtgcgaggtaatccaccttgccgaccttcgcgccgatctccttgcccatcttctcgaaggtgcggatgaactgcgcgccgatcgccttgcgcttgtcctcggggtcggtcagacccttgagcgcggcaaggaactcgtcctcttcgttcatgcggatgaggttgaggttccacttggagaacgcctcctcgacctcgtcgccctcgttcttgcgcatcagaccgtggtctacgaatacgcaggtcagctgatcgccgactgcctccgcgagcagagcggctgcaacagaggagtcaacgccgccggacagcgcgagcaggatcttgccgtcgccgaccttttcgcggatcgccttgatcgaggtgttcttgtagtcctccatggtccagtcgcccttggcgtggcagatctcatagaggaagttcttcagcatcagagagccgttttcggtgtggtttacctcgggatgatactgaacgccgtagaagccgcgcgcctcatttgcgatagcggcggtcgggcaggcatcggtgtgcgcgacgagctcaaagccctccggaacctttgccatgtagtcgccgtggctcatccaggaaatgccctcggcgggcagacccttgaacagcttgcagccggtgttgtagaaggtacgggtcttgccgtattcacgcgcggtgtcctcctgtgcggcggtgacctgaccgccgagggtgtgcgccatgagttggcagccgtagcagatgccgagcaccgggatgccgaggtcgaacagcgccgggtcgcacttcggggaggtctcctcgtaaacgctgttcgggccgccggtgaagataatgccgatcgggttcatggccttgatctcctcgatcgaggtcttgtacggctttacctcacagaatacattatgttcgcggacgcggcgcgcaatcagctgattatactgaccgccgaaatccagcacaagaacgagctgatgattttccatcgtcaatctcctttcgtattgatactcttaaacatataataaaattatgccacaatcgcaggcgttcgacaagtgctttttcaatatttcgacggattttatagggttgattgcaggggggagactttgcttccggtttttcgtcaaaacagcgaatagaaagaggcggagcggtgcagactgagatggaaataactgtacggaaaggaagaatcccattgaaagacaggagactgctggcggcggcgctgctgctcccgctgaccgttctgctgctgttcgcagcgcttgcaagcggcgcagcatccgccggggcggccggcgcgcagccgcaggtacaggacatcgcgttcgagacctgcgtgggcgcgtcgactgaagccgcgctgtgtgcacaggacgcagacggggatgtggtgctgtttcagctgactgagcggccgcgtctcggcacagcggagatcgaggacgaccgtatcatctatacgcccggcgcgcgcacgggaaaggatgaattcagctataccgcggtggacgcggagggaaatgccgctgcaccggcaaagattacggtccgcatcgggaaaaaccgggccggactgacatattccgacatggagggcgatccggcgcactatgcggcgctgtgccttgccgcgcgcggcatcatgcagggcgagcgcatcggagattgtgcgtttttccgcccgtcgcagaccgtgacgcgcagcgaatttatcgcgatggcggcatctgcggcgaagctcaggataaagccgaccgaccgcacggatttcgctgacgacagcggactttccgcgtgggccaggccgtatatcagcgcggcggcggcggacggactggtctgcggctatgagactgccggagcgctcaacgagattcggggacagaacccgatcacgctcgcggaggcgagcgtcgtcatggcgaacctgctgagcgatgccgcgggagtcagcgaggtgatggcggcggagcatgacgaggcggcagactgggcgcagcgggcggtctccgcgatggcgcgtgcggaaattctggatgaaagcacggcctcgggcagcgcctccgcgccgctcacccggagagacgcatgtgtaatgctctgccgcgcgatcgaacggctgtaataacggcagggagcgacggcgggcccaaggcagaggccgggcaacaccgcgcctcgtccgtccgaaaaatttactcgcaaaccgatccggtccgattacgcggtattgccgtagactttatcggcagattgatttataataggtctgtaccggtgaaaaatgacagaacgtcatgggaaaggaaggacctgtttgaaagagaaacagcctgccgggcagatcgactttgccgaggggagcgtgcgccgcaaaacgctggcgcttgccgcgcccatgctcgtcgcgcaggtgctcaatctgctctataatatagttgaccgtatttatatcggcaaaatcccgggggagggcacggccgcgctcgcagggcttggcctgtgcttcccggtggttacgatcgtgaccgcgttcgccaatctgttcggtgcgggcggcgcgccgctgtgctcgatcgcgcgcggaaagggaaaacgcgagagtgcgcagagcatcatgcgcaacgcttatttcatgctgctcgtgagcggtgcggtgctgacggcggtcggtctcgtctttcacagaccgctgctgtatctgttcggcgcgagcgatgcgacgtatccgtatgcggcgtcttatctgacggtttatctgctcggcacgctgtgcgtgatgacgtcgctcggactgaatccgtacataaactgtcagggctttgcgaagatcggcatgctgaccgttgttgtgggtgcggcggcgaacatcgtgctcgacccggtttttatttttgctctgcacctcggcgtgcgcggcgcggccatcgcgaccgtcatttcgcagacgctttcggcgctatgggtactgcgcttcctgaccggcaggcaagcggagcttaaaataggcttccgcggctttcggccggattttgcctgcatccggcgcatcgcgacgctcggcgtttcgagctttgtgatgtcgtttacggacagtctcgtgcagatcgcgtgcaacgcgacgctgctcacattcggcggcgatatttatatcagcgtcatgactgtgctgaattccgtgcggcagatcgcgcagacgccggtcatggcgatcgcggacggtgcgacggcggtcatcagcttcaactacggcgcgaaggcctacagccgcgtgcgcgacgccatccggtttatgacgcagcttgcttttggctataccgtgctgagttggctgctgatctcgctgttcccggcggcttttatccggatcttcaatcaggatgccgccatgctgcgcgcggcgatcccgtcgctgcacatctatttcttcggctttgtcatgatggcgttccagtattccggtcagagcacgttcaagtcgctgaatagggccggctttgcggttttcttctcgcttctgcgaaaggcgttcatcgttgttccgctcacgcttgtgctgccgcgcgttgccggactcggcgtaaacggtgtttttgcggccgagccgatctccaatctgatcggcggacttgcatgctatatcacgatgcggtgcacggtcatgcgtgagctggagcaccgggaaagcatgcagcgaggacaggtgaaaaaataatttcggatttttttcgaaaaacctgttgacaattcgggcaaagtgtagtatcctaacatagtcgtcactgagtgacacacaaaacactgaaaagtgaccggctatggaagtttagctcagctgggagagcatctgccttacaagcagagggtcagcggttcgagcccgttaactt

SEQ ID NO: 12840 - DNA, 401 bp, Unknown
  gut microbiota DNA sequence
cgggcagattctgtgcagcgacacgcgcgacggttttctcgcgcgctatcgcgcgcagttcggcgacgggcagatgtcgctcgaggacattcttgtgcgtgtggaaaggagaagctatgacagcgaagattttctctaaggacctgcgcctcgcggcgcatccgatgatgtacgtgttcgcgctcttcggcgtcatgctcatcatcccgaactatccgtacacggtcgtgtttttctacggcctgctcggcattttcttcacgttcctcaacggccgcgagaataaggatgtctattactgcgccgtgctgccggtcacgaagcgcgaccaggtgcgcgcccgcgcctggctcgtcgtggcggtggagctggcggagcttgtgatcgcggtcccgttcgcg

SEQ ID NO: 12841 - DNA, 1178 bp, Unknown
  gut microbiota DNA sequence
atagcgcacgtgccacggctcgttgcggccggtgatgctgaccttgtccgacgggtagcggatgacgaagccgtagtccgcgcagttgtcggccagccacgtcagaaagcgcgcgttgaccgtgtccacactcagcgaggaataatactggtcgacgatgtccgcgccgaggccggtctgatggtcgctcgtgccggggggcgcggcgatgcgcgcggcagccgtctcggcctcgtcgcgggtatcgcccttgcgcatgttttcgctgacctgatcctcgtactgctgcttctgtgtgaggtacgggcggtaggcacagtagatatacgggctccagccggcgtcccgggccgccttgagcagtgcgttgagcgcatcgacggcgcgggaatcgaacgtggactgtgagccgctgatcttgctcacgtccggaacatagtcgctgatattatgcgcctgactcgcgatgagatactcccaggaggaaatatccacatccggcaggtcgtcgtactctttcgtgtcgggcttcgccgtcgtctggatgtccggcgggaggatgagatccgtcggcgcggcgggcgcggcattgctgcgcgcctcgttgatgcgtgagaggatgagcatggcgcacacgacgaccaggaccgtcagcgccaccgacagccaaagacgtttgttcttcatacagatccctcccggacgaaaaaatgaaaagcagctcacatgagttgcttttcaggatagcatatttttcgcgtcccggcaagtcccccgtcacagatcgacccgctcgtagtttttggccgccttccagtacgccagccacgacagcagcgcaaacgccgccagccccacggccagcaccggcagctgccgcacctgaccggccgcgtcagtcgcgtcgagatacggcccgacaaccgggaaatgagacaacgcctcgacgagcaccatgagcaccgtcatcgggatgaccgcaagcaggaacgcccgcccggcgcggatggccgtcttataaaacacgggcaggaacacgatgttgaacacgccgtagatcagcagcacggagccgaagagcgcgacgtttgcatcgatgccggcgaggttcgtgccgttggggttgatgcgcgcggagagaaacgcgaacgggaccgcgatcacaagctccgccagct

SEQ ID NO: 12842 - DNA, 15791 bp, Unknown
  gut microbiota DNA sequence
ggcgtatctgctgcaaaacgactacgctgacagtctatgacaagacgtttcagctgatggaggaagatctgctggagcagtatgatgcgacaatgcttcggttcgaggtggcccgctcgggagcgaagttcaagcgcggcctgtccgatgaggtcaaaggcagcaacaaggaaatcctgaaaaccgtgatgaatgagtcggagaaaaccattcactcatatatgaaaaaactgcacgcaaatctgccgtttgtgcggtattctgactgcatcgcacggatcgaaaccgtcaaacactccgccacgaggaagaatatgcggctgttggttgagaagctgtccgactgcaaaagttatgcacaggctgtgaaaaacagcgggctgtccgagaataagctccgaaccgtaagaaagcaattcgaaaaactgggtgtgcagccggctacactgcgggatacagcagggattgatgaattgaaatttgttctgtaaatcgtaaagcctacgcttttcaaggcgtttttctttccttatctacaaggagcagaaatacggcgcttcttccgctccgcaggcacagagaaaggacccctgggcatgagaaatgacgaaattctgacggttaaagaaaccgccgccctgctcaaaaccacgcgccagcaggtgcgcaagatgatcctgaacgaagaactcccagccgtaaaggtcggccgggagtggagagtgctgaaagcagggattatggagtttttcgagaaacagatatgttactgacatataaacatcctaagatgaatgcaaagtcttgcatcaaatgcgatgtgttgtgcgctcatatgagcgagaaaactccatatggcgtatattcagccatacggagttttccatattagaagagagaggtggcttaataggaataaattatttaatattgattgcctgttcggtttctttgtcaaacagatgaattttgttcttatcgatagcaagcgaaatatggtcgccgctttccgcctgcacgcgggacggtgcgcgcacgataagtttctgaccgccgcatacagcatgaatataaatttccgcacccatcatttctgcgatttcaacttcggcctctaccgtgctgtcctcgctcatttccaggaatgcgctttccgtatggaagtcctccggacgaacgccgagaaccaccgtctttccggcgtattccgccatcagcttgtccgggaacttgccctgcggcagagggatgagtttgccggcaaaattgacgccgtagccttcttttcccttttcgatcgtgcagtcgatgaagttcatctgcggagaaccgataaagccggctacaaacatattgcagggcttgttgtagaggtttgtcggcgtatcggcctgctgaatgataccgctcttcataacaacgatacggtcgcccatcgtcatcgcctcggtctggtcgtgcgttacgtagacaaaggtcgtgcccagtcttttatgcaggcgggcaatctccgcgcgcatcgaggtacgcagcttggcatccaggttggacagcggctcgtccagcaggaatacatcagggtcgcgcaccatagcgcgtcccagtgcgacacgctgacgctggccgccggacaacgccttaggcttgcggttcagcagatgctccagatccagaattttagctacttcatgaaccttccggtcgatttcgtccttcggcatcttctgaagcgacagtccgaacgccatattcttgtaaaccgtcatatgcggatacagcgcgtagctctggaaaaccatcgcaatattgcggtccttcggcgcaacgtcattgacgcggcgctcgccgatatacatatcaccgtccgtgatctcctcaagacctgcgatcatacgcagcgtagtcgatttaccgcagccggaagggccgaccagcacgacaaattccttgtccgcgatttcaagattaagtttcggcactacttcaacgccgccgggatatacctttctaatattctgtaaagaaatctttgccattccttgattcctccttattcgtttgcacttacttcaaacagtcgtgccgagatattcaccggcagctcgaccgcaagttcgccgctttccttgtgccatgcgcagcggcacgcggcattctgcggatagaggcactttacacttgcgtcttttccgcgcagatgcgaaatgggaagcagacaggtatcgtttccgctgtcgctgcgccataccgcaatatagtttttgtttccggctttcagtccgagagatatccacgaatccccgtacgaggacagacccagcggccagaacggaaccgcccgccgaatatcctgccggatgctcttgtagcatgcaatgccttccttcaccagcgcgaaccgagccgggctgagattgaccagatggccgctttggtgaatgcgaagcagcattgcgttgaccatgttgaaaatcgtttcttcttcatcaccgtcggtcagcggataggaccacaccgcagcctgctccggggtgaccgccgccggtgcattggcggccagagtcgcgtactgccggtaatcggtctggtcgcttgtggactgaaggctgtgccgtgccagcatcgcatagtccgtccgcatgccgccgcttgagcagttttctatgacgagctccgggtatttttcaaaaatatgatcgatccatgccagatacgcccggttatgctccagcagaccctgccccgtgctgtcggcctgctgatcggtaccggtgcccggctcgatgttgtaatccatcttgatatagccgacgccgtattcattgaccatgcggtcgatcacccgctcggcatagtcccgaacctccgcattgcggaaatcgagctgatagcgccccttatcgcacacacgcctgccgtgccgcacgaagaaccagctgtccggaagctgctttgccagcggacagttgacgcccatgacttccagctccagccatgcgcccgggatcatgcccgcgtcgcgtatggcgtccatgacctctttgaagccgcccggaaagcgcttttccgaggggagccactcaccgacgccgtcccaccatgcgccgtccgcataccatccgcagtctacgacaaagtattcgcatcctgcttcccgcgccttcggaatcatttccagttccttctgcgtcgtggggtcaccggacaggcagttcatatagtcattgaaaatgaccgagagctgctcattgtcacgattcgggcggcgtatccgccgccggtattcggtcagtgcagccatagcgcgatccatgcctgcggtttctacaccgatgcaggcaggaaccgaaacaaaggtctcgcccggcatcagctgcttccaccagtggttatgcagctcatccggaccgccaagctccagataatactgcccttcgtagtcactgatctcccagtgccacgaaccgttatgttcgatctgccagtaaagcgatacgccggcttccgtatcctcgagatacgccatcggaagatactccttggtagaccagttgcccgtattgctcacggaaaagacctgcgtcgattcggcttccggatcggaaccggccgtgaaggtcaagcccagatcggaaaagctgtatctgttccagtgcatttcccgtttccacgagtggtgcggaacgctgaggcgcagcttgcggtccggtcgaatcaggccctctttgccgagtcccatcagacagaacgaggagagcgcttccagcccctgcgcttcagtcccgcagttggttacctcggtccagctgcggacgaccggaatgccgtcataaaactgataatgcatggtcagatgcagtccggtttcctcgtgaacggtctcccattccagcttgcggccggtgtcattccggctgtcgcggaaatccagatacttcatttcatatccgggcgaggtctctacgattttcgcaccatgccagttgctggggcgattgcgtccggtcacctgtatctcggaggggaaatacaggtccttttctccctgccggacgagtgtgttctcgtccagcggaagggcggagaaatgcaccagccggaccttatcgcagcgcacctcaaagaccatatggataccgttttcgttgattgcgatacgcttcatggcaaacctccatcagcccttgaccgaaccgctcatcagaccggcaaggaagtatttctgaaggaacaggaaaatgatcgtgaccggcaggaccgaaatgacggatgccgccatcaggccgccccagtctaccaggttcgcgcccttgaaaagcatgattgccggtgtcagcgtgcgcagcttatcggacgaaatcagaacgtagccgaacatgaactcgttccacgcattgatgaacgcatacagaccggtcgaaatcagactgggaatcgaaaccggaagaatgacgcggatcagcgtctttgctttggagcagccgtcgatctcggcggcttcctccaggtcgatcggtaccgtgtcaaaaaagctgctcatcataaaggtgcagagcggaatgacgaacgtggtgtatgccagcaccagagaaatgtgcgtctccagcatatgcatctgctgcatgatcatatacagaggtaccagaagaagaacgcccggaatcatctgcgacagcatcatcatgaagttcgaagtcttcacgatgcgcttgcggtagtaacggctcagcgcatagccggccagcaccgcaatgatcatggagatgagcgttgcggcgagagaaacgacaaagctgttcttaatataggtaagaaagccgttatcgaccagcacgcgacggaagttatcgatcgttggattgtcgatcagcagcgaaggaactgccgaacggatctcatccttcggtttcaatgcagaaatcagcatccagaagaatgggaaaacacagatgaccgccagaatgctgatcagaatgtaggtaacggcggaaacagccgcccttgtttttttactgcccattttttccgcccctttctcagcctgcctggctgttgattttttctcgtttgcggtaatagaatacgaacaggatcgtcatgaccgtaaacatcatggtagacagcgcggacgctgcgccgacattgaactttttcatcgaatagcgatagatcatgatcggcagcgtttcggtagcgtagttcgggccgccctctgtcatgacccagataaagtcgaagttgatcgcggtccagatgacatggatgaatacgatgaccagcgataccgacttcagctgcggcagcgtaatgcggaagaagcgggtgaacatgcccgcgccgtcgatcgccgctgcctccgacaggtcgccgggaatcgactgcatcgcagccaggaaagaaatcgtgtagtacgggaagctgcgccagatatttacgaaaatgactgtcgccatagcaaatctggcgtcgccgaggaagtttatcggagcctggacgatatgcagatgagtcagcaggtagtttacaatgccgaaatctgtattgagcatccagtcccatgtcatgcctgcaacgatgatcggaaccagccagggaataaagacgcaggttcggaaaatcgcgcggcccttgaatttctgattcagcagaacagctgccagcatgccgacgatatactcaccggctaccgagcacactgtccagattacggtgtttttcgcatcattccagaagtgttcatcattgagaattgtcttgaagttatccagacctgcaaatccggaaacattgggctttatcaggtttacctgagaaaacgcatcatggattaccttgcccagcggataggcaatcattaccgccagaaacagcagagcgggcgccagcatgatccaggctgtccggttgtctctttggtcgcgtgttaagtattttttcttcttttccggcatatttctccacctttctccaggattaagagtatgcataccggaacggcttccgctccggtatgcaccattttctttttacgaagcgctcagctcgccggactcttccagagaggtgttgactgcatcggccagccactctgctgctgcctgcggcgtcatgccctcctgaaggaccttagcgatggaatcgatcatagcctgagaaatgctgcccagcgttaccggcgggaatgcaacgccgttatcggacagagcctggaagtcctcggtccacttgcccggaacggttacatcggaacgcggagatgcgctggagtaaacgtcctgctgccattccttgccgcatacgtaggtcgcaaagtcgaatgctgcgtcgttgttcttgctggtgttgaacaggaacagcggcttcagctccatgtaggttgccggcgtgccgccttccggtaccggaatcggctctacggtaacatcggacatcacttccggattggcgtcctctttttcctggagccagttgccggttacgtagctggcggagaagccgttgacgaagttgtcgtcggtctcttcatagccgaagctcttggagttcggatcgacaacgccgctgtcgatgcagtccttatagaactggaacacgtctgccgctgcggccagctggtctgcattatccttccaggtattcttgtacatgccgtcatcctgcagcgagcagatctcaaggcccttctgcgccagataaacgatcatttcctgcggagcacgcacgcccgtgcaggccagcgcatacggataggtgccggtcttatccttgaaatccgtcatggaaagcacatcgtcccaggtagccggtacggacgcgccgcccttttccatgatattctcgtggcacagataagcgcgaaccgtcatttcgtacggcacaccgatgatctcatcgccgatggacatacccttcatgaccgcgtcgctcagtacggaagcgtcgtcccagtttgcgtagcggtcggacaggtcctccagaatgcccatgctgtggaattcgccggtccactcgggcaggccccacgcaacgtccggcgtattgccacccgcagccgcggagaggatcttgtcatgcagcatgtcataggagaactcggtatagttgaccttgacgccggtctgctcctcatactgtgctaccagcttctttacgttttcgcgctgcgaatccgacaggttggacgaccagacctcaagcgtcgtgctgccgtctgcgctgctgccgccgttagaagacgaaccgccgcatgccgccagcgaaagtgccatgctggctgtcagcacgcctgccagagctcttttccacatttttctcatttttcatacctctttctctgtttttgtcctgttatctcttccactctacttctctgctgcttattccgccctccttatgcgctgccgtccagcaggcgacggcgtttttattttcaggccttctgaccgtaataagcgtttttgccgtgcttgcgcagataatgcttgtccagcagctcctgctgcatcggctgcacggtattgttggaaaccagcaggtcctgccatgccatcagcgcacattcctccagcacaacggcattttctaccgcctttttcggcgtcgcgccccaggtgaacgggccatggctgtgaacgatgaccgccgggacctgattcgggtttttatcgcggaaggtctcgacaatcaccttgccggtctccttctcgtactcgcccgcgatctctgccggcgtcattgcgcgcgtgcaggggaccgcaccgtagaaatagtcgccatgcgtcgtgccgagcgccggaatcggcatgccggcctgcgcaaaggtcgttgcccagcgggaatgcgtatgtacgacgccgccgatatccgggaaggagcgatacagttcgatgtgcgtcggggtgtccgaggacgggcgaagcgaaccttcgacaaccgttccgttcagatcaaccacgaccatatcatccgccgtcatgtcctcatattccacacccgacggcttgataacgatcaggcccttttcccggtcgataccggatacattaccccaggtaaatgtgatgagcttgtgctttgggagcaggagattggcttccagcacctcttgcttgagctgttccagcatagcgtctctcccctccttatttcagcttccatgccagatcggacacgagcagctgctgcttgagtgccgagatggtggtatccttcgtaatatgaacaaattcaatgcccatgatctctgcccagtcttccatctgctcagcggtaacggcataggagagcaccgtatgatgcgcgccgcctgccatgatccatgcgtggataccggttttcagatccggcatacccttccacataacgcgggctaccggcagattgggcatttcgtaaatcggcttgatgcattcaatatcctgtacaatcatgcggagacggccgcccatatcgatcagcgaaacgacaatggcgttgcccggatgtccctcaaagaccagacgtgccggtgcggccttgccgccgatacccagcggatgcacctcgatgcgcggcttttccgccgcaacagacgggcagacctccagcatatgcgcaccgagcgaaagctccttgcccggttcgaggtcgtaggtataatcctccatgaaggccgttccgcccgggacgccctcgctcatctgcttcatgatgtgcgtcagcgcggataccttccagtcgccctcgccgccgtagccgtaaccctttgccatcaggtcctgcgaagcaatgccgggaagctgttccatgccccagagatcctcaaaggtattggtatatgcaccgcagccgtgctcatccagcattttctgaatggcgatctcctcgcgcgcctggtagcggacggtttccatatcatcggtcgcgaactcgtaattctgctgatattccttcatcaggctgtcgatttcctgctcacttacctgattcatcactgcaacaagatcgccgactgcataggtattcacctgccagccgagcttcatctgtacttcgaccttatcgccttcggtcaccgcgacctgacgcatattatcgccaaagcgcatgaccttcagctcgcggcttacggccgcgcctactgcggcacgcatccagctaccgatttttccctgtacatctgcatcttcccagtatcctgcaacgatcttgcgcggcagacgcatgcgcgctgcgatgaagccgtgttcgcggtcgccgtgcgctgactggttcaggttcatgaaatccatgtcgatgccttcgttcggaatgttgcggttgaactgcgttgcgaagtggcagtacggcttctggagcaccgacagtccgccgatccacatcttagaaggcgaaaacgtgtgcatccagacgatcacgcccgcgcagcggctgtcggcgtttgccgcccgcattacctccgtgatctcatccggagtctttgctaccggcttcaataccagcgagcagggaagcctgcccgaccggttcattccctccgtcatgatctgcgcgtgttcctttacctgacggagcgtttcttcaccgtataaatgctgagagcctacaatcagccaaaattcataatccttcagtgccatgcggtatcttcctttctgttttcccctgcgtttttcataccgcctgtattgcggtttcctcaacagccagaagtccctgatatgcgtgcatataagcggtaaatccggcaatgtccgcgggagccggatccttttcgatgatcggcatatccgtaaagacgttctgttccatgtactgcgccagtgtcattccctctccgctcagcatatattccgccagcagcgcgataccccacgcgcctccctcgccggcgttttccataaccgatacaggaacacctatcgcagcagccatgattttctgccctgcctccggtgtcttgaacagaccgccgtggcccatcagtcgatccagcttgacggattctccttcggtcagcagctccattcctattttaagggttgccacagcagaatacaactgtgcgcgcataaagtttccgagcgtcaggcggctttccggacggcgtaccagaagaggccgtccctcctccatgtcaacgaccggctcacccgacagatagttgcagcacagaaggccgccgccgtctttttctccctccgccgctttggaatatagcagcgaataaagtctgtcatcactcagatcgcttccgatgcagtgtgcgaactcctgaagcatgcctgcccatgcgttgatctccgaggtgcagttgttgcagtgcaccatggcaaccggcttgccatccggcgtcgtcaccatgtcgatctccggatatacctgactgagcgggcgctccagcacgaccattgcgaaaatggaggtgcctgccgatacattgccggtacgctcagcgaccgagtttgtcgcgaccatgccggttccggcgtcgccttccggcggacagaacggcgtaccgggctgcagctcgccggtcggatccagcagctgtgcaccctccggtgtcagccggccggcctgtacgcccgcgggcaggacccgtggaagaatgtccagcagcttccatctgaaatgatgcccggcaaccagccggtcaaagcggtccgccatatcggcgtcgtaggtcattgcggcgctgtcgatcgggaacatgccggacgcctcgccgacgccaagaacgcgttctccggtcagctgccaatgtacgtatcctgccagcgttgtcaggtaatctatggaggaaacatgcgcttcctcgttcagaatcgcctgatacaggtgcgcgatgctccagcgctgcggaatattaaacgaaaactgtttggtcagcaggtcggccgcccggtcggtaatggtgttcctccatgtacggaatggaaccaactgattgccgtcgcggtcaaatgccagatagccgtgcatcatgccgctgaagccgattgcatccagaacggtgatcggactgccgtaccgcatccggtaccggtccgccatatcgcgatagcacgcctgcaggccgttccatacctgctccagcggataggtccagatgccgttgaccagctgattttcccatgtatgacttcctgttgcaaggaccgcaccatgtccgtcggtcaggacggccttgattcgtgtagaaccgaattcaatgcccagcaccttgcgctgcggcgcaggctgtacattgaattgttccgtcatgctcatttgtacgcaccttctttttgctgtactcaccgatatgtaagtatcttttgtatttttattgtagcaattgtacgtacaaaaagcaagacgggaaaatgcactgaattttcccgtcttttttattcatattatccaaaaaggtattatttcaggcagcgtacagaaccgcgttcaacaatattaggcttgattttaatatgttctctatgctccggatcttccagacagcgcatcaatacatttgcggcagtttcgccgatatccgctgccggataggtcacagtcgtcagattgtacagctgcgagccggcgaacggcgaattatcgaagccgacaaccgacagatcgtccggaacgcgctttccggcgcgccgcagcacatcgatcagctttgcggcgatttcgtcattataacataccaccgctgtgctatccgccagacgcttgaggatcatttcatccatagaaccctcgaacagatagcggacatcctctgtcgtgtaccacagaatgcagtcatccttgatgtgctcgtcattcttctgcattccctttacaacgccctcgtagcgttttacaccctgaatatcgtcggatttgaaaatcccgccgatctgcgtatgtccccggtcaatcagatgctgtgtgagcagctcgcccgactgtacatcgtccatcagtacatagctgtcgtttgcgccgtcatagcaaccgttgataaacaccatgggtatgcctgcgtcgcgaaaactttgcaggataccttcgttcggcgtagggagagccgttttggtgccctcgatgatcagtccgtccacacctgccgccagcagcttctgcaacgccgtcgcctcgtccagcgttttattgtgcgtaagtcccagcgtaaacagatagtcatgacggctcagcacccgctcgatgccgttgatgatgccgggaaaaatataatcgtccagatacgtggtcagcacaccgactctgcgggtgcgggattcgctgcggttcacccggccggcattctgctgacatacgaacgtgccgcgccccggcgtccgcttcagcaggccctcctgctccaggccgctgattgcctgccgtatcgtctgccggctgtatccaaactgctcagcaagctccagttccgttggaatctgctgattcgcagtgtattctccgctatttatctggtccctcagccattgctgtaacagctggtatttgggctgtgccatatctcattctccttgatttgccatgatcattattacatctcctattataacgtatgttttcatttttgtaaacaaaatgtacgtacaattttgcatatctattttctgtcagggtcgccgctcagccggagccggttctgcagccgccacgttctgggcggcacctgcattctgttcttaaacgctttattgaattgcagcgcgccttcatagccaacctgctgcgcaatctgataaatcggcagattggtgttgaccagcagctctttggccttatccattcgataattgatcaaatattcctgcaatgtgacatgcagcgtgctgcgaaacagccttgccagatggcttcgggtaacattgcagaaaccggcgatttcatccagcgagcgaatatccgcatagcgcgattcgatatagcgcatcgcctccgcaatgtagacattggcgatattgatatccgtcgtaacgttttttgactgtaccgcggtattttccatcagtccgtcaaagaaaagatgcagctgcccgataatgaacgcttttgaggcatcggggcggccgagtatctgacgaagcggctcccggacgcgggaagataccgcatgcgcatagctttgggggtaaaaaaccggattattccgcgtcaggccgcacgcacggagatacgacggtacgctcaggccggtgaatacgatccagatataatgccatgggtcgttctcatcagcacggtacatatgcgcggtatgcggctccagcagaaaaccttctcccgccttgacttcaatcgtttcggagagaatattctgtcctttttcgccggagggctgaagcataaccacaccttttcccgatacaacgtaatgaaaaatgtattcattacgaatattcgggccaaaggcatacagcggcgaacactgctgatcgccgatttccagcagcgccagatcctggcaggtgttgaaattaaaaagatatactaccatgtcggtccgtcccttccaagctgactttatcaaacatatctaacaaaattttataaattttatcgcagaaaaatattttttgcttttttaagtcatttgatactttttataatagtgctataatccaatttgtcaagacaaatcagtcggatttgatcatacaatttcagatttacatgatttatgaaagaagggtaattatggacaagaacttgtttgctgtcaatccgccgatgggctggaacagctgggactgctacggtgcctccgttacggaagaggacctcatccgtaacgcggattatatggcagagcatctgaagccctatggctgggaatacgttgtatgcgatattcagtggtcggagccgaccgcagattctaccgcctatcacgcctttgctgagctctgcatggacgaatacggccgtctgatgccctccccaaatcgttttccctccgccgcagacggaaaaggcttcaaaccgattgctgactacattcacagcaagggactgaaatttggcattcatatcatgcgcggcattccgcgtcaggcggttgcaaagaacgtacccatcaagggtaccgatgttcatgcgcgtgatattgctcacacggcttctatctgcgcttggaactcggatatgtacggtcttaatcccgtcgccgtcggcgcacaggcctattacgactctctgttcgagctgtacgcttcgtggggcgtcgatttcgtcaaggtagatgacatctgcgtggtttaccgccgtatcaatcaggattacgactattccggcagagaagaaatcgaaatgatcgccgcagcaattcagcattgcggccgcgatattgtgctgagtctttctcccggaccggccatggtggaacaggcggaccacctgcgcaaatacgccaatatgtggcgcattaccaacgatttctgggaccgctgggaagatattactgaaatgttcatgcgctgccgcaactggagtccttacgtatcgaacggctgcttcccggattgcgatatgcttccggtcggccatatctccattcgcggctgcgagcacggcgttttcgagcgcaacacgcttctgactcgccccgagcagcgcaccatgctgacgctgtggtcgattttccgttcgccgcttatgcttggctgcgagctgaccgatctggatgaatggacgctcggcctgattaccaacccggaagtgctggcactgctgaaggacagccggaacgcccgcgaaattctgaatgtctgcgacacgattgcatggcaggctgaagatgagcagggtaacacctaccttgccgtattcaatctcggcaatcttccggcaaagcgcgagatcacgctggacaagctcggtctgtccggtgaatacacggttcacgacctctggggcgaccagcccgatgctgtcgtttcctccggcattgtatgctcgatcgatacgcacggcgctgttctgtttaagctcacgacaaaatcctaattctccttttcttcaaaaacaccacccgcaaggatggtgtttttttgttctgatcaaaatcgtcttattccaattcgctcagcagcatattcagttcggatatgacatcatccgccgcacggtctgccagtcgaagaacgcacggattgcctgttttcatcgcataggacagtcccgcctgccgaagcagctccacatcattttcgttatccccgaaagccatcgtttcttctcgattgatatgaagatggcgctgcaaaaccgcaagcgctgtgcctttatcgcagtcctgcggcagcaggtccacccacgccataccggaaaccacaggccgcatcgtccctcccgcagcctgcgcgatacgcagacggtattcttcggtggcgccgtccgggaaatacgccgcaattttcagaaacggctccggcaccgctgtcagatcctctacaaccgctacatcattccccacaaaatatcgcatatggtccgcgtaagccgggtcctttggctgaacatagcactgcatgactccgctcagcagcggttcgcagccctccatctccagcatgcagcgcagaatcttcgtgccgagcgcccggtcgatcacctgcttatacagcacactgccgtcgctgatgaccagactgccgttttcgcagatatagtcgattttgtccgcgacaggggcaaacagccgccgcagattggtatactgtctgccgctcgccgccgcaaaacgaattccgtgctgttccagccgttcaataacgtcaaacagcgccgggtctaatcgggtctgtccgccttgc

SEQ ID NO: 12843 - DNA, 1001 bp, Unknown
  gut microbiota DNA sequence
gaaaagctgaccggttcgccccgtgcgatcgtgaccggcgagaaaatcaccgaataaagtcgaaaaagctccgtttccgcagcagtgtgccgggaaacggagctttttattacagtttttccagttggaagggagtggtctggtagacgtagtagttgatccagttggtgtagaaaaggtgggcgtgcgctttccaggtgacgagaacgtccgcagacgggtcatcgttgcggaaatagtgcttaggcacatcagggttcagacccttcgcgaggtcgcgctcgtactcttttttcagcgtgtccgagtcgtattcgccgtgaccgagtataaaaatctgccggccgttgacagcttctacgatataaacaccggcctcgtgggactctgcgagcaggcgcagttcggaatgcttgcggatgtcgtcggcgcggacttcggtgtggcgcgagtgcggcgcacagaacagatcatcaaagccgcgcatcagcggttcgtgcgggaacagcacgtgatgcttgaaaataccgctcattttgtgcgaaagctcatactttgggataccgtaatggtaataaagaccggcctgcgcgccccagcagatgtgcagagtggaatgaacgtgcgttttcgtccattccatgatttcaaccagctcgtcccagtactcgacctcctcgaacggcatcagctcgatcggtgcgccggtaatgataaaaccgtcgtatttctggtcgcgaatgtcgtcaaaggtcttgtagaacgtcaggagatgatcctcgggcgtgtttttggagtgataggtcttggtctggatgaggtcgacctcgatctgaatgggcgtgttggacaggcagcgcaggatctgcgtctcggtcacgatcttgagcggcatcagattgagaatggcgatgcggagcggacgaatacgctgggtcgtcgcgcggtgttcggtcataacgaagatgttttcgctctcgagaaccgcacgcgccggcagg

SEQ ID NO: 12844 - DNA, 45810 bp, Unknown
  gut microbiota DNA sequence
atttgcgagtaaattttgcgtactgacgaggcgcggttttgcggtaatacttgatgtattaccgtgaaatcgcaacaaagtcagggcacaaaatttccgtaaagcgccgcagctttcattgtgcggtgttgccctaatatcagccttagtaaacgtactcgaattcgagctcgccgatgatgaccggcgcattttcctcgatgcccatttcctcgagcttcgcatagatgcctgcggtctgaagcatgcggtccatatactgacgggattcgtagtcgtcgagattgaccgagcccatgaccttgtccacccatgcgccggtaacgacgtaggcgtcgccgtcgcgctcgatggtccagtcgttctcggtgacgggagccgcctcggtctcgacgaactccggctcgtacacgaataccggcggcagctgctgcagctcgtgccaagtgagattcatcagctcccggacgccctgattggtcgccgcggacagctccgcgaacaggaagccgtgctcctcggcatactttctcagcttttcgaccggctcgcggtcctcgcccagcaggtcggtcttgttcgccacgatgatctgcggacgcgccgccagaaactcgctgtaaccggccagttcggcattgatcttctcgatgtcgtcgatcggatcgcggccctcgctgcccgccgcatcgaccagatgcagcagcagacggcagcggtcgatatggcgcaggaagtcatgaccgaggccggcgccctcgctcgcgccctcgatgatgcccgggatgtccgccatgacgaagttctgctcctcgcccacggagaccacgcccagattgggcacgagggtcgtgaagtggtaattcgcgatcttcggacgggctgccgatgccatgctcagcagcgtggacttgccgacgttcgggaagccgaccagaccgacgtccgcgagcagcttgagctcgagcacgatgtcgcgctcaacgcccggcagacccggcttcgcgaagcgcggcgcctgacgggtcggggtcgcaaaatgcgtgttgccccagccgccgttgccgccctttgccgcgacatacggctcgttatccgacatatccttcatgacctgtccggttttctgatcgcggatgatcgtgccgcgcggcacgcggatgacgaggtccgcgccgtccttgcccttgcagcgcttgccgccgcccggctcgccgggcgccgcgacatactttttcttgtagcggaagtccagaagcgtcgacagattgtcatccaccttgaagatgaccgagccgccgcggccgccgtcgccgccgtccggtccgcccgccgcgacatacttttcgcggtggaagccgaccttgccgtcgccgcccttgccggaaacgatcttgatctttgcaatatcaataaacacagtgttgtcctcctttcaagtggcagtatgcaacagtattataatcattaaaacaaaatcccagacgcctgtctgggatttgtgtcttgttcggtttactgcgggtaaacggaaacctgcttgcggtccttacccaggcgctcgaagcgaacaacgccctcaacctttgcgaacagggtgtcgtccgaaccacggccaacgtttacgcccggatggatcttcgtgccgcgctggcgaacgaggatgttgcctgccggtacggtctgaccgtctgcgcgcttaacgcccagtcgcttggactcggagtcacggccgttcttggtagaacctgcgccctttttatgcgcgaaaaactgtaagctaatcttcagcatctgtgtgcacctccattacgtttaagaaatcggaataattttgttccagctcggaaaaatgcagctttagtgcctgaagtgcgtcctgaccacgctccaccatgtctttcggcagggtaaagcggatgtgtgcgccctcgtcctcgatgagcgtgtcaacggggatgtgctgtacgtcgtacagcagagcatgcgtcagcatcaccgcactggagatcgccgcacaaacgatgtcctccccttcctccgcatagcctgcgtggccgaggatgtccaccgagaggattttgtccccttgcagcgaaaaagtgaccttcgtcacggccttacgccttgatggacgcgatggttaccttggtgtacggctgacgatggccctgacgacggcggtaacccttcttgggcttcatcttgaagatgttgatcttcttgcccttgccggtcttctcgaccgtgccggttacggctgcgccggaaacgtaaggagcgccgacggtgagcttgtcgccctcgcctactgccagaacctcgtcaaaagtaacggttgcaccgtcctccacgccgagcttctcgacgtagatcacgtcgccctcagataccttgtactgcttgccgccagttttcagaatggcatacattatgattttccctctctttcgttgtagagtcacgcttggcacggcggagcgtcggaaagacgcacacttaataaaagcctatgcacaatgcggcttgtaatagcataacacaagccccttcttctgtcaagcggtttcccgaaaatccgagcgtaaaagagcgtacgatttccgcattcttttctgtgcatttttaccgcagcgcgatatatttgaacgtatacatcgggttattgccgttgtagagcgaggacgagctcagcacgttgaagccgttcttcgcgatctcgacagtctttgcgggcgatgccgccgtcgcaaggccgccgtagatcagattcgcctgcgaaaacgcgccgtccgtgcggcagatgagcacggcgcgcggcgtaaagccgagcgagatgaactggctggtctcgccgtcgccctcgtaggtgccgaacacaaaaagctgatccacgcgcgcgttcgtctcggcgtccgctgcgttcatagcctccaccgtgctctgcatgctgtccgtgagcgagccggacagtgcgctcagcgacgcctgcaccgcgctctgctcagccttgccggcgagctcctgctgaagctcctgcgcgagcatttcgcgcgtcaccgtgccgccgtaggcgccgatcacgagcgactccatgcgctcctcgagcgtttttccgtccgcgcagacccggttgagcgcctgccgcagctgctcgggcgcgctgtcgaaccacgctttgagcgcgtcgggcgcgagcgtcggctgatcgggcaggtcggctatgcgcttttcaaaacggctgatctgatgatcgaacataacgttacctcctgtttttgtgtgaggacgccccgtcggcagataccggagcgtcctcattgtctcaagggcaataccgcataattgaacaagagcgatttgcgagtaaattctgcgtactgacaaggcgcggttttgcggtaatacttgacgtattaccgtgaaatcgcaacgaaggcagggtacagaatttccgcaaagcgccgtagctttaattgtgcggtgttgcccaaggcttcatccccatgaagcaagccttagaataggaatttttctgcgttttgtcaagcgtttcgggtggtcaatcttttgaccagcagcaaaaccctgccgataatccgcgtttttcgcgtttcggcagggtttttcgaatttttcagttgtccttttcctgctttgccgcatcaatatcctgtaaaagctgcgcgcgcgtgtcgtcgaacagcagctttttgttgtgcgcaaagtaggcgtcacagccgaaattctggatgaaccacgacgtgaaccaattcgcggtcagctcggtggcgaacagcacgagctcctgcgaatccgggatggccgcatcgagaaaggcgaaggcgttcgtcagcccctcgtctgcgcggtcggccgcctgtgcgcgcgcctcgacctcaccgccgaacagcgccttgagccgatcgaacgcctgaccgcgcggcgttttttcgagcgcgagcgtctgctgccaggtatccagcagctccgcctcgcgcgctgcgacgaacagcgtgtcccggtcgggcgagccgctgcggcggcgcattagctcctcgcgtttctcgtcgagcagcgtgccgagcgtcttttccccttcgcggacgcacagcaggtcgccgtgcagcgcgtcggtcagcgcatcctgccggtaagccgcgcgcgccgtgtccgcaagacgcgagagcagcaggccgagcacgccgagcttttcgtcaaacggcgcgtcgcgcagctcagaggcgcgcaccttctcccatgtgcccgaaacgatctcgtcgacgcggtagacctgacgatacttttcgtaaagctgcaaatagttcgcgaaatccgacgcgatctgcggcagctggagatactgctcgacgacctgccggtcgaccgggagaccgagcgtttcataggtctgcatcagctcggacagatcctcccagccgcgtgcagtaacaaactgcaaaccgtccgccgtcgcctcgacgcggtagaaattgtcgaggcggatctccagataggacaggatcgcgccgtgaatgccgcgttttccggcgtattccttccagacgccgaaatcctcctcgatgtcgatctttttcacgcggtcgagcgtcacaacgtcaaattcgcgcacggatttattatactcgggcggatttccggccgccacgaccatccatcctgccgggagctgctgattgccgaacgtcttgcactgcaaaaactggagcatcatcggcgtcagcgtctccgagatgcagttgatctcgtcgaggaacaggatgccctcggaaatgcccgtgcgctcgatctcgcggtagaccgatgcgatgatctcgctcatcgtgtagctcgtcaccgtgcgctcctcgccgccgagccgcaccttttcgataaacggcagtccgagcgcggactggcgcgtgtggtgggtcagcgtataggaaaccagtcccacgccggtctcctccgcgatctgctgcatgatctgggtcttgccgatgcccggagggccgatgagcagcaccggccgctgccggatgggcggaatacgccacgcgccgaactcgtccttcgccagataggcgcgcagcgcgttcttgatttcctgttttgctcgtttgatattcatgaaaagcacctcggctttgtttctgtctattccctactataccacgcctcccccggccgcacaagtgccgccttgccgttgtccggctcgcgtgctataatttacacgagaaaaaggcaaaggagcggtggccatgcgctgcatcgacggcgaaaacgaactgatcctcacctgcgagacgcaggcagagggggtgtgcatcctgcggtgcgagacgcgcgacccggtcgtgctgctgcccgacgagatcgacggcgcgcccgttaccgcgctcggcagatatgtcctgagcggccgcgcccccgacctctccggccgggacacgttttccgtgcgcgtgacctgcggcggcccgctccccgtgcacgaagcggacagcatccgcgccgtgacgctgccgaaacagctcaaaaccgtcggcagctatgcgttctacaactgccgctcgctcgaggagctgaccatgacagacagcgtttccgcgtttgacggcggctcgctgatgaactgcctcagtctgcaccgcatccgcctgctcgcgccgccgggcggcgcgacctgcctgccgaaaatactcggcgagaccgcgagtgagctggatgtgcgctttctgcacggcgatgcgtgcacgccgctgctgttcccggcctacaccgaggagctcgaggatctcagcccggcgcatatctttcagcgccgtatccacggcgccgggtacagctaccgccagtgctttgacggcgcggcgctgaacttccggcagtacgaccgggcgctttccgagcttgccgagcggcatgatttcgccatcgccgcccgggtcgcggtgcggcggctcgccgcgccctttgccctgtcggacagcgcacgcgcggactatctcgccgttctgcgcgagcacggcggcccgctcgcctgtgcgctcgcaaaacagggcgacagcgtttcgctccatgtgctgctgtcgctttccgtgctgtcggatgccggcatagacgccgcctgcaccgccgcgcgcgaggccgggcagaccgctgcgctctccgtgctgctcgccgccgccggcccgtcaaagccgcgcggacgcgcaaaaacattcgatctgtaaggaggctcggccatgcagtccgaacgatgggccaatatcgggcgcgaaatcctgttttccgcccgcagcgagctttatatgaacctgccgtttctcgacggcgcactcgcggcgctgccggtgcaggacggcttcgagacgagctcgctcgcgaccgatgcaaaggcgctgtatttcagcggcgcgtggctcgcgcagcgcttcgagcgcagccgcacgagcgtcaaccgcgcctatctgcacacggtctttcactgtctgctgcgccatccggcgaaaatgcgcggccgcgaccgcgatctctggtcgctcacgtgcgatattgcggtcgaaagcctgctcgacagtctggattaccgctgcctcacgccggacaagacctcggtgcggcggcgcagcctttaccgctcgctgcacgagcatatgcctgtgctgacagccgaggcggtctaccgccatttccgccgcgaacgcatgaattcctacgactgcgcgacgctcacacgcgttttcgcggtcgatgagcacacgctctggcccgaggatgatgacgatcaggaccgccgctggcagcagcaggcgcagcgcacccagaccgccatgaatacggttttcgccagcgaagcgaccggcggcgaggccgtgcgcgagcagcttgccgtctccgcgcgccgcacgaccgactaccgcgcctttctgcggcggttttccgccctgcgcgaggagaccgccatcgacgcggactcgtttgactacggctactacgcctacggtctgcgccgctacggcaatatgccgctgatcgagccgctggaaacgcgcgaaacgcggaaaatcgaggatttcgtcatcgccatcgacacctccatgtccacctcgggcgagctcgtccgcgcctttctcgaaaggacctgcgagctgctccagcagaacacgagctttttccgccgcatcaacctgcgcatcctgcaatgcgacgacaagctgcgctcggacagggtcattcacgacgcgaaggaatttgccgactacatggcgcatttcgagcttatcggccagtctgcgaccgatttccgcccggttttcgagcacgtcgaccagcttgtcgctgagggcgcgttccactcgctgcgcggtcttctctattttacggacggtctcggcctgtacccgaaaaagcgcccgaagtacgacgccgcctttgtcatgctcgagggcgagtgctggccggacagcgtcccgccctggggcatccgcgtcatcctccgcgaggacgagattataacggaatagcagcgtttctattcgcgtcccgcacgcggaagcgggcaagaatttgcacagcaaattccgcggcccggtgcaaaaggatttttcccctgcaccgggccgctctttgtgtattcagttaatatgggcgaattacttgacgatttcctttgcggcagccgccagaacgtctaccttcgcctcagcctcggccttgttcgcgcccttggccatgatatataccttgaccttgggctcggtgccggacggacggatgataaaggtcgtgccgccctcgagctcgtagtacatgacgttctgacccttgagctccatctgctcaaccctgccgtctgccatgcaggtacgggtgcccggcatgtagtcgcgggtgaagtcgaccttgtccgggccgacagcggtcagcggcttgtcgcgcagctcctgcatgagctccttcatgcgctggagaccggaaacgcccggcatgacgatggaaatggtctgctcgcagtagtagccgtacttttcgtacatctcttccatggcgtcgtacagcgtcttgccctgcgtgcggtaataagccgccatctccgcgatcagcatggaggcggtgactgcgtccttgtcgcgcgcgtagtcgccgcacaggtagccgtaggactcctcgaacgcgaagatgtactcgtgagaaccgtccttctcgaactgcttgatcttctccgcgaggaacttgaagccggtgaaggtgtcgaagcacgcaacgccgttcttctccgccgccgcgcgcgccatctcggtggtgacgatactcttgagcaccgccggatgcgccggcatggtgttcgtcagcttcttcgcggtgatgatgtaatcggtgagcagcacgccgacctgattgcccgacagggtgacatactcgccggacttgtccttgaggacgatgccggtgcggtccgcatccgggtcggtgccgatgatgaggtcaacgtcgttcttctttgccagatcaatggccagatagaagccttccttgtactccgggttcgggttcttgacggtcgggaaatcgccgtcgatcttcatctgctcgggctcacagataatgtgcttgtagccgaggcggcggagaatttccggaaccagacgatagcctgcgccgtggaacggggtgtaaacgagcttgaagtcgtctgcgacctgctttacgcagtccgggttgacggcaaccttgatgacctcgccgaggtacgcctcgtcggtgtccttgccgagcatacggatcatgccgctcttgacggcctcatcgaaatccgtggtcttaacgccggtgaagatgtcggtcgccgccatttcctttgcgactacgtccgcctcggccgggggcagctgtgcgccgtcctcccagtagaccttgtaaccgttgtattccttcgggttatgggatgcggtgatgttgatgcccgcgatgcagccgtagtgacggactgcaaaggacagctccggggtcgggcgcagctcgtcgaagatcagcgccttgatgccgttcgcggcgaggatgcacgcggactgctttgcgaactcgggcgagaagtgacgggagtcgtatgcgatcgcaacgccgcggtccatcgccgcctgaccgttcgatacgatcagcttcgcaaggccctgcgccgcctgaccgacggtaaagcggttcatgcggttgaggccgacgcccagaacgccgcgcaagcctgccgtgccgaacgacagcggcgcataaaaacggctctcgatctcttctttatcgtctgcaaccgactgcagctctgcgtgctcctctgcgctcagcgcgccgctctccagccagtgcttgtattcagccatgaaatccatgtctatcacctctccagatatttgccccggcagacgcgctttcgccatctgccaaagcctctatctaaattatacgatatctgcctgtcaatgcaaggggattttgcacgaattataaaaaactcccgcagcgtctcgttgttctgcacagtttttcgccatttcttttgtgcattcattcagggaaggtctggaagcgccgtcggactccgatccgcatttctcttgcgatatacggctgattatgctacgatgatactatattcaggcggaaagggcgaaaaaattgatacagtgttttgtcaaaaaggaatatgagccgccgttcgggctgacccggccgccgcgcctgttttccgtcagccggacggatgcagaggcgtccgcgcatccccgcgtcatgcacgcgcatgacgatctggtggagatcgtgctcgtgcgcggcggcgagagccgttatttcgtcggcggcatgccgtatgacgcgcgccggggcgacctgttcatctataacagccgcgtggtgcacgatgagccgtccggccccgaccggccggttgcctcgttcagtctggcgctcggcggtctgagcgtacccggactgcgcgaaaacgcactcatcccggacgatgcctcgcctgtctgcccgctgaccgaggcgcagaccgtccggctcgagcggctgtatgatgtgctgtacagcgagctgaccgcaggcaacgacgacggcgcgcatcatctgctgatggcgctgctgacgctcgtgcagcagttcctcgccgccgccgcgcaggacggcagccgcggagaaaacgtgttcgcgcagcgcatcaaggactacatcgaccggcattttgccgaggatttctcgcttcagtgcatggcggatgcgctgcatgtcagtccgtactacctcgcgcacgtctgcaaggatgtgaccggctattcgccgcttcagtatgtcctgcggcggcgcatcggcgaggcgcagacgctgctcatcacgaccgagctgccggtgacgcgcatcgccgcgcaggtcggatacgacaatccgagccatttcaacgcgcagttttccaaggcggtcggcatgtcgccgcgaacgttccggaaggaatatgttttccataaataagcgatcgcgaaacttcgttttccgataagctgagagcgctcccgacagggagcgctcagtttttatcgtttttccagctctttgatctgctgttccatggtcggcacgtcgcattttccggtgcggatcgcctcgagaaccacctccggggacgccggaaccttattgatgcgcacgccgatggcacgcgacacggcgttcaggatcgccggcgtcaccggcacggtcgcgacctcggaaatgcccttcgcgccgaacggtccctgcggttccgggtcctcgatcagaatgatctcgtagtccggcgtatcctcggcgcgcggcagacccagctgacggtacagcgtcttgaccggatagccgttttccgtcgggtatccctcggtcagcgcatatccctgacccatcgagcaggagccgtgcatctgaccctcgatgatatgcggattgatagcgcggccgacgtcatgcgccgcgatgaccttgagcaggcgcacctcgccggtctccttgtccacctcgacaatggcggcctgcgtcgcatacgcatatgccgggaagttgcggtacttcgcgccgcgctttttcgcgccctcaaaatcaccgatggcaaagcatgggtcggaggcatagtaatactctgcgcggcgctcctcgcccggctgccacggacggctgtctaaatcctgtttgagcttgacgcacgcctcgtacaccgcgcggccgccgcacagcgtctgacgctcggagaccgattcgccggtcgggatggtcagctcggtgtcgccgttcgtgatgaagatatttcctatatccatgtccagcgtttccgccgcgatctgcgtcatggcggtgcggaagccctgtcccatatccgtgccggatacgatcatgtgcagccgtccgtcaccctgcaaaatcagcttgcacgcgccgtcatcggtgaagatgcccttgccgacgccgacgttcttaaatcccgaggccatgccccagccgagcaccttactgcccctcggatactgaccctcatacgccttgagcgcctttttcagacttttttcgcactggtcgatggtgtccatcatgcccatgctgtattggagcacttcgccgccgactgacgtcgcgcccggatagacagcattgcggcggcgcagctcgaacgggtcgatgcccagcttttccgccatcatgtccatcgcggtctcgatcgagatcgccgcctgattgatgccgtagccgcggaacgcgccgccctgtaaattgttgttgcggatggccgagccctcgacacggacgttgggaataatatacgggccgccgctcatcagcgcgccggtcatcagcgtgccgtagctttcgcactcatacgggccgccgtccgagaacatccggcagtccagatactgaaatttgccgtccggcgtaaagccaatctcgtaatccgtgtgatagccgtgccgcttggtggtgaggagcagatcctctctgcgcgtcagcgtgatcttgaccggctttccgcacgcgagcgcggccactgccgccggtgcctcgaggaacgcatcgcactttttgccgaagccgccgccgagcggcgtcacgatgacgcgaatatcctcctcgggcttgtccagaatcttcgccagcatactgcggatctcgaacggcgcctgcgtacaggcatagacggtcgtttttccgtcctgcaccatgccgatggcggagaccggctccatgcaggcgtgctcctgcggctcgatctccttggaaacgtttatctttacgatgtccggccgctgctttgcctgctccacatcgccgctcttgcggccggtgtgcacgataaagctgtttttacggtagccgtccaccatcgtgtagatgccgggcagctcctcatagtcgatcctgaccagcttcgcagccgctctcgcgtgctccacagtatccgctacgacaagcgccagatggtcgccgaggaagttcacctcgtccgtgcagaacaccggctgctcaggcgtccacgtgcccattttgttcatgccgggcacatctgcggcggtgacgatgcgcaccacaccctccgcccgcccggcggcggcgtaatccaccgcgttgatcttcgcgtgcggcaccggcgcccagacgaacgcaccgtgcagcagagtatccgcgccgatgtcctcctcggtgtagtcgtcacagaatttgagcctgccgccggtcttgtccatgccgtccacatcccagaccgacttgccgactgcggaaccggtgatttcgggcacgacctgattttcaccaaccacaataaccgtgctttcgtgtgtgcggaagctgtcgatatccggcgtttcgccgcgcaggcgtgctgccgccagcttgaccgcctcgatgatcttgacatagccggtgcagcggcagtagttgttcttcagcccgtcatagatggcaggctcgtccggtgctgcatcgtgcagcagcagcgcctttgccgccatgaccatgcccggcgtgcagaagccgcactgcaccgcgccgacatcgaggaacgagcgctgaatgaccggcagcatggcatcattcggcgcattttcgatggtctctaccgtttttccgtccacccggcgcagcatcgtcacacacgagcgcgtcagcttgccgtccacaaggacgctgcacgcgccgcagtgacccgtgccgcaggcctccttcgtgcccttcatgcacctgacgtttcggaggaactcgagcagcgtgcggctttcgccgtcctgcacctcgaccggtgcgccgttgagcgtaaatcgaatcattggatttcgccctcccgctgttacttgatttttgccttgatacgcatgaaccgtctgtggccggagtccagcgcctcataaaagtcctcgctgtccttggggtcgtccttggtcagcttggaaaccacatacatcagcacgagcgccacggccagaccgatggtgccgtaccacacatagccgaggtcccacacgaagaacgtcaggcagatggtgatggcgccggccgagatggaagcgatagccgccttgcgcgtcgcccacttgcagtagatgccgaataccagcgccgggaacagcgattcgaccagggaatccgcgaagatcatcagattatagacatattcccagtgcatgagcgaaacgccgaccgtcaccgcgccgaacagcagaatgactacgcggacgaccgaggtctcggacgccttgaatttgcagtgaccgatgccgaccagcaggtccttgtagatgatggacgacatgaccatcagcagcgcgttcgcagtggacagaccgaccgccagcacgccgatgaggaacacgatcatcagaatctgcgccagcacaccgtgcgaacccgcgatgatgttgcacatatacgggataaccagttcggtctccgagctggtcagattcggcatggccgcgagcgcgaccagaccgatgagcatcgtgccgccccagacgatgatctggaggaagggcgcgagaaatgccatctggcgctggtccttcaggcccgcgctgtaatagcccgagcgcacaaagacctgcggcagcagcagcgtgtagccgaacgcgcacgcgagcggatagctgacgcgcgacggataggtgcacacgccgatcggacccggataggagaaccagtccggcgtctgcacgcggacggtctggaaggcttcgatgatggagccgttgaacacgaccttgagcgttacaaagatgatggcccacagcgccagaataaaaaaccagccctgtacggcgtccgccagcgcggtggactttacgccgccgagcatgacgaacacggtcatgatgatgccgcagatgagcgtgaacgtctgcgaggacaccgcgccgccggtcgcgacctcagccgcgcggccgcctgctaccagcaccgccgaaatgaacggcacggcgcagacgatgtagacgaggtcgatgataacggtcagcgccttggactgatagcggcagtagaagaaatccgccggcgtggtgaagtgcttctgctggttgaccagccataccttggtcatcgtgaagtagcagatgatcgggaacatggagtagatgcacatctccgagaaaaagtatcccagtccgtagcggtaatacgcgcccgggcctgcaaagaacacccagacgctcatgcacgaggcgatataggtcatgaccatgaccggccatttgaagcggccgccctgtaaatcgaccctgcctgcatcgcgcttttccttccatgtcgtataacgtgcgatagcgatcaaaaacagaaagtatgccgcaaaaacgatccatactgttctgcccgaaagtaaaccctgtgttgtcatttctctgttatcctttatctgttccgttcggtttcagccgcgggatgcgtatcctcctgcgccgtctcttcctgttcctcgtcctcgatgagaggatattccttttcggtcagcttgcagccgatgtatacggagagcaccgtgccgataaagctgatcaggccgtgcacgatgcaggccgtttcattgccgtaggccggaaatcccgggaaattataaaatacccagaaaaagaacaccgccgccagccagcatttttccgttcttccgattttcatagcttatttcaccttttcattccttctgcgagcgccattcaccgagcagcgcctccgaatccacgaccagtcccagatgcagcgagatcatgcgcagcgccggctcctccagatgctcggagccgcgggtcaggtcgcgcggcacgaccacgcggaaatcgcggttcgcagcgtcgaacgcggtattgatgacgcagcagtcggtcatgcagccggtcagcaccacgcggcggatgcccagattgcgcagcagcagctcgaggtcggtgggatagaacgcgctcaggcgctttttcgtcgtcaccatgtaatcctcgtcgtgtacgtcgatggacattctgttccagcgcgtgccctcgagggcgtgctctgcgatgttggggatttcgccgaccgtaaccggaaacaccatgcgccacgccgacgggaacagcttttcatccgcgccgtccctgcgaagcgtcgagcgcacatggatgaccggcaggccgagtgcgcgcgcctcgtccataaaatgattcagcggctcgatgatctcgcgtccgcgcggagacggacacgggcagtccgggtcggttgacagatggccgtcgtgcatatcgatggtgatgactgccgtatcgtgccggtcgagaaaaacctcccgtagcccttccggaacctccttttcgatgctgtcgaaatatgctttcattcgtttatgctccttccctgtcaagcaccgccgctcttatgatgcggtgctgccgatagccgttttacagctattatagcacacgtgtcatgacacgtgcaaactttttagtcttgcacgaaaaaaaatccgaggcacatggcctcggatgaaactgtcgtaaaacgatcgtctttcctctgtatcttctgttatttctttgcggcggcggcaatattgctcagcgccttcgcgacctgcgcccggttcaccgtacccagtgggttgaatgcgttcctgttgtcgccctgcataaggtggttcttgatgcagaacgaaaccgacgagatggcccagttctggatgctgcggctgtcgctgaactcatagaccgccatgccgtcgccggggacaatttcggcaaggccgttctccgcgaacagcttcatcgtgcgctgaaggacggctgcgaactcctgccgggtgatagcggcgccggggttcagctttttgtccgagccggtcatgatgccgttttcgtagcaaaacgccatcgcgttgtagtaatcctgaccgatttcagcgtaatccgccatgccggaaatgccgctctggctcggctcagcggcgaatttctcgctcaggcggcaggcggcgcggtaaatcgcgtccgcgacctcctgacgggaaaccgtgcgcgacggctcgaaaacgggtgcgccgttctccgggtgtccgacgtccatcagatcatattccatcacatagcgcaccgccggggcgtaccagtcctgcgacgccacatcggccgggagcatgatcaccgtatcatccgaagcgaacgccgccgtcgtcatggacagcgcggtcgcgccggtcagaaaaaatgaaagaacctttttgaaggtcatcgtgtgtagctcctttcgagggaaattggcgaagatgtattttcttcggctatatgattataccacaggttgtgctttttgtgtatagtatgggtgcaactgtaacgcaggtgtaacactttgcttcggggcgcaaaaaagccctgctttccgaggaaaacagggccttgcgtatccttaaaacaattaaaaacgaatgatatcgcttactctgcggtgtacggcagaagagcgatgtgacgtgcacgcttgattgcctcagtcagctgacgctgatgagcagcgcaggtaccggtcatgcggcggggcaggatcttgccgcgctcggacatgtacttcttcagcttgccggcatccttaaagtcaacgtgtgcaaccttatctacgcagaaagcgcaaaccttgcgacggcgacggccgcgctgcggacgctctgcacgctccggacggggagtaaattccttcttggtttcttccattgtcacgtaacctccttcagattagaatgggacatcgccgtcatcgtcagcgagctcctgaaaatccgaatctcccgccgggagatcgaacgccggagcaacctgcgacgcggcaggctcgggccgcatctgcgaaccattatcatagccgccggtaaaaccgccctgaccgcctgcgttgtaggcgtcgcgggacttcttggtctcaccgaaggaaacctcatcgcagttgacttcaatcgcggtgcggttgttgccgttctgatcctgccagcggcgggactggatacggccgactacgatcgccatggaacccttggtgaaccactgtgcaacgaactctgcctgacggccccatgcgacgcagtcgatgaagtcggtctggcgttcgccgttctgatccttgcgaccgcgatcgatcgcgagagagaacgagcacacagccatgttggactgggtatgacgaagttcgggatcacgggtcaaacgacccatcagaatagccttattgagcattttcagttcaccgccttagtcgtccaggctgacgatgatagaacgcataacgccgtccgtgatcttgtagatacggtccagctcagccgggaactcgggcttggactcaaaacggaccagagtgtaaacaccctccgtctgatcctcgatcgggtacgccaggcgacgcttgccccaatcctcgacctctacgttcgtgccgtttgcctcgacgagagacttgaacttgtccacaacagcggtagctgctgcctcttccagagacgggttgacaatgaagatcgtctcgtacttgccagaaatctttgccatattcttagcacctccttttggacttttggcccacaccctttgatgtgagcaaggatactataccattataaccaaccgtggcgaaaagtcaagagaaattttcaaaaaaatcttgacgaattttcaaaaccatgctatactgaaaaagctgtgaacgagaaggccacttctcactatatggcatgcttgcgtggctcagttggtagagcagcgcattcgtaatgcgcaggtcgccggttcgagtccggccgcaagctccattgacccttccgagaaatcggaagggtttttgctttatctgtcgaaaaactgacgttttccgataagatgtgttttgacttcgcaaaacacggaagtataaaaaccgaggcgcatgtccccggtttttatcaatttgcaccacaaattgtatttcatgcgtgcttgcgcacgactttccctcaccccgctgccatcagcgccgcggcggcggcgtcaaaggactgcgagcgttcctcttttccggcaaaggtgcgccacagcctgtccacgcgcgccagaccgccgccgagcgcggtatagaacacgagctgctccatgcccacccgcgcgttggtcagccgcagatgcaccatgcactgcccggcgctgagcgcgatcgggtgcgtaaagcgcagctcgtcaaagccgcgtatataggcccagcggaacagctcgccctccgccagctcgtgcaccgtgccgtgctccccgagccgcaccgccgtgctgctcagcaccacgcctgctcccatgctcgtcaggctgtcgcgctcccgctcgggcgcgtcgccggtatcgaggacgcagagcgccgcttcgccgccctgccgcaggcggacacagcgccgcgcgacccggacggccgtcttttccgcgtttttcccgctgttttcacccgttctgtgccgtttctctgtcaatgtattcgtgtccggttcctccgtttaccttggattgccgcagcgtgctttgtctgcggcggatgcctattgtatcacgccgccgccgcgagccgtgccgaagcgcgcagggaggaaatgaacacttgtgacggctgtatttcccgaaaaaagcgttcccgcttgagattttctctcacgggaacgcttttcgttttattttaccagctccgccgccatcgacagcatttcttcgctgtcaaggccggtatcaaagccgtacagcgagtattccacgccgtcctgcgtccagctcaccgactggaactgtctgttctcgacctcatccgagccttcgctgatggcgagctcgcctgcgcgctcctgctgcttctcctcgtccgtcggctgatagtcgggcggcacgaacagatacgccgtatcgcggaacgcaagcgtcacaccgttcacgtcacgctcggcgtcgggcgcgtacgggtcgtcctcgccgtcaaagaccgtgtacgcggtgtgggcgctgaagtcgagcgttacgccgtccttttcgtactcggcgttgatctccttgacctgttcgcgctcgccggcggcgctttccgcgagcgtatccgcatcatagccgtaggagaacgtaaagccgccgatgctctcggggagagtaaattctactcccgcctgctccatgtgctgctgcgtctgcgcaaggctcatgcgctgatttgcccacgaatggctcgtaatgctgccgaaaccgcctgcggcgaacgcgcccgtgacggcgatagcagccaccgccgcgagaacggcgatacgcttgccccagcgatggcgcggctttacctgtgcgctcctcagcgcaaagtcaacgcgcgttttcatcgtgtccggcgcgtgcaggtcatctgcgcactcatgcagcatattcttcatcttttcgtcaaattccgtcttattcatgtgatgcgacctcctttggtctgctttcccggtcggtcagcgcctgccgcagatggcggcgggcggaaaacaggcggctcttgaccgtgccttcggtcacgccggtcgcctgtgcgatctcttttacggagcggtcgtcaaagtagtagagcacgaccgtcacgcgacgtttttcgtcgagcgtgtcgagggcggcgtacaatctgcgctgctcgtcggtccggagcacggcggaaagcgcgctttctccggtttccccctcgaaaaactcgctgacgggcgtttcacgcttcgccttgcggcagtatttccacgccgcacggctgagcgtgcggagcagccacggccggaatttcgcgccgtcgcgcagcgaaccgatcgactgcgcacaggcgacaaacgcctcctgcgcgagatcctcgccgtccgtccggctgccggtgatgaggcaggcgagtcggtatgcgtcgtccttgtagcgctcgtaaagcgtgtcgaacgcctgcatatcgccctgctgtatccgccggacgagttcacaatctgtcattctatcctgtcctttcctggcaggcgcgccccctgccctcgatgcatctgtatataagagccgcgaggaggatttcggttcaaaaaaaaatttcccggctccgtttttttcgggaaccgggaaagagtcagcttaaaattccgccgtcaccatcagcttggcgaaggccgcgcgggtaatggtctgctgcggacggatcgtgccgtcgtcatagccggagatcagaccgcgctccatgcacagcgcgactgccgcgcgccgggaggccgggatggccgcggcgtctttgacgtttttcagcgctgctgccgtttgctgttctccggggaacgccgcgccgccgcgcacgagcacgttcgcaaacacctgcatcgtgtccgcgcgggtcatcgccgtctcagggtcgcgcgtcgggtcaagaccgtccagcagaccggcgttctctgcggaggacatcgcgcccgcgtaccagaccgtgctgttcgaggcggtgctcaggccctcgcgccgcgcgagcgtcatacacacctcggcctccgtgaccgtgtcctccgggcggaacgcgcccgaagcgccgttcatcaggccgtcagccgccgcctgctcgatatagctggatgcccagtagttcgccggaacatcggaaaatgtcgttttcgccgccgcgagcggacgggtgtacggcgtcagcagcgccgcatagcacgcgctcttatggtcgaccgcagcgccgagcgcctcgtaggtcagcagatagctctccgtgtaggcgcggcgcgtctcgctctcgtactcattatagtaataggtgatccccttcgtgctgatgcgcggaaaactgtacagatacagctcatgctccgccgggagcagctttttcacggtatcgatatagtcgcccgtcagcagatcggtcaggcggtactgcctgccggtatcgagatcaaaggcaaggctattgttccagaccgacgagcctgcgccgcgtccgctgacgcagttcgcccacacgacgagcacgctgccctcgacggacgcgccgtaggtaccctcgagcgcctcgtattccgccgtgaccgaagggcccttgaggaagaacgagcggatgtcatcgttgatgctcttctgcacctttgcgtccgcaaggccgctgatctccgggaaatcgacgttccagccgtgctcggcgccgtccgactgatatcccatgaacttctcgtagtgcacggttttggccgtgatgccgctgccgaggtcgaacgaggccgcctgcgccagcagcgtcctgccggtcgaaagattgatgtatttcgtagtctcatcctgcgtcacgcgcacgacgttttcgctcaggagcgtgggattttccgcgttcttcaggcttgcaaaatagccgccattctttttgaagaagatcaggctgccgtccgccatgccgtgccacgaaagaccgtagcgcagctcgttgaacccgccgacatagctcatcgtgcggtaggcgatgttgccgttcgcgtccaccgcagaggccgaaccgtcctcgctccgcgcggcatacaggccgtctcccatgtagctgaggtagtaatacgccggcgcagtcagcagctttccgttcgtgccgatcaggccccagcggttgatctggcgcaccatcgccgcgccgtcacggaactcggagatcgtcttatagagaaaatccgtgagatattcgcccttcgagatcgagtacagcgcactgttcgtgccgttggtcatgacgaccgtatcgccgccgtagaccgtgtaatataccgggtccgcacctgcgtcgagcgtcgcttttgtcgcgccggtggtgtcgatgacgagataggcgccgttcaggccgcgcacgagcgcgagaccgtccgagaacgcgcccgcagcggcatattccgccgcgaaggccgccgtgccgtcctccttcacaaaggaataccggccggtctgcgcatttctgcacagcagcagcccgttctcaaaaaagccctcagcgcccggataggaaccgagcttcgtgccggagagcgtgtagtagacgctgtgatcggcgtagcggtaggcgatcatgctgtccgagaaatcgaccgagaccggagactcggtgtagtcgacgatcagctttccctcgcggtcaatgactgcggtctgccatttttcgtcctcgaccgccgcaaggccgcagggcgcgaattctcctgcgctggcgtaggcgaagggcagcacggcacgcccttcctcgtcgagataacccgaacgggtcacgccgtcgatgtccgtgcggctcgccgggaagatgtttcccacagctccggccgccgtcatcacggtgaacaccgcaaaaacggtgcacaaaagttttttcatcatagcagttttccatccttggagcagtattattcacagcgccgcgcggcgctgctcacgtatcagaccggggacatatatccccagttaaaattataccctcctgctccgccggagacaagcgaaccgggccaagtgtaacaaacatgacacaaggtagagaaatgttacacttatgtttcatttcgaaggaaaaatcatgtaaaaaaagaccggagtcttgcggctccggtcccggtatgcagtaatgtcaattctgtgctgaatccaacactgtgttcagcgctttctgcaatttttcgcttgtttccacgagggcgagccgctcgtccggctccatccgctcgaaggcggcctgctcgaaggcgcagacggtttcgctgagcggctttgcataggcgcggccctcgtccgtcagcaggacgtggcggcggcggtggtcgtccttcgctacctcgcgcaccgcgtacccccggcgttcgagcgtgctcaccatgctcgcgaccgtctgcttgggcaggccgagccgcgcaccgatttcgctctgcgtcatgggcgcttcggcgcagtacagcgtgtcgagcagatacagcacgttggaggtcacgccgcacctcgccgcgatgcggtcgtaggccgcgttgatgcctgcccacgtttcgtagtaccgcgacagcagacggtgaatatcggtgtttttcatgatgtttttctcctttttcacgcgctgtatttgtcaaccagaagccgcgccatgtccatggccttttcggtcttttccagacggagcgacagatagggcgacgagcctgcgttaagcagcaggcggcccttgaacgcggcgtcgccgcacagcgcggacaggcgcacgaaatcggtctccgcgaacgtgagcagcaggcgtccgtcctgctgtttgatctcggcgatgcccttttcgctcgcctgcgaacgcagcagcgcaatatcgagcagcgccaccgcctcctctggcggctcgccgaagcggtcgatcagctcgtcgagcatatcgctgcgctgctcctcggtacggatgagcgcgatgcggcggtagaggtcgatgcgctgaccggcatccggcacataatccgacggcaggtttgccgacagcagcagctcggcggcgcagtccacgcgcggcttcggcgtttcgcccttttcctcctgcacggcctcctcgagcagcttgaggtacaggtcgtagccgacgctcatcatgtggccggactgctccgggccgagcacgttgcccgcgccgcggatctcgaggtcgcgcatggcgatcttgaagcccgagccgaacgccgcgtactcgcgaatggccgacaggcgcttctgcgcgatctcgctcagtgccttgccgtggcggtagcagaggtaggcgtaggcgtggcgcgaggagcggccgacgcggccgcggatctggtgcagctgcgccagacccatgttgtccgcgttctcgatgatgagcgtgttagcgttcgggatgtcgatgccggtctcgatgatggtcgtgcagaccagaatgtcgatctcgccgtccgccatttcattcatgacctttgcgatctccttctgccccattttgccgtgcacaatgccgatccgtgcatccgggagccgctgctgccacatacctgcacagcgctcgatggactccacgcggttgtgcagataatagacctgaccgccgcgcgacagctcgcgccgtatcgcatcgagcagcacgccgtcgttctgctcgagcacgaaggtctgcaccggatgacggttcatcggcggctcctcgatggaggacatatcgcggatgccggacagcgccatgttgagcgtgcgcgggatgggcgttgccgacagcgtcagaacgtccacgtttttgctgatttccttgagtgtctccttgtgaccgacgccgaagcgctgctcctcgtccacgacgagcaggccgaggtccttgaactttatctttttgttgaacagcttgtgcgtgccgatgaccaggtcgatcgacccggcttcgagctttttcagcagctttgtctgctctgcgccggttttatagcgcgtgagcagctcgatcgtgatcggatggccctggaagcgctgcatcgccgtcagataatgctgccgcgcgagcacggtcgtcggcacgaggatcgccgcctgcttgcccgcgaggatgcacttcatcacggcgcgcagcgcgacctcggtcttgccgaagccgacgtcgccgcacagcaggcggtccatcggccggtcggactgcatatcgtccttgatctccgcgatgcagcgcagctgatcgtcggtctcctcatatgggaatgcctcctcgaactcgcgctgccatgcgtcgtccgccgggaaggcgaagcccttgaccttggcgcgcgcagcgtacagcttgatgaggccgtcggccagctcctttgccgccgccttggcgcgcgccttggcctttgtccagtccgtgccgccgagcctgttcagccgcacgcgctcggtgtcacccgagccgatatatttggagatgaggtcgagcgacgtcgccgggacatagagaaaatccgttccggcgaaggcgatcttgatgaaatcgcgctcggaaccgtccaccgtcatgcgctccatgccgataaagcggccgatgccgtgatgctcgtgcacaacgaggtcgccgggcgacaggtcggtgaacgacttgacgcggtcgcggttcgagcgcttgaccttggcctttttgcggcgtgcgagcacctgcccctcggtcatgaccaccagaccgagatccggatattcaaagccggcggagatcgtgccctccatgatgttgacgcagccgcccttcgggagaaggtcgctcagctgcaccttgaggccgctgtcggtcagcgcgtcgaacatatttttacagcgcagcgtgctgccgcagacgaccgcgaccgcgcgtccctgctcggtatagctgcggatgtcggcggacgccatgtccagattgccgccgtaggcattcatctggttggcgacaaaattttcgagatgctgcggcgcaagctcgggaatgctgttcaaaaagctgtccatgcggacgatctgccgctttatgctgcaaatcccggcgaaatccagcgcgtagccgtccatgccgcccggcatctcgccgcgctccatgagcgccgttacatcgtccgcgatacgggcatgaaaatcccgcgcggcggcgcgcaggcgcggcgtatcctcgatgaggatgagcgtgttctccggcagatagtcgaacgccgtcgccatctgcggatagatgagcggcagatacttgtccgccgccgggagcgttccgttctcgcgcaggcgctccgcatcgcgttccagatttttctgaaggtcggcgtgctgctttttgcggcggctcgatgcaagcgccgcgaccgccttcgccagccctgccgcgccgcccttcgcgagcgacggcagcgcctccatgcacggcagacagcgcagcgtttcacactgctccagacggcgctggctgccgacgtcgaatgtggagatcgagtcgatctcatcgtcccagaactccacgcggtacggatgctcggcctgcggcggaaaaatatccagaatgccgccgcgcacagaaaactgacccatgccctcgacctgtgagcagcgctcgtagcccgcgtctgtcagtctgtgcgtcagctcgtcgagcggcgcctcctcccctgccttcagcgtcacgatggaggaagcgagcagcgcgggcggcatggtgcgctgcgccgccgcctgcacggacgcgactgcaaagcacgcgcccgaaagcgtgtccagcgcagccagacgcgcctgctcgtagccgcgcgacacaccggccacatctgccatgaccagctcgcgcggcggcaggaccacgacctcccgctcggaaaagccgcgcagatcggcggcaaaacggtttgccgcgttgtcgtcatcggtcagcacgagcaccggacgcgccgtatccgcgccgagcgccgccgccagattcgccttgtggatggcggacagaccgaccgtcagaaccggtgttttcccctcatcgaccgcttttttcaacgatttgtattcattcagataagttatactttttgtaatctctgtcatgtgttcacctccgtccggtgcttccggttacaagtatacgccattctgcgcgcagaatgaaggttttctggtacatccgttttgtaaagacaccaaaagggcagattttacaatctgccctgatgtgatacgaaatattttttagtcggccttgtggcaggatgcgcagtctgcgtcgcagccgaggatctcagccgggtccttgcccatgcgcttgtagtagtcggaaattgcggagcgcagcgcttcctcagcgagcacggagcagtgcatcttgaccgggggcagaccgtcgagcgcctcggcaactgccttgttggtcagcttgagcgcctcctcgaggctcttgcccttgaccatctcggtcgccatcgagctggtcgcgatcgccgcgccgcagccgaaggtcttgaactttacgtcctcaatgatgccgtcgtccgaaaccttgaggtaaatcttcatgatgtcgccgcactttgcgttgccgacctcgccgacgccgtttgcgtcctcgatctcaccgacattgcgcggatgggtaaaatggtcaagcaccttttcactgtactgcataaatatatctcctttttgtccaattacgctgaaatatggcacggtctgtgcctgcctttgccgtgcaaaggcgagggggttatccgaaacggtttcgtcaggaaccgtttcggtatctaagggggatgcaatcccccttggacttagtgatgcgccgtcaggtcagcagcagccgacagattcggcttgccgttctcccagaccgggctcatcgagcgcagcgtcttaacgacgtcggtaacggtctcgatgacgtagtcgacgtcctcctcggtgttctgctcgccgagggtcagacgcagagagccgtgcgcgatctcgtgcggcaggccgattgccatgaggacatgggacgggtcaagcgagccggtcgagcaggccgaaccggtcgagccgcagacgcccgcattatccagacgcaggatcaggccctcgccctcgatcgcctcgaatacaaacgaagccgtgccgggcaggcggtttaccgggtcgccggtgtagtgggagtacggaatgttctccatgatgcccttgaccagcttgtcggtcagcttcttgacgtagcccatcttctcgtccagatgctcgcacgcatcctgcatcgctgccgcgaggccgatgaagcctgcggtgttctcggtgccggagacaaggccgcgctcctgaccgccgccgtataccagcggctcgagctgaatgccgttcttcacatacagcacgccggtgccgcgcgggccgcggaatttatgacctgcgagcgacagcatgtcgatgcccatttcctgtacgtcgatgtgcatatggccgactgcctgcaccgcgtcggtgtggaactttgcaccgaccgaatgcgccagttcggagatctgcttgagcggctgaatggtgccgatctcgttgttcgctgccatgatggagaccagtgcggtgtcctcggacagctcgcgcttcagctgctcgaggtcaacatgaccttccttgtcaacgttcaggtaggtgacgcggaagccttccttttcgagcgcctcgcaggtatacagaaccgcgtgatgctcgatcttggaggtgatgatgtgcttgcggcccttggaggacggaccgtgcatgaagccgcggatcgcgaggttgtccgcctgcgagccgccgccggtgaacaggatctcgcccggtgcgtaatcgttcttttcgttgaccggcatcgctgcgttcaggcacttgccgacgaccttgcgcgcctcattgatggcctccttcgcctcgcggcccatacggtacagcgaggacggattgccgtaatgctcggtcagccacggcttcatcgcgttaaacgcgatttcggacagcggggtcgtcgccgcgttgtccgcatatacaaatctcttttccattttatatctacctttctttcccaaaaaggatgctcagacttgaacgaattaccagtaaaacggtaggttcatttcgtatatctaatatacacccgaaacgggtattttagcaagtgaaaaactgacgaaacagcactcatgcgcgggcgctttttgcatcacttcgtgcattttgcgtagttttaacgtccggtttccgtggtttcagcgctcgagatgctttttcagcttctggaggactgcgtcgtactgtgccgaacgggcggtcgggttgccgcgcagcaggctcctgcgcgtgcggctgagacgcgaagcgcgctcgtcgaagcggcgctgaagctcatccagacggttctgaatgtcctctcggacatcggcggcgtgcttggcggcggcagcgcggcgggatgcggcctcctcccgcgcgtcgcgggtgcgcgcggcaagctcgtccttcgcctcgtcaagcctctgctcgatgtcctcgcgcagatcggctgcacgcatggctgcggcggcggtgcgcgcctgcgcctcctcccgcgcgtcgcgggtgcgctcggcaagctcgccggcggcctcctccacgcggtacgagagattggtcaggcgcgtcagcgcggtctcgctcagctcctgacgaagctcagcgccctgctcgcgcagacggtcgagctcctcgagcactctggcaagatcgagagccgcacggacggaaacgatcacatcggcaaggaatgcggccgaccagagcacatccaccgcgagcagcgcccggaacggcagcgccgcgatcacccattcgaccggccggtgaataaagcgcgccagaatgaggccgagaaaaccccagcacagcgaggattgcaggcagatatagcctcggaactgaaaccggtgctcggaatagtcccagtatttcaccttgaacagtttttccatcacgacgccgacaatatactcgaatatcgtcgcggcgaccatgctcgcgaaaaaaagcgcggctggcctgtcgtacagcggcagcgaaacgtgcagcaggagcaccgcgccgaagccgtagatcggcagcattggtccgcgcagaaagccgcggttgacaaaatggcgctgtttgaccgacacgaccgtcgtttcgaagcaccatcccagtacacagtacaggaagaataccaacagccactgcggagcggaatagctgtaacccattgcttttcatcctttcagcgccgcgtttcctcctgcggcggcattactatattttatctaatcttttgactttttgcaagtagactactataatataagtatcattttgtataacgaagggcaggtaacgctatatgttgaattttactattaaaacgccgaccgaggttgtcttcggccgaggaatcgaggaaaagatcggcgagcgcatcaaggaatacggcgcacaccgtgttctcgtccatttcggcggcgcgagcgcacgttcctccggtctgctcgaccgcgtggagcacagcctgtttgacgctggcctgtccttcgtcgagctcggcggcgtatcccccaaccccaagatctccctcgtccgcaagggcgtcgcgctctgccgacgcgagggtctggatttcgtgctcgccgtcggcggcggctcggtcatcgactcagccaaggccatcgccatgggcgcggcgaccggccgcgacccgtgggagttcgcctccaccggcaccagaccggacaaaacgctccccgtcgcgaccgtgctcacgctcgcggcctccggctcggagaccagcaactcctgcgtgctgaccaacgaggagactaaagagaagcgcggcatcacgagcgagaccaaccgtccggtcatctccttcctcaacccggaaaacacgttcaccgtttccaaattccagaccggctgcggcatcgtggacatcatgatgcacacgctcgagcgctatctgacgcccgagggcggcgaaagcgacctcaccgaccgcatcgcggagggtctgctcatcgcgacccgcgacgcaggccgccgcgccatcgcagacccgcgcgattatgaggcgcgcgcgaccctcatgtgggccggcagcgtttcgcacaacgactacaccggctgcggcagaaagcgcctgttcccggtacacaagctcgagcatgagctttccgcgttccgcgacgagatcgctcacggcgccggtctttccgtgctgttcccggcgtgggcggagcacgaaatgcagtatgattatccccgtttcgcgcagtttgcaaaccgcgtgctcggcgtcgagatggatttcgaacaccccgaacgcaccgcgcgcgagggcatccgcacgctgcgccgcttctttgaggagatcggcatgccgacccatctttctcagctcagcatcaagccggaaaactatgaaaagctcgccgcgaacacggtccgcaccgtgaacggcccggtcaagagctactcgccgctcgacgaaaaggcgatcatcgaaatctaccgtctcgcggagtaaacggaaaggagcgctaccttggacaagcagcaattcttcaacggcgcggtcttcgatgcgtggcgctggttcggcgcgcatctcggcggcggcggcgcggttttccgcacgttcgcacccaatgcctcgcgcatcacgctgaccggcgcgatgaacggctggaccgagaccgatctgcatcaggacggccgcagcggcttctgggaggtctccgtgcccggcacgcaggcagggcagctctacaagtaccgcatctacgccgccgacggctccgtgaccgagcactgcgacccctacggcttcgccatggagatgcgcccggcgtgctgctcgatcgtgaccgacctcgaggaataccggttcacggatgacgcatggatgcaggcgcgttccgccgacccggacgctccgctgaatatctacgaaatgcacctcggctcatggcagcgcaatccggaggacgcaaacggctggtttacctatgagcagctcgccgaccggctcatcccctatctgctggacggcggctacacgcacgtcgagttcctgccgctctccgagcacccgtttgacggctcgtggggctatcagaacaccggctttttcgcccccacctcgcgctacggcacaccggcgcagctcaggctgctgatcgaccggctgcatcacgccggaatcggcgcgatcatggatttcgtccccgttcacttcgcggtggactcctacggcctcgcgaagtatgacggcacgccgctttatgagtatcctcacagcgcggtcggagaaagcgagtggggcagctataatttcatccattcccgtcgcgaggtgcggtgttttctgcaatccgccgcgaattactggctcgaggagttccatttcgacggtctgcgcatggatgcggtctcgcgcctcatctactggcagggagacgagaagcgcggcataaacggcgatacgctcgacttcctcaaaggcatgaactgcggcctcaaggcgcgccacccctccgctctgctcatcgcggaggactcgaccgcctaccccggcgtcacccgtccggtggacgagggcggcctcggcttcgactacaaatgggatctcggctggatgcacgacacgctcgaattctgccagacgcagcccgacctgcggccgcgcgaccgcggcaagctgctgtggtcgatgcactatttcgcgaacgagcgctacctgctccccctctcgcacgacgaagtcgtacacggcaaggcctccatcgtgcagaaaatgtggggcgcggacgaaaaggacaagtatgcgcaggcgcgcacgatgtacctttatatgttcgcgcatcccggcaaaaagctcaatttcatgggcaatgagctgggacagctttatgaatggaacgaggccggcacgctcgacggcgcactcgcggagcgcccgttccatctgtttttccacagcctgtgcaaaacttatcgggataacccggcgctgcactgcgactacgcgccggacagcttttcctgggcggacagctgcgccgacgcaccctcgctcatcggcatggtgcgccgggggcacggcgagacactgctcgcgctgtgcaatttcggcagcgacccggcggtctatgacggcccgctcggcgatacgccctccctgctgctgcacaccgatctcatcgagttcggcggcgacaccgaggaaggcgagctgaataccgagcttccgctcatcctgccgccgtacagcggcatgctgctgcgcatcgaataaaggcagcaccgcacaatgaaagcgaaaaccaccgcagaacgcatttttaacgttctgcggtggttttcctttgcacgggttgaaagaaatatgaaaaggggtaatggttcgatagaaatcagccgttcttcgcggtgacgatgcccttgtgcaggctcagcaccggaagcaggaccgcgcagacgataacgcccgcaacgccctgtacgatgttcatcgggatgccgacggcgacagcggtcgcggctgcggctgcattgctgcccattgcgacctccatgcccatctcatacaggaaatagccgatgaccatgacggcctctgccgggatgccgctcaggacaacgcggaccggaacggcgcgcctgtctgcgcctgcgctcagacggagatacagccagccgccgaccatcgcggtcagcgccttgatgacgaacgtacccggaacatagctcatgtagcctgcgaacaggtcgctcagcatcgagccgatgcctgccgcgagcgcgcccagacccggaccgagcagcgcgccgcacagcagcaccatgccgtcgccgaggtggatatagccctgcgtcggggtcggaatgcggatgatcatggtcgcgaccgtagtcaacgccgccatgagcgccgcaaagataatcttgcgaaggcttgcgtttttcatgtcatacacctgcttttcttttgtcagacccgtggaaatttctttatttccaacgggtttgttctctttatatagatgatactctttctctggcttgtatgaaagggtcagtctgctttattttttcagggtcagtctgtccgcagcattcgcgcggctgatcttgagcggcggcaccgcggtgtttctctcttatctccaaaaaaacgcggctgatttttatatttttgtctcgtccgcgtgctcggcccgatcccctcgaccgcatggattccgatcgtactcatcgccttcccctcggcggtttccgcaagcgcattcctgatcgcgctcgccgtatggttcccaaccaccgttctcacgagcagcggcatcgcctccatccccaactcgtactttgaagtctcctcgacgctcggcgccggcagcctttaccgcatcgtgatggtaggaagcatctccatttcgggcgtctccaagcacttcatcaacccaaccggagaacgcatcaccgcgctcgacaatgtgtcgctcgaaatcccctccggctcgttcgtgtcgctcatcggcccgtccggctgcggcaaatctacgctcctgcgtctgatctccggcctcatcccaatggacgagggcgagctgacgctcgacggcgtgcccgtcaccgctcccggcgccgaccgcggcttcatgttccaggagcacacgctgttcccgtggctgtcgatctacgacaatatcgccttcggcctgcgcgcccgcggcatctacaagcaggaaaaggaccgcgtcgatgagttcatcgaaatggtcggcctcaagggctttgagcactcctatccgcatcagctttcgggcggcatgtgccagcgcgcctctctcgcacgcgcccttgtcggcaggcccaaggtgctgctgctcgacgagccgcttggcgcactcgacgccttcacccgaatgaacatgcaggatgagatcctgcgcatctggaaagagaccggcatgaccgccctcatgataacgcacgacgtggatgaggccgtttatctctcggacaaggtcgtcgtcatgaccccgcgccccggccgcatcaccggcacgctcgacatccggctctcccgcccgcgtgctccagcacaatccggccgccgctctgtacggcgcacagtccatgtattcccgcttcaaaaatctgaatctgtaaaaaaagctctccgcatcgacctgaactgcggagagctttctttttatgcgtttggaataagcggctgcaccatgcagctgttttcgtaattcgcctgcggcgcttcgcggcaatattctcaatccgccgccgtcggaacggtacggtatccctccatgaggctgtcgttttccatgataaacgggcgcgccgtgtcctgatcccaggaggtatcgtatttttccatcagataatcgttcagctcgatccggtttcggagcttgaccagccggtacggctcctgaaacgccaccttttcaacaaaatagagactgccgtccccggccggcagcaggacgcccacgtgtccgatgaacagggtattgtccgtatccgagaaccggtcatggagcaccacggagatcagccgggcagtcccttcctcaaaggcaacgccgcgctccgcccagcctgcccgaagggccttgacctgttccgccgtctccgtgctgtccgcagcagccaccggcgcaaacaacgcacagaattttgatgtgctgtttccgcagagaacggcaggatctgcggccagcgtttcgagatccaaaaagagggcgtcctcgccctgcgtttccggctggtctgccccggcagtgacgaacgcaccgaacaggctgaaggccgtgatgcggcagttgtagccgggaaagctcccgttcttctccgtccatagctcctgcatctcataagggtcatatttggtatcggtcagcgcgccgctctcaaagccctccgtcagccattcgttcttgacgctggcgttgaactgatcgacgcggtcaagaagaatgctgaccctgttttcgctaatgccggagtctgcgagcgactcggagagcagccctctggagactgcatctgtcagattggagtacgccgcggcttcgagcggcggctctgcgtgtccgccgcagcccgagaggcctgcgagcatgaggctgaccgccgcaaggacgggcagcagctttcttttccggtttatcattgatcttcgcctttcctgtgaccgctcctgcgggaacggattcgtgatctgtctgtatccttatactgtacacgcatcggcgaaaaaagtaaagaaaaaccgcccattccaacggaacagacggttatcagtggtacgcccggtgcgattcgaacgcatggcctttggagtcggagtccaacgctctatccagctgagctacgggcgcgagtacattttatagtatatcagcctttccccgatttgtaaagcgattattccggggtatttcggtcgaccggacaggaaacaccccgttttcgtcttacgcctgcgcgtcggccggctgttttttctttttgcgcttgcgatagcggtcctcctcggagaaaacgcaaccgcagtagttctgcatatacagtcccagctcgcgcgccttgtcctgtccctcgcggaaacggggcgaaaaatcgcggtgcagatacttgacgccgtacttttcggccatctgctcgcagatctgacgcatcagctcatgattctgatacggactgacgaacagcgtcgaggtgaactggtcatagccatgctcggcggcatagcgagccgtctcctcgaagcgaagcgcgtagcaggtcgcacagcggttgtcccagttcgggtagaccgcttcaataaacctgcgcaggccgtactcgttttcgatctccagcttgagatcaatgcttttcgcgtactcaacaagcgtattcttgcgcattttgtactctttcatcggatggatgttcggattataccagaaacccaccggctcgatgccctcctgcctcagcgtgtcgatgcacgcgatcgagcagggcgcacagcagatatgaagaagtgttccggacaaatgatcagacctttctgaaatgatagtgattttaacggttatacaaactgaaattttcaaattagtctttgcaaataacctttgaaccttcaccatcaattacaattccctgacggttgttaattggggatagattcaaatccgaaaattcagtcattattttctcggtaactttcttaaatggtgctgtaagataatgcggaagaacatagaaatcaatcaaatcaagccctgcatcatcttcttgtgagtagtcctccggcttttcatccatttgttcaatatattggatagttggagcgcatataatcgcacctgccgattcaccgatcatcagttttcccttttccaattccttcttcaatagctcatccgttcccgttttacggagctggtccataaggaagaaagaatttccaccagtaaaatatatcacatccgcatcttcaaaaacagactgtatcgttaaataagcctccgttgaaatatcaatttcagttacagctgctcccagtttattgaatagctttcgagccgagccgacataaccggtatagccttcacgcagcgaagctgtgggaataaatgcgactttcttgttatcaatttcttcttttatcaaacttcctacacttgaaaagtgcgaacataaaaacagtttcatccatatcctccttaataaattccgatttgtaaactgcttattattatacttcattctcgcctcacttgcaaatcccgtcgaaaaacgctatactggaactgaataaaaatcggaatttttattaaaggaggcatattccaatgaaggatattgcatactataacggaaaaatcggccgcatcgacgaggttcaggcgccgatcaccgaccgcggtttttacttcggcgacggcgtttacgacgccgccatggtccgcaacaagaagatctttgcgctcgacgatcatctcgaccgcttctacaacagcctcagtctgctgcgcatcgagccgccgatggagcgcagcgagctcgccgcaacgctgaacgatctggtcagccgtctggacagcgacgcgccgcacatgctgtactggcagtccacgcgcgccgcagcgcaccgcaagcacgccttcccggccggcgcaaaggcgacgctgatggcgttcgcggaggcctgccctctcgaccgccacgaccatccctacaaactcatcacggtcgaggacacccgtttcctgcactgcaacatcaagaccctcaacctcatccccaactgcatggcaatgcagcgcgcagtcgaagccgactgcgacgaggtcgtattccatcgcggcgaccgcgtcaccgagggcgcgcattccagcctcgccatcatccgcgacggcgtgttctgcacgcccccggcggacgagctcatcctcccgagcatcacgcgcaagcatttcctcgagctgtgcagcaggctgggcatcccgtcccgcgttgcgccgttcacggtcgacgagctgctgaccgcagatgaggtcatgatcctgtccaccggctcgcactgcatcgctgtctgcgaggtagacggcaagccggtcggcggcaaggctcccgcgctgctcagccgtatgcagcaggcctaccagcaggaattcctcgagggtaccgaaaagtaaaggaggcaccatgcccacactggttatcatcggcggcggtcccgccggactcagcgccgcgatctatgcggtgcgcgcaggtcttgacgttcaggtgctgtacaaggacgacggcgcgctcggaaagaccgacaaaatcgaaaactatttcggcttccccgatgtgctttcgggcgcggagctactgtcacgcgggcgggcgcaggcggagcgcctcggcgcacagcttcaccgcaccgaggtcacgggcatcgagtacgccgacaccggctttaccgtcaagacgaccggcggcgagcgccacgcggatgcggtgctgctcgcgaccggctcgccgcgtgccgtgcccgatattacaggcatccgcgaattcgagggacgcggcgtaagctactgcgcggtctgcgatgcgtttttctatcgcggcagagcggccgccgtactcgggcagggcgaatacgcccttgaagaggcgcgtgtgctgcttccggtcgcaggctcggtcacactcctgacgaacggccagagcgcgcctgagaaccttccggacggccttgcggtcgatacccggccggtctccgccgtcgagggcggcgagacggtcgagcgcgtggttttcgcggacggcgagacgctgccgctcgacggtgtgttcgtcgcgctcggcaccgcaggcagcacggatttcgcgcgaaagctcggcgcgccgctcgacggcacgcatatcagggcgaacgctgacggctcgaccgccgtgcccgggctgttcgccgcaggagactgcaccggcggcctgctccagatcgcaaaagcggtctcggacggcgcacaggccgctatgagcgcggtgaaattcctccggaaataacagaacaacaaacgagagtacagatgctgtgtactctcgttttattctgtcgataaagtccatttcccacgcagaaacagcagccgcgcggcaacgcgcatgaaaaagcgtttgccacgcaaacgcagcccgtaggcctctatccttaaaatatttaatgagagcaaaaaccggggacatgcgcctcggtttttttactcctagaggtagaaagtttccgtatgggaactttcggacgactcgtgttctgcgtagtcagaacacagattgtcggcgaaacgtcagtttcgcgacagtctaaaaaaataaatcgccgctgagcggcgatttcaaggggccgatgcagcgcaccggcatctcatttcaggttgaagtgtcgcagaggacgcttcggcgcgaggagcgcaggctcagtcgagaatatcgactgtcacgcgcttgttttcgcgattgcctgccgctttcatgagtgtgcggatttccttggcgatgcggccgtgacgaccgatcactcggcccatgtcaccgggcgctacgcgcagggaaaacgtgacgttgtcgccgtcgatctcctcagtgatggcaatcgcatccggctcggaaaccagatttttgacgatataagtcaataactctttcatttcgacaacctcactcaattcagcacgccagccttcttcagaatgccgcgaacagtatcggtcggctgtgcacccttcttgatccactcctgagcgcggtcagcgtcaacgttaacggtggacgggttggtcagcgggttgtaagtgccgatctcctcgatgaaacggccgtcacgcgggtaacgagagtcagcgacaacgatgcggtagaacggagccttcttagcgcccatgcggcgcagtctgatctttaccatgaaattttcacctcctgtattaaaacttatctattgtaaattgaaatttacaaacaatagcaaatcagaacggcagcttgaggttgccgagtcccgggaagccgcggcgctttttgcccttgctcttggccaggctcgtcagctgcttggtcatcttctgcatagcctcgaactgcttgagcagcttgttgacctgctcgaccgaaaggccgcagccggctgcgatgcgcttcttgcgggaaaagttgatgatggaggggttgtccctctccttcggggtcatagactggatgatggcttcggtgtgcgccatctgcttttcgtcgatcttcgcaccggcgagggcttttgcatccacgcccggcagcatgccgagcatctcttccatcgagcccatgttcttcattttctgaagctggtcgtaaaaatcggtcagcgtcagcttgccggccatcatctttttggcggtctcggcggcctgcttctggtcgaaggactcctgtgccttttcgatcagcgtcagtacgtcgcccatgccgaggatgcggcttgccatgcggtcggggtggaacggctcgatgtcgccgagcttctcgcccgtaccgatgaacttgatcggcttgccggtaacggccttgaccgaaagcgccgcgccgccgcgtgcgtcgccgtccatcttgctcatgagcacgccgtcgatgccgagggcttcgtcaaaggtctgtgcgaccgttacggcgtcctgaccggtcatcgcgtcaacgacgaggatgatctcggtcggcttgaccgtggccttgatgtttttcagctcgtccatcagcttttcgtcgatatgcaggcggcctgcggtatcgagaaagacaaggtcgtagccgtttcggcgggcgtagtcgatgccgtgcttcgcgatctcgaccgggtcgccctgtccctcgtcaaaaacggggatattcagctgcctgccgactaccttcagctgttcgatcgcggccggacggtaaacgtcgcaggcgacgagcagcggacgtctctgctgctgtttccggagcagagcggcaagctttgcgcagtttgtcgttttgcccgcaccctgcagacctgccatcatgacaatggtcggcgggttcggggatatggtaagacgggtggtctggccgccgagcagggcaaccagttcctcgtttacgattttaatgacctgctgagagggcgaaaggctttccagaatctcggcatcggtcgccttttcggtgacggccttgatgaaatccttcgcgaccttgaagttgacgtccgcctcgagcagcgccatgcggatctcacgcatagcctccttgatgtcggactcggtcagacggcccttgcttcgcagatgcttaaacgcagatgaaattttttcggtaagaccttcaaatgccatattaagcctcctgcctgagctggtcgagcagcgcggtcatgcggtcggcgatggcctccgcctccgggctgtgcagtgtgtcggtgttaagggctcgcaggcggctgacctcttcccgaagctctccggcgcagcgttcggtgtcgccgtaacgggcgaccagtccgagcttgctctccatctcgccgagcgcgtgttccgcgcgcttgatgctgtcgcgcacaccctgacgggtgatgcccgcgtgctccgcgatctccgcgagagacagatcttcgttatagtacaggtcgaacagctcgcgctgcttttctgtgagcgtctcgccgtaaaagtcgaacagcaggctcatttcgagcggtttgcctttcatcggcgggcctccttgagagtgtaaagttcttcacctttacatcgaacatatttattctacatgatgaggccgcgaaagtcaagaagaatttgcagaaatttttcgaattgtacgcaatgcaaaaaggatgcccgaaggcatcctttgcactatatatattataccatcacgcctgcgccctgcgcttttccggcagctgcgcgagcacgatcgcgccgaacatcagcacgcagccgaagatctcgcgcgccgacagcgcctgatcgagcagcagccagccggagatagccgagataaccgattccaggctcatgataaggcttgcgactgtcgggcgcagccccttctggccgatgatctggagcgtgtacgccacgcccgaggacatcgcgcccgcatacaggatcggcttccacgcggcgaaaatattcgcccaggtcggctgttcaaagagcagcatgccgatgcccgcgaggaccgcgcaggtgaaaaactggatgcaggacattcttacgccgtccactctggtcgaaaaatggtcgatgacgagaatgtggcaggagaacaggaacgcgcagcagagaccgagtagcgtgcccagatcgaggctgaagccgccgcccgtcatgcacaggaagtacagaccggccagtgcgatcgcgacgctgcaccagtgcttgaggccgcagcggcggccgaacagcaggccgatcagcggcacgaccagaatatagcacgcggtcataaaacctgccttgccgaccgtggtgtgcagcagcgtgagctgctgtgtacagcttgcgatacacaggacggcgccgcagcagacaccgccgatgacaagcgttttccgtcccttccggcgttcctccggcgtttcagccgcgcgcggcggcccgacccggttcagcaccgcgatcacaggcagcagcacgatcattccgatgacgcttcgcgcgcagacgtaggtcatcgggccgacataatccatgccgacgctctgcgccacgaatgccgtgccccagatggtcgctgtgatcagcagaagcagggaatttcgcagtttcattcgtatctctcccccgagacaggattttttacaaaaaaagaaccgctcttttcaaagcggttctctttggagctgataaccagattcgaactggtgacctcatccttaccaaggatgcactctacctactgagctatatcagcattggcaggggcagtagggatcgaacccacggcactcggttttggagaccgatgctctaccagctgagctatacccctgtgtggctcctcaagttggactcgaaccaacgaccctgcggttaacagccgcatgctctaccaactgagctattgaggaatgttaaaaatgctggtacattgccgacatgaattttatcacaatcagcttacatattatatcgcgaaagcgcaggacttgtcaatagatttacagcaaaaaaatctttccatatttttttgcatttttcgcttgacaattctctctgaatattatatactgttaaagtcgcacaggacaaagccgaattgtgtaaaggtagcacgacagactctgactctgtttgtgagggttcgaatccttcttcggctgccacattgccccgaaaccgtgaggtttcggggttttttctttttcatcatcgaccccaaaaagcgcccgctcgttccgtaaaccggatagagcgggcgcttctgcttcacttattagcggatcggcagcatcttgccggtctcaaaggactccttgcagcggtaagcagcctcggagactgcggtgccgtcataaacggtgaggtcagccggcttggtgttgtcgcggacatggccggtgaaggcaaccatctcagccacgaaggcctcgtgccagcggctcatgaagtccggatagtattcctcgcgggagccgtgctcgtcgacgatgttcagcaggttctttgcgccgacgttcgcgatgcgcagcgtgccatgcgtgccgatgatctcggtctcgacgttcgagcctgccgcatgggtgcggttggtgaacatgaagcccatagcgccgttctccatctggatagtagcggctgcgttgtcggcatcgttcagctccttatacaggtcgaactcgaatacgccgccaatcgcccagacgttcttgacgttggagccggtgaaccagcggatgaggtcgatgtcatgtacgcacatatcgaggtactgaccaccggagtgcggtgcgaacttcagagtggactcgatggtggaacgcgggtcctgcgtgtaggaacgaaccagaacgaccttgccgatgtcgccgttgtcgatcttgcgctttgcctcagcataggacttgtcgaagcggcgcataaagcccagctggaagatcagatcggggtgtgcctcgatgaccttttccgcggccttgcactgctctacgtcggtgccgagcggcttctcgcagaaaacgtgcttgccgttgttcatggcgatctcgatctgctggcagtgcaggaaggacggagaaacgatgacgatcgcgtcgagctccgggttcttgcacatctcctcgaagtcagtgtaggtgtactgaacgccgagctcttcggcgacctccttgacacggcctgcgtctacgtcgcagatcgctgccagctcgcagcccggaacctgcgttgcgaggttttttgcgtgctcgtagcccagacggcccaggccaaccgaaccaatctttacagttttcatagcagaaactctccttttcaatcaaaaaactctcttcgcgcggctgtttgagccgcctgttctctctgttgactatggctctattttagcgcttccggcggggaaaaaccagagcaatcttgcgaaaagagcgagggattttccgcagaaaaaccgagagcagacggagaaactttcaaattcttgctatagcggcaagcgcggcctctttctttcccgtcagcgacgggaaacggttccgccgttccggcggcttgccgccgcaggcgaaattggctgccgatgggcaggccgggcattgccgccgcccggcggcgggggcaagagggacagggacaccaaggtttccctgcccctcttgactccccagcctttccttaggacgcggctcccttcggtcgcgcgtctaaatgcgaggggcccacagatgcgtttggtgctccaagagtacaccattgatcgaagcggagcttttcgcagcagaaagcaaacgccctgcaccggatggccgcgcactgtcatgcgcggcgccttacgcaaggaaaattcagggcctaacagcgtcccaaaacctgcccgacgcacggaaccgagcccccgtttctctcgtttcgccgcgcgaccgaagggagtcgcggcgcaaaggaaggtttgggggagtcaagagggggcaagggaaccatacggtgcccttgcccccttttgcccccgccgtgggcacggc

SEQ ID NO: 12845 - DNA, 45549 bp, Unknown
  gut microbiota DNA sequence
ctgccgttcctgcatgaaaataaactttatcgacagtctctaaggcacgcccacggcgtgcctttgttgttctctgctgtaaccggtgatcatgctttcgcataggctgaaatgaccgcccagacggtcaaatctacaatactggactgattctatggaacaaaatactgttctcacgctggcgcagctccccgaaaaccgctcggcacgcatctccgcgctccgcctctcaggcggcatgcggcgaaggctgcgtgagctgggttttattgccgggacgcgcattatctgcctgcaccgcgtgtcgggcggtgcggctgccgcataccttgtccgcggcacggtcattgccctgcggcggaacgatgcagagcgcatcgaggtgttgccatgaagaatgcaggctctgcggtcgcgctgatgggcaatccaaacgtcggaaagtccacggtcttcaacgcgctgaccggcggacgacagcacacgggcaactggagcggaaagacggtctcgctcgcggagggacgcatcacaggcgaaaatatcacgctcatcgaccttccgggtacttattcgctgcacgcgcgttcgcaggaggaagcgctcgcacgcgaattcctgacctgcggcggtgcacaggccgtcattcttgtcgcagacgccgcctgcctccagcgcagtcttgttctggtcctacaggtgctcgaggtgcagccgcacgccgttctttgcctgaatctgatggatgaggcacggaagaagcatatccgcatcgacaccgcggcgctttcgcgtgagctcggcattccggtcgtaccctgtgctgcacggtcaaaaaaggggctgaacgagctgaaaaacacgcttcgtgccgtgctgagcggaacacttcctccctgctccgagccgcccatccgatatcccgcggacatccggtgcggtctgtatgccgagccgcacaagggacagacgcgcgacgagcttgacgatattctgaccgccgccgcggtgctgcgcgccgaggaaatcgctatgacctgcgtcaccgcgccggacgatccgcacgcccgcgaccgtgccatcgaccgtattgtgctcagccgccgcttcggcattcccctcatgctcctgctgctcgcgctcgttttttggctgacgctctccggcgcgaacaccgtcagtgctatgctttccggatttctgctcgggctcgaagcgccgctcaggcgtgcgcttgtcttgctcagtctgccgcccagcgctgtctcgctgctcaccgacggcgtatggcgcgtgctcgcgaccgtcgtttcggtcatgctgccgcctatggcgatcttttttccgctcttcaccctgctcgaggacgcaggttatctgccgcgcatcgcgcttcagctggatcatgcgttctgccgcgccggcgcctgcggcaagcagagcctaagcatgtgcttgcgcgcgctgcgtgcgcaaaaaaacagaaccggatgaggtttccgatcctattgaaggcgatattcagatttctctgccccgcgtgatgagcgcgtgcagtacgaacgggataaacagcgtgatgagcgccgcatagccgagatatgcatagcccggcttgaccacggccatcagaccgaactgcgtgatggcgaacgcgataaaggtgaagataagaagtgaacacggcgttgcgcgccagatgtcccttcatgcgctctgcatcgcttttgcggccgcgctcaacagcgttgacgcagcgtgtgacgatgccggagatcatattgaccgcagtcgaaatcgaacctaggatgatcaaaatggagatgatcggggtgagcacgcctgcgcccacgccgttctggatcagaacgagcatcggaacggaagcgttgcaagatctgccgcataggcaatcgccagcaggccgatgatggaaagctccatcgctgcgaagttgcagacaaacatgccgatggctgcgcggttgatctgcttgacgtccgtgaccggctccatgtgctgatacatgaccgagaccgacgcgagctggaagaagaaatacagcacctccatccagagcgccgaaccgaacgtgccgttcgccttggagatggtcggcatctcgccgccggccagacggccgatcgcatccgcaatccgtaattgataaaatactggtagatttgcgcgctggaggcaaagccgccgccgaactgcgtggtgaatgcgacaaacgcgatgcccatggcaagcggcatcctgcttttatcaacgagcagtgttttttctcgttcatgtttctttttccccttttagcccttatttattgaattcaatgaccttgcccgggttgaggatgagcctgtcatcaaacgccagcttgatggacctgtagagctctatcatgcgctcgccgacgaactactcgagaaattccaaacgtccgttgccgatgccgtgctcgccggaaagctggccgcccagctttttcgacagcgcatacagctcggtcaggctcgcgtgggtggcgcgcttccactcctcgtcgctcatattggctccgcgcagcatctcggtatggatgttgccgtcaccgcagccgcctgcacatcgagcagcagcgcgcccggctcgcaggtgatggtctggtttttgtgatcgaccggaaaaatacggttcatgcgcatgatggacagcataattccgccgtatttgcaggtcgcgccgcccgcaaggccggtgcccgcgccgcggcacaccacagggatattgttctcataggcgtatttcatgatggcggaaacctcgtcgcggttcaccacctcaacgtaaagctcaggcggaaaaacgccgtattccggcatttcgtcgcggtaaaactcgcaggcgatctcatcgccgacccacacgcggtcctccgaggtgacagagcagatgtacgcaaaatcctcctcagtcattttcttatagggatacggcacggctcagtcctcctttctgttctgcacgagcgcggtcagacgcggtacgacctgatacagatcgtccacgatacagtaatgcgcagtcttgaatatcagcgcgtccgggtcgctgttgatggcgacgatgcattctgcgtctttcatgcaggaggtgaactgaatggcgcccgaaacgccgcaggtgatgataagccgtggacgcaccgtgcggccggacaggccgatctggtgcatctggcccatagtcagcacagtgaccgtgccgcccagtttttcgcgaagctgaagcgccgtctccagcgcaaacagatcatacggattggtacgggtatcgcccgaaaggcgcttcatcgcgccggtttccggatcaatatcgacctttgtgcccgcagggacctgtttcatgcaaacaataatttttaaagcagtttcccttcttcccctgtggtgccggccgcgccggcatgcgcgctgccgcgcgacagcggccatatgatctgttgcgcgaaatcggttttatgagcagcggcccatgggcggctgcttttctcgcaggataattttcaatcctcgtcccagccgaacagggattttccatcggcaagcgtgccgatacgctccatctcctcatctgacagctcaaaatcaaacacgctgagattttcctgcatacgctcgcgatgcatggttttaggaataacgccgatgccgcgctgcacgagaaaccgcagtgcgatctgcgcggctgttttaccgtgctgcgccccgatttccctcagcaccggctcctcaaaaatacggcgtttcccttctgtgaacggcgaccatgcctgcatgacggtgctgttctcgacgagcgcgcgccgcagcggttcgcgcggatagtaaacgtgcgcttcgacctgattgaccgccggaatgataccgcacgagcggcagaatgcgcggtactcccgctcgttgaagttggaaatgccgactgcgcgcaccgttcctgcgcgatacgcctcacagagcgcacggtacatttcaagcgacgcatcatacggctcgtgaataagcagcaggtcgatataatcggtcccaagtgctgacagcgacttttcgatatcgcgcttcgcattttcgtagctcgccgaaggctcgaacagcttggtcgtcagaaagatctcatgccgtgccaagccgctttcgcgcaccgctgcgccgacaataccctcattttcatacatctgcgcggtatcgagcagacgataccccgtttcaagtgcgtccagaatgcagcgctttcccgtttcaccgcgcagcgtccatgtgccgaagccgacaagcggcatgcgcaccccgttatttaaagcaagatattccatgcttgtctccttttaccgttttcccttatcatatcatgttttccgcgtgtttgtaaggtgtgtcatccgcgttttcacagtctgtatacgaaggctccgaacttttttcgcgtcctgcgcattttttcattgcaatttgccgtcattcgtcgtatactgtttattacagcttttttagaaaggacttcgtttcatgacgttttatcaggaattacagcttggtcaggcgggttcaaaaaaccttatccgtgcctgcgaaacgccgcgcgaccggcttctgcacacgctcatctatcttttcaagatcgcgcttaccgtcggcttctgcttctgctttgtcacgctttacagcatggccttcggcagtgcgaacagcatcgtgggcgttgtcgtgcttctgtatctgctcgtgttccgcgcggccgatctctgccttcatatcggccagtccaccgccctgcttgcatcattcctcgtgctctccgcggcagcacctcatctcgcacatctcgcaggtccgcttcccggctttttcatcaatctcgcgtctatcgccttcctgatcctgttcggctgccatgagccgcgcatgttcaaccagtccacgctcgtactcggctatctgctgctctatggctacgatgtgagcggccgcgatttcacgctccgtctggcgggcatcgccttcggtgcgctgctcgtctgcaccgtattcctcctcagacaccgcagccgcagcattccgcttcgcatccgcgatattcccgtcgcgttctccctgcatcatccgcgctcgcgctggcagctctgccagattttctgcgtgccgctcgtcgtgctgctcgccgagctggccggtctgccccgcgccatgtgggcaggcatcgccgccatgtcggtcatccttccggttgccgaggatatgcactaccgggtgcgccgccgcgtgctcggcaatattgccggcgtgctgtgcttcgtcattctgtattttcttttaccgtcctccatttacgcctttatcggcgtgatcggcggcatcggtgtcggcctgtctgcaaaatacggctggcaggctgtgttcaacacctttggtgcgctcgccatcgcagcagaagcctacggtctcaaggccgcgcttggtctgcgtctgcttcagaacgtattcggcgtgctgttcgcactcgttttctgtctgctgttcagccgtatgctcgcgcgtttctctgctcctgcggaaaacagctgagccttaccgctcctccctgcatcgggatggagcggtttttttgcgtccttttacatttttcctgtctttttccgttttgttccttgctgtccgtttgggataatgctatactgtttttgacagcggtgcatgcgcgccgctgcattcccggatataacaaaaagaggtaacctgtatgacactcaaagatctgcccatcggcaagactgcaaccatccgttcggttggcggcgaaggcgcactgcggcagcattttcttgatatgggtcttattccccacggcgatgtgacgatggtcaagtttgctccgatgggcgacccgatggaactgcgcatccacagctacgagctcacgctgcgcctggcggacgcagaaaagatcgagatcgaaaacgtccgcgatgcggttccgctgacgccgcctgaacggcgcgcgcccgtgccgcatcccggtctgggcgagggcggccgcttccacgaaaagcagaccgaaaatcccctgcccgaaggcaccgcgctgacctttgccctcgccggcaatcagaactgcggcaagactacgctgttcaatcagctgaccggctccaaccagcacgtcggcaatttccccggcgtcaccgtcgaccgcaaagacggcggcatccgcggcaaatccggtacgctcgtcaccgacctgcccggcatctattccatgtcgccgtattccagcgaagagcttgtaacgcgcagctttctgctcgatgagcacccgcgcggcatcatcaacattgttgacgcgaccaatatcgagcgcaacctgtaccttaccatgcagctgatggagcttgacattccgatggtgctcgcgctcaacatgatggatgaggtacgcgaaaacggcggctccattatggtcaaccgcatggaagaaatgctcggcattccggtcatcccgatctcagcggcaaagaatgagggcatcgacgagctgatcgagcacgcgcttcatgtcgcgaaatatcaggaaaagccggtcgaaatggactactgcgatgcaaacgacgacggcggcgcagtacaccgctgtctgcacgccatcatgcatctgatcgaggatcacgctgtgcgcgcaagcctccctgtccgttttgcggcggcaaagctcgctgagggtgatccgctgattctgaaaaagctcgaccttgacgagaacgagaaggaaacgctcgagcatatcgttaggcagatggagaccgagcgcggcctcgaccgtgccgctgctatcgcgcatatgcgcttcgacttcatcgataagatatgcgatgagaccgttgttcgcccgcacgagagccgcgaacacctgcgcagcgtccgtattgacaagatactcaccggcaggcacaccgccatcccctgcttcgttggcatcatgggtctggtgttcttcctcaccttcggtgtgatcggcaagctgctgtccgcgctgctcagcatgggcatcaatgccctcggcggcgttgtggacagcgcgctcaccgcgtggaacgctccctatgtgctgcgttccctcgtcatggacggtatatggggcggcgtaggcagtgtgctccagttcctgccgatcatcgtgacgctgttcttctttctctcgctgctcgaggacagcggctacatggcgcgcgtagcgttcgtcatggacaagctgctgcgcaagatcggtctttccggacgcagcatcgtgccgatgctcatcggcttcggctgtacggttccgggcgtcatggcgagccgcacgctgacctcggagcgtgaccgcaagatgaccattctgctcacgccgttcatgagctgctcggccaaactgccgatctatgcctttttctccgccgcatttttcccgaaatacagtgcgctcgtcatgaccgcgctctacttcggcggtatcctcatgggactgctgatggcgctgctcctgcgcggcacgatgttccgcggcgaggcggttccgtttgtcatggagctgccgaattaccgtctgccgggcgcgaagaacgtctgccagctgctctgggacaaggcgaaggatttcctgcagcgcgcgtttaccgtcatttttctggcaacgctcatcatctggttccttcagacctttgatctgcgctttgccatcgtatccgattcctcgcagagcattctcgcgatgatcgcaggcgtgatcgcaccggttttccgcccgatgggcttcggagactggcgcatttcgaccgcgctcatctccggctttatggccaaggagagcgtcgtttccacgctgaccgtactgttcggctcgacttctgacattctcgcctgcctcacgccgctcgcagcagccagcctgctggttttctgcctgctgtatacgccgtgcgtcgcggcaatcgcttccatcaaacgcgaactgggcggcaaatgggcgattttcgttgtcattgcacagtgcgtgatcgcatggctcgccgcctttgtcgttcacggcttcggtacgctgttcgtataaaaatacatagcaaaagagcatggaattgtttttccatgctcttttgctatttatatggcatcatgcggattttttccttctgacagctgccgcacgaccggaagcgtgacgcagagcgccagaataaaggcgcacagatcgctcgctgcctgacagcactgcacgccggcaaggccgaacagatgcggcaggataagcgcaaacggcacgaagaacagtccctgccgcgccgccgcaacgatgcttgcccgcagcgtcatggcaatgttctgcagcagcatattgctcataacgacaaagccggtgatcgggaacgagatgcactgcagccgcagcgtcagcgcaccgatgcggataacctcggcatcgtcgccccgaaataccgaaatgatctgcggtgcaaaagcaaagccgagcactgcgagcgccagcaggatcagcgaggaggatctgacgcagaagtgaaagccccgcgtcacacggtcgtacttatgcgcgccgaaattgaacccgcagaccggttgaaagccttgtccgaagccgatcatcgcggagcctgcgaactggctgacgcgcgagacgatgctcatcgccgcgatcgctgcatcgccatagggccgcgccgccgtattgaggcaggtcacggcaaccgatgcaagaccctgccggcacaggctcggaattccgccgcgcgcgaggtcggcgtagcgtgcaggcgagggcgaaaacaggcacagccggatacggatgccgcccgaaacgtatacgccggtcagcagcaggcagaagccgacaagctgactcagaatggtggcgagcgccgcgccccggatgcccatgccaaaggtgaagatgaaaagcgggtcgagcgccatgttcagcacgccgccggagaccagcccgatcatcgcatataccgcattgccctgcaggcgaagctgattgttgagcacgagcgacgcggtcatatacggtgcgccgatcaaaataatgcacatatagtcgagcgcatagggcagaatggtgtccgttgcgccgaggagatgtgcgagcggatgccgcagcagcagccccagaatcatgataacgcagccggcgcagagtgcggagaaaaaaccggtcgccgccatgcgttcagcctccttgcggtgctgcgcgccgagctgacgggaaatgtagttgcccgagccctgtccgaagaaaaagccgaccgcctggataagcgccatgagcggaaacacgacaccgactgcgccggtcgcgctcgtaccgagccgcccgacaaaaaaagtgtcggccatgttgtaaatggatgtgatcagcatgctgatgatggtcggcacggccattttacagatcagcggctcgactggagactcagtcatctgaatatattttcgtctttgtgcatctgtctgcaacagagatacgcctccttctctctttctaaaggcgacctccccagtcgttcttgggagaattctatgtaaataataatccttcgcgttttgatttgtcaagctgtattctcctgaaattattcatatgcaatcgttttcgcaatctcattctgttcgaaatacagggaaatgcgaatgttctgccggcgggcggctccccgccccgttccctcctcaacctctatgcgccgcacaaaagcgcgaacaagctctcgtgtaagccgcttcggacagcagcactcatcgatcacgctctccagacgcgctgtatcgggcaggtccgtttctctcatatccagacgccggcgcagcgcagccgcctgttcttccagacggtgcagcgcggcataaaagctgtctgccgcaactctgcccgatgcacggtccaggtagagcgccgcaatagtatcctccgtgcgtgaaagactgcaccgcagaccgtgcgcgtcctccccttcctgagagcaaaggctgtgcatcagccgctcgcggagctcggctttctcgcattccgtcaacgcaagatgcctgtgcagcacatccagaactgccgcttcgagcgcttcataattcgttccgtgccgagtgcaggcgctgcgtccgtgctgcttgtatccgccgcaggcaagatcggcgcggctccccttccgtctcgtgccgaccgtgctcattgcccgtccgcagtccgcgcagaatgcgatgcctgtaaacacattgacaaagccgccggagcgcgaaatgcgccgcacacggctctgctgctgcacctgctcgaaaaccacctgcgaaacgagtgcctcgtggcaatggggtacgataaactgctcctctggtgctgtccgacggacttttcccgacttgaaggacggttttcgtgtttttccctgaatgagcgtgccgaggtacacctcgttttgcaggatacgccgcaccgttccggctgtccattcgccgcgcggtgcgctgccgcgatagaccgagggcggtgcttctccctgagcattcagccgcgccgcaagcaccgacggagctgcgcccccggccgcccctgcaaacagccggcgcaccactaccgctgctgcttcgtccggcacaagcctgctgcgctcctgcgggtcgcggcggtagccgtaaggtgcataatgaccgatgaagcggccgtccttcattttcgtctgtaaggctgctcggattttcccgctcgtgtcccgggcatacagctcattgatgtagttgcgcatcggaaggaaaatatcctcgtgcgccgtgtcgaccgcgtcccccaccgcaatgacgcgcacgccgtgctccgggaaatagcgttccagatagcgtccggtttccagataatcccgccccagacgggacagatctttgatgagaatgagattgatgccgcgctgcgggatttcgcacagcattttctggaactgcggtctgtcgaaggtcgtcccggaaacaccgtcatctgcatattccgccacgaccggccagccctgcctcagggcgtagtcgtgcagcagcctgcgctgattggcgatgctctcgctctctccggcacggccggtatcatcgcggctgagacgaagatacagcgccgcgcggcagcttgcctccgccgtcatatttcctccctgtaccgctcaaggataatgcactcgagcgcttcaatcagcagttttcgttccttctgcgtcacagtcatccctccctcaccacatcatagcggaaatcccggcagatatgacatggaacacgccgcgagcgtaccccctcagctgttgaaaccccatgttttctgtgaatcggacacagttccagaaaaaaatgacactattctgtcaaaaatatgctatactataaatagagactctctgagccggaaacagcacaagtaaggaagtatgataagtatgaccagtctgcaaattgccctgtgtgatgataacagcctctcccttcaactcgcacagctcgctattcaggaatacgaacggcagcacgccgaccgcctctgccgcctgcattgcttcaacagcggtactgctctgctctcttttctggacaaacacaaggatttttccttcgatctattcatcctggacgtcgtgatgccgaaacccgacggcattcagaccggcctcgagctgcgcgcacgcggcgacaagggacgcatcgtatatctctcggcaagtccggatttcgcgctgtccgcctacgatgtgcatgcctattcctatcttctgaagccgatcgaccgtaaaaagctgttcgaaattctggataatactcatctttctccacgcaggccgcaggcgcgtatgttcgccattcatatcggctcgtctgtccgcttggtatcgtttgatgaactcatttcggctgagctgaaatgccgtaccattctctacacgcttgcggacggcagcgtgatccagacgccgacgatccgcaattccttcaaaaccgaggtagccgccctgctcgcgcacgagcagttcgtacagtgcagcgtttcctcggtcgtcaatctgcgatatgtgcgctgtcttgaaaaaaactgcctgtttctgctcgacggacgtcagatttccatttcccgtcaggccggcgccggcgtcaggagcaaatggcagaaatactggagcagcacatctgaaatgaatggagagttctgatcttctgccgcagaccgaaaacaccgcagcgacagcatttatgctgtattctgcggtgttttgatttacgctcccggtatctcttgtttaatttgttcaaaaaacgtacttttcgtgacttgtcccgtgctattcgagttttctcgacaaaaccagactacgagaccggtctctatatctattttagcgcacagaacgcacgcaagcatgtgtatggggttcggctgcaacgcctgcggcgtaaccggctgccgcatcatcgactccccccgcgagcgtctgatcgccatcctcaccaacagctttgcaccgtgcaacgggcgctttcccctgctgatcttcctgtgcgcagtattcttcgatgccggatccgccggcggcgcactgctgctgaccagtgtgatcgccgggagcgtcctgcttacgcttgcagcctcccggctgctctcagccttctttctgcgcggcttgccctcctcgttcgtactggagcttccgccctaccgcgcgccgcagccgggcagggtgatcgtgcgcagcgtgctcgaccgcacagtgttcgtgctcggccgcgcgatgattgtcgcggcgcccgccggtgcactcatctggctgctcgcaaacatcacggtcagcggcagctccctgtacagcagcatgaccgcctttctcgatccgttggcgcgcttcttcggtctggatggagtcattctggcggcctttctgctcggcttcccggcaaacgagctcgttatgccgctcatcgtcctcggctatctctccgggggcacacttgccgatgtgtccgacctgctctcctttcgcgcccttctgcttgcaaacggctggaccggctgcaccgcactttgcacgctcctgttcaccatctgtcactggccgtgctcaacgacctgccttacaattttcagagagacccactcggtgcgatatacacttgccgcaatcgcgctcccgaccggcttcggacttgcgctctgcgcactcgcgcggctgctctttgtaccgctgtaaaaagacaccctccggcatcccaaaggatgttcggagggtgttttacgttattccagttcaaacgcaccggtataaagctgatagtatttgccgcgctctgcgataagctgctcgtgattgccgcgctcgataatatgaccgagctcaagcaccatgataacatctgcgttctgcacggtggacaggcgatgcgcgataacgaacaccgttctgccgtgcatcagaccgtccatgccggcctgaacgattgcctcggtacgggtgtcgatcgagctggtcgcctcatcgaggatcatgaccggaggatctgcgaccgcagcacgggcgatcgagagcagctgacgctggccctgggacaggctgccgccgtcgccgccgatgagtgtatcatagccgtccggcaggcggcgaatgaaatcgtccgcaccggcaagctgcgccgctgcgacgatctcctcatccgtcgcatcaagattgccgtagcggatgttgtcccggatcgtgccggtaaacagattggtgtcctgaagcacgatgcccagcgaacgtcgcagatcggactttttgatcttgttgatattgatgccgtcatagcggattttaccgtctgctatgtcatagaagcggttgatgaggttggtgatcgtggtcttgcccgcgccggtcgcgccgacaaaggctaccttctgccccggctctgcgtacagcgtcacatcgtgcagaacgatcttatccggattatagccgaagtccacatcgtaaaagcgcacatcgccgcgcagctgcgtgtaggtcgtcgtaccatcctcatgcggatgcttccacgcccagataccggttttatccgtcgtctcgacgaggctgccctcgtggtcgtagcgtgcattgacgagcgttacatagccgttgtcgacctccggttcctcgtccatcagctcaaagatacgctctgcgcctgcgagcgccatgatgatcgagttgaactgctgcgaaatctgtgtcaccggcatggtaaacgatttggtcagctggaggaaggacgcgatcacgccgatggtgatgctgtcgccgacaacgccggacagtgcgagtgcgccgcccactaccgcgaccagaacgtacagcagattgccgatgttgcccatgatcggcatcaggatattcgcaaaggtgtttgcattgcaggccgcctgacgcagctcatcattcagcgtgtcgaactgctccctgcacttgtcctcgtggcagaacaccttgatgaccttctgaccgtttatcatctcctcgatatagccgttgaccttgccgagagaggtctgctgtgcgaggaagaagcgcgcggaccttccgccgatgctcctgaccacgacgagcatgaccgcgatgccgagcagcacgaacagcgtcagccagacgttcgtgacgagcatgccgatgaacacggaaataatggtcatggcggacgagaacatctgcggcaccgactgactgagcatctgctggagcgtatcggtatcgttcgtgaagtggctcatgaggtcgccatgcgtatgcgtatcgaaatagcggatcggcagcgtctgcatatgctcgaacatttcgtcgcgcacgcgcttgagcacgccctgcgaaataccgaccatcagccagttatagaggaaggtcgtgccgatgccgatgaaatagatgaccgccatgcccatcagcgcatggataagctgcgtgaacacgggagacgcctgcaggagcagcggcgcgacataatcgtcgatcaggctcttgaggaacatcgaaccggcaacattcgcgactgccgacagcgcaatgcagatcagaaccacgccgaactgaatgccgtagcccttgccgatatatttcatcagacggttcagcgtttttttcggattcttgctgcgttttccgcccatcggcctgcggccgccgggaccgcgcatctgaggtcctgccattattcctcaccgccctttctgttctgctggttgtagatttcctgataaatttgattttctgcgagcagctcgtcgtgcgtgccgatcgcctgcaccgcgccgccgtcaaggataacgatctggtcggcctcctgcacggaggaaacgcgctgcgcgatgatgatcttggtggtgttcgggatctcctctgcgaatgcccttcggatgagcgcatcggtcttggtatcgaccgcgctcgtcgagtcatcgaggatgaggatcttcggctttttcagcagtgcgcgcgcgatgcacagacgctgcttctggccgcccgaaacgttgctgccgccctgctcgatgtgtgtgtcgtattgatccggcatctgctggatgaattcgtccgcctgagcaagtctgcatacacgcacaagctcgtcatccgaggcgttttcattgccccagcgcagattttccttgatcgtgcccgagaagaggacgttcttctggaggaccattgcgacctcgtcgcgcagtgtctcgatgtcgtagtcgcggacatccacaccgccgaccctgaccgagccgcgcgttacatcgtacaggcgcggaatgagctgcaccagcgtagactttgccgagccggtgccgccgaggataccgatggtctgaccggaatagatgtgcagatttacatctcgaagcgcgagcttgtgctcgtcgcccttgtagctgaaatcgaccgcgtcaaagtcgatcgagccgtcctttacttcgcagaccggctgcgctggattgtgcagatcaggtttttcgctcaggagctccgcaactcgttctgcgctcgccttcgccatcgtgatcatgacgaaaaccatcgcgaccatcatcagactcatcaggatctgcatgatataggagaacatgctggtcagctcgccggtcgtcatcgaaccgctcacgatcagacgcgcgccgaaccacgagacgagcagcatgcacgcatacatgcagaactgcatgagcggcatattgcacgcgagggtcttctgcgccttggagaacgtgcggtacagcagttcagagacgttctcgaacttctcggcctcgtgatcctcgcggacatatgccttgaccacgcggataccgtgcacgttttcctgtacgaccgtgttcagacggtcataaattttgaacacacgctcgaataccgggccgaccatcttcatcagaatgcccagaccgatcgcgagaaccggcagcacggcaacaaagatgagcgccatgtttctgttgatctttgcggccatgacgaaagcaaagatcagcatgaccgggcatcgcactgcgatgcgcgtgcacatctgaaatgcgttctgcacgttcgtgacatccgtcgtcagacgggtaacgatagagccggtggagaacttgtcgatgttggagaacgaaaagtcctgcaccgcatagtacatatcgtgtctgagattgcgcgcaaagccggtcgaagcgcgcgcagcataggtgccggccgccgcgccgaatacgagcgcgagcatcgcacacgccacgagaataaagccgtatttcccgatggcgctcatattctgtgcgtcgatgcccttgtcgatgagctccgccatgacaaacggaatgagtacctccatgacgacctcgagcacaacgaaaagcggcgtgagaagcgcgtcttttttgaactcacgcacgcttttcaacagctgttttaccattttttctgtccctcccggcataattttccttggtactgctccagattggagcgaattttctcgctgacggaaaaccagcccttcagctcctcctctgtgatgccccggcgcagcagctgctccatctgcgccatgcgctcggtaattcgttcgtccatcgcgcgcgcacggtcggtcagcaccagacgcttgagccgtccgtcatgcgcgaccggctcgcggcgcaggataccgtgctgctccatgagctgcagaattcccgtggcggtcgagcggcgcatctggaacgcgctctcgatatccttttgaaacagatcgccttccttttcgcgcaggatcagatgatgcacgatcatcgcctgcatgccggtcacattggccgagtcggtacttttttctatcatgcacgccatctgacgccgaagcaggttgtgcagcataccgatttctgccccgatgcggtcattcgagtggccgcagcattcgttatggtcacagcgacacattgttagcctccttactgttagtttgctaacatattatacatcactcattctcaatgtcaaccgacttcacagaatattcacaaaatcggctgcaatgcaaaaacggagcgcggcgacattccatggagcgacaaacgcgcggcaaaaaaatcaggatatgcgcctgactttttacaaacacagagaccccccgagaaccggaaagttctcggagggtctctgtgcaatagcccttgatttgaagggccttgacccttcaaatcgaagaagaaagtcttagcaaacgccctgtgcgagcatagcgtcagcgatcttctcgaagccgccgatgttagcgcccatgaccaggttgtccttgtggccgtacttctcagctgcggtgatgcaggtgtggaagatgttgaccataatgtcgtgcagacgctggtcaacctcctcgaaggtccaggacagacgcagggagttctggctcatttccagaccggaggtagctacgccgcctgcgttagcagcctttgccgggccgaagaatacgccggctgcctggaatgctgcaacagcctccggagtagacggcatgttggcgccctcagctacgaacttgcagccgttggcgatcagagccttcgcgttctcctcgttcagctcgttctgggtagcgcacggcagagcgatgtcgcactttacgccccacggacgctgaccctcggtgtaaaccgaacccggaacgcgctcagcgtactccttgatgcggccgcgctttacttccttgatgtccttgacaacatcgaggttgatgccgttcggatcgtagatgaagccgttggagtcggacatggtaacgaccttagcgcccagctgggtagccttctcgcaggcatagatcgctacgttgccggaaccggagatagcaacggtcttgccctcgaacgaagtgcccttgtatgcgagcatttccttcatgtagtagcacaggccgtagccggttgcctgcgtgcgtgccagagaaccgccgtaggacaggcccttgccggtcagaacgccggtgtactcgttgcgcagacgcttgtactggccgaacataaagccgatctcacggccgccaacaccgatatcgccggccggtacgtcggtgaactggccgatgtgcttgcacagctcggtcatgaaggactggcagaaacgcatgatctcagcatcggacttgcccttcgggtcgaagtcggagccgcccttgccgccgcccatcgggagggtggtcaggctgttcttgaagcactgctcaaagccgaggaacttgataacagaagcgttaacagagggatgcagacgcaggccgcccttgtaggggccgatcgcggagttgaactgaacgcggaagccgcggtttacgcgaaccttgccctcatcgtcaacccacggaacacggaactgaagcacacgctccggctcaacgatgcgctccatgatgccgttcttctccagctcgggacgagcttctacgaccggctccaggctctcgaggacttcgtaaactgcctgctgaaactcaggctcgttcgggttgcgcttttcgacagtctcgtaaacgctcttcagataggaattggtaagtgccattttggttttcctccttgcatttctgccgcagtgccttttcatattacaggaaaagtgcgggataacttacatacatgcggtagtatggttatagtatataatattcctcggaaaagtgcaataatttagcaggttaaaattatacatttttttcatggaaaaacaggtctggaattggtggttttcctcataaaatgaagtctgacttttctcgacttgcaaaatggcggtatttcagtgaatatctggcagccgctcctgtccgcagcaccgggatataaggtatgctgcttgctgttttccccgttacggtgatataatcttttcaaaaaaggaggctctttttatgataaatatttccgcgcttgccgccgcggccgcccattatgatgccggagacccgcgccgcgtacagcatttcatcaaggtctacggctactgccgccttctcaggctgagtgaaaggctggacgcacatacgcagaacatgctcgaggccgcggcgctgctgcacgacatcggcatccatgaagccgagcgccagcacggctcgtctgccggtccgtatcaggagcaggaaggacctgcggtcgcccgtccgctgctctctgcggcagacgcagacgaaagcgagatcgaacgcatctgctggctgatcgcccatcatcatagctgtcaagccggcgaagacaccgatttccgcattctgctcgaagcggactttctcgtcaacgcagacgaggacagtctgccgcgcgagagcattgcctctgcgcgcgagcgcctgttccggacggacagcggcaaaaagctgctcgatgatatttttctctcagagccatacattatataaggatataaggacagaaagagcgcggacacaacgttcgcgctctttgcgtatctctccgaaattatcgcttgttggagcgtctccacagacgcatcttctctgcgtccttgatcagctgctcgcggaaatccgggtgcgcaaccgaaatcagcgcttccgcacgctgccatgcagtcagacccttgaggttgaccttgccgtactcggttacgaaccagtgtgcgcacggacgggcgtcggtgacaaccgaaccggtctcaagcgtcgggcgaattcggctttcgagcgtgccgtccttcttcttgaaggtggacgagcagcagatgaagctcttgccgcctctggacaggtatgcgccgagcacgaagtcgagctgaccgcctgcaccggagatctgcttgatgcctgcggactccgcattcatctggccgaacaggtcaacgtcaacgatgttgttgatcgaaatgaagttgtcgatctgcgcgatggtgcgcgcatcgttggtgtaggaaaccggagcggacatgcactcggggttgttgttcacataatcatacagcttctgggtgcctgcgccgaacgcgaacacctgcttgccggtgtcgatggccttcttcgagccattgatcttgcccgcctttgcgatgtcaacaaaggcgtcgacgtacatctcggtgtggacgccgagatccttgaggtcggactctgcgatcatcgcgccgacggtgttcggcataccgccgatacccagctggaggcacgcaccgttcgggatctcctcaacgatcagctttgcgaccgcttcatcgactgcggtcggtgcagcgccgccgcccatctgcggcatgggctcatcattctcgacgatcatatcgacctcggaaacatggatcgcttcctcatacagaccgaggcagcgcggcatatacttgttgacctcgacgataacaacatcggaagcctcgcagactgccttgaggtgggacgcctgcggaccgaagctgaaccagccctgcgcgtccatcggagcgacctggatcatggtaacgttgatgcggccgacgttctcgcgataccagcgcggcagctcagagtagcgcagcgcggaatagaagccgaagccctccgtgcaggccttgcgctcgatgcccgacatatgccatgagttccaggtcagcttgtctgcaacatccggcacatcgaaaatcgctggccggcgcatcagcacgccgccgcggaaatttacgttctccagctcgtccatgcgtgcggcgagcgccttgtcgagtgcgttcggcgtgccggtgcaccagccgtaatcgacccagtctccgctcttgacgaccttgacggcctcctcgggcgtcgtcagcttgcttttataaagtgctgcgaaatccattgatatgacctcctgatgcggagcgtgttttcgtttcgcgctccttgtttattctttaacaatcgcatacattatactatattcctctgtttcggtcaagcaatcccggacaatatacccatcatttcaccagaacagtcctgttttgccaccgtatcggttaaaatatgcacatcactcctcccctgacgttttttctgcgccgtaaaaaatttttttcattttccctcttgatttatcacagtaaagtgttataatagtaaacaagttaaccactgaattttaggaggatatccctatgaaaaccaagagactgctcgcgctgctctccgcaggcgcactgagtgtatccatgctcgccggctgcggctctaccgcgaagaccgacgacaccgcttctgacagcgctgccgctgatacgtccgcttccgcagacagcgatctggaatacgtcaagagccagggcaagctggtcgtcggcatcaccgatttcgcgccgatggattataaggaagacggctcggacgagtggatcggctttgatgccgacatggcaaaggcttttgccgagagtatcggcgtagaggctgagttccttgagatcaactggaacaacaagatcatggagcttgacggcaagggcgttgacgctgtatggaacggcatgacgctgaccgacgaggtcaagacctccatgaactgctccagcccgtatgcgaccaacgcacaggtcgttgtcgttccgtccgataaggcggacgctgccaaggatctggacggcgttaaggggctgtccttcgcagttgaggctggttccgcaggcgctgctgccgctgatgcgctcggtctgaccgctaccgaggtacagtctcaggcagatgccctgatggaagttgctgccggcacctctgatgcctgcgtcatcgacctgctgatggccggcgcgatgatcggcgagggcaccagctacccgaacctcgtttacacgctcgacctcaacgaggcaaacggcgacgagccggaaaactacgttgtcggcttccgcaaggactccgatctgaccgctgcattcaacgatttctacaagtccgcttacgaggacggcacggttgaaaagctcgcagagaagtacggcgtacaggaagctatcgtcgctccgtaatcctgcaactaaataaaaagtcagcgcaaggcagagggcatcaattcgtcttctgcctttgcattcagagaggataaagagaggaaccaaccatgtttgctaacgtaaccctaagcctgatgggcggcttcgttaccacgatacagcttttctgtctgacgctcgtgttcgcgctgccgctcggactcatcatcagcttcggctcgatgagccgcttcacgccgctgcgcgctctcgtcaagaccgtcgtctgggcggtacgcggcacgccgctcatgctccagatcatcgtcatcttttacggccccgcgctgctgtggggcatgcaggcgccgcgcttcggcgccgccctgctgtcgttcgtcatcaactacgcctgctatttctccgagatcttccgcggcggcattcaggccatcccgaacggtcagtatgaggccggtcaggtgctcggcatgaccaagacgcagatcttcttcaagatcacgctgcttcaggtcatcaagcgtatcatcccgccgatgggcaacgagttcatcaaccttgtcaaggataccgcgctcgcgcgcaccatcgcggtctacgaggtgctgtggatgggcgaaaagttcatcaagagcaagggcatcatctggccgctgttctacaccgcggtcttttacctcatcttcaacggccttctcaccctgctgttcggctggatcgagaagaaaatggactattttaagtaaggagacgccgaaatgcctattcttgaggtcaagaacctgtataaaaactttggctcgaccaaggttctgaaggatatcagtttttcgctcgagcgcggcaaggcgctcgccatcatcggctcgtccggttcgggcaaaacgacgctcctgcgctgtctgaactttctcgaaacgccgaacgaaggccagatcatcgtaaacggcgagccgctgttcgacgcagccgatcacgccgccaaaagcgacgccgagatccgccgcagccgtctgcacttcggcatggttttccagtccttcaacctgtttccgcagtacaccgcactcgaaaacgtcatgctcgctcccctgctgctcgcaaaggagcagcccgactataagaagaacaagcgcgagatccacgagcagatcgagcaccgtgcgatcgacctgctcacccggatgagtctcgagggccgtatgagccactatccgcaccagctctccggcggccagcagcagcgcgtcgccatcgcgcgtgcgctcgccatgacgcccgacatcctgtgctttgacgagccgacctcggcgctcgaccccgagctgaccggcgaggtcctgcgcgtcatccgttcgctcgccgaccagcacaccaccatgatcatcgttactcatgaaatggagttcgcgcgcgacgtcgctgatcacgttatcttcatggacggcggcacgatcgcggaggaaggcacccctcaggatgtgttcgaaaacccgaaaaacgaacgaacccgcgcctttctgtcgcgttattccgccaattcataaaaatttttacattttttcgctccgctctttttctgaaaaatattcccatgtgaacgcgcacgcacagtaaaatgcagcgaattcaccaaagaaacggaaatacttgcaaaaacttttcggtaatattcactattaccccatttacaaatgcgaaaaaatacgataaaatagtcccgtactaataatacgggactttgccttgcttttttgtacaagttggcgtggttaaattttgatgatttttttgtgtgtttgtgttgaagttctggcgcaaatttgctacaataagactgtacaggagcatggctcccgatacggcgaggcacagagcagtatatgccccgcattgacttatgataaaaagcccgcatggccttttataaaatttttgattggagatgttcaactatggctatggatgctttcagcgcgtccctgatgaaggacaagagagagatcgtcatcgccccgactatttacaagtttgatactttcgatgcatttgcagaggagttccagcttggcgagcgcgacgtcgttctgaccaacgagttcatttacaagccgttcatggagaagctcggtctgaagagcaacttcgtattccaggagaagttcggcgcaggcgagccgtctgaggctatgatcgagaccatgtacgaagcaattccgtacgactcctacgaccgcgtaatcgcagtaggcggcggcgcaatcatggacctttgcaagctgctcggctgcaagcgcccgtcctccgtacatgagctgtacttcaagcgcgagcctgttgtacacgagaaggaagttatcgctatcccgaccacctgcggcaccggttccgaggtcaccaacatttccgttgctatcgtcaaggacgagaaggacggcaagctgaccggcggcgacaccaagctgggtctggtttccgacgacatcatcccgaacaaggtttgcctggttccggatctgctcaagactctgccgtacaagccgttcgcagcatccgctatcgatgctctgatccacgctaccgagtctttcctctctccgcatcgtaagaccgttacctccgagatgttctccgtaaaggctatggagatgatcctcgagggcttccgccgcatcgctctggaaggcccggacgctcgcatcgattacctcggcgagttcgttcacgcttccctgttcgcaggcatcgccttcctgaaggccggctgcgctaccgtacacggcatgtccttcccgctcggcggcacctatcacgttccgcacggcgagtccaactacgctctgttcggcaagatcctcgagatgtacgacgagtacgagccggccggcgagctgggcaagttcaaggagatcgttgctcgctgcctgggctgctccaaggacgacgctctgcgcaccctgaacgtaaccctcgagaaggttctgccgctcaagcctctgcatgagtacggcttcaaggaagaggatgtcaaggcattcgctctgtccgttgatgctaaccagcagcgtctgatcaccaactcctaccgtccgtggagcatcgagctcagcgagcgcgtttacaaggagtgcttctaagcgaaagcttaaaggcgtaataagcgaactaaacgtctgatagggcggggagccccgcctccctgccctattttcgttttttccggcctgttttcacaggctgcgttcctgtccggtgcgtccatagcggctgcaccgaaaaccaaaaaagaaaggataccaaacgctatgatgaccaaagagcagtatattgagtctcttcgcaagctgcatctgaacctttacatgttcggcaagaagattgagaacccggttgatgacccggtgatccgtccgtcgctgaattccttcgccgctacctacgagctggctgaggatccgcagtatgaagatctgatgaccgctacttcccacatctccggcaagaagatcaaccgcttcacccacatgcatcagtccaccgatgacctgatcaagaaggtcaagatgcagcgtctgctcggccagaagaccgcagcatgcttccagcgctgcgtaggtatggacgctatgaacgctgtattctcctccacctatgagatcgacgaggcatgcggcaccaagtaccacgaaaacttcctcaagttcctgacccgcgttcaggacgaggacctcgcagttgacggcgctatgaccgacgtcaagggcgaccgctccctggctccgtccaagcaggctgacccggatctgttcctgcacgttgttgagcgcaccccggacggcgtttacgtcaccggcgctaaggctcatcagaccggcttcgtaaactctcacgaggttctggtcatgccgaccatctccatgcgcgagggcgacgaggactacgcgatctccttcgcagttccgaccgatgctgagggcatcaccctgatctacggccgtcagtcctgcgacacccgcaagctcgaggagtacaacgacatcgacgtcggcaacaaggtatacggcggccacgaagttctcgttatcttcgaccgcgtattcgttccgaacgaccgcatcttcctcaacggcgaggttaagttcgccggcatgatcgtagagcgcttcgcaggctatcaccgtcagtcttacggcggctgcaaggtcggcgtaggcgacgtcctgatcggcgctaccgcactggctggcgatatggcaggctctgcaaaggcttcccacgtcaaggacaagctcatcgagatgactcacctcaacgagaccctgtactgctgcggcattgcatgttcttctcagggcaccaagaccaaggcaggcaactatctgatcgatctgctgctcgcaaacgtctgcaagcagaacgttacccgcttcccgtacgagatcgctcgtctggcacaggatctggcaggcggcctgatggttacccagccgtccgaggctgactaccgcaacccggctctcaagccctacatcgagaagtacctcaagggcgttgcatccgttccgaccgaggaccgtatgcgtctgctgcgtctgatcgagaacatgaccatgggtaccgcagctgtcggctatctgcccgagtccatgcatggcgcaggctctccgcaggctcagcgtatcatgattgcccgtcagtccaacctcgaaatgaagaaggaactggctaagaagatcgctcgcatccagtaatccagagcaattcacaggcactcatggaccataaaccgtgagtgcctgtatttgcgatacagtatgaagggggataacatacacatgctgcactgcaccgtgaagttctgcggcggctgcaatccgcgccacgatcgcggcgaatgctacggcactgtgcgttccgccctttcggacgccgcctcattctccctcccggaggagggcgcgcattacgacgtgctgcttatcatccgcgggtgcaccggctgcccctacctctatgaggagatcgaagccgaccgccgcgttgtcatcacatcgagggacgatatgcagagcgcaatcgacgagatccgcgctgccgcgtcgcattccgccggataaacggcggaaacattggccgcaggaggttttccttccccctgccccggccaggattgcattaacatttaggaggagatcaacatgaagaaagtaagcattatctccgcagaggaggccgctctcaaggttcaggacggcgacaccatcgctaccggcggtttcgtatcctgcgcatgcccggagaccctgtccaaggctcttgagaagcgttttctggagaccggtcatccgaaggatctgaccctgttcttcgcagcaggtcagggccaccgcgacggtaccggcggcgaccactacggtcacgaaggcatggtcaagcgcgttatcggcggccactgggaccgtgctccccgtctgggcgagctggctctgaacaacaagatcgaggcttacaacctgccgcagggcgtcatttctcatatgtaccgtgatattgccgctcacaacatcggcaccatcacccacgtcggcctgaagacctttgctgacccgcgcaacggcggcggcaagctcaacgacgttaccaaggaagacctcgtaaaggttgtcaacatcgaaggccaggagcgcctgctctacaagggcttcccgatcaacgttgtattcctgcgcgcttcctactgcgacgagtacggcaactgcaccgtacatcgcgagatcggtcctctggacgtaaccgcaatggctcaggcctgcaagaactccggcggcaaggtaatcgttcaggtcgagaagatcgttcagggcggctctctggatccgaagctcgttgctatcccgggcatctacgttgactctgtcgtcgtaggtaccgaagaggagaacatgcagtgcctcggcatgccgtatgacggcgctctgaccggcgagttccgcattccggttgacgctatcccgccgatcccgatggacgcaaagaagatcatcgcccgccgtgctgctatggagctgccgaaggacgctatcgtcaacctcggcaccggcgcaccggagaagatcgctaacgttgcagctgaggaaggcatttccgacaacatgaccctgaccgttgaggcaggttctatcgcaggcgttccctacggcggcacccagttcggcgctgctgcaaacgcaatgtgcatcatcccgcacaacgtacagttcgacttctatcagggcggcggccttgacgttgcattcctcggcctggctgagactgctccgaacggcgacctgaacgtttccaagtttggcacccgtctggctggtgcaggcggcttcatcgacatcacccagaacgcaaagaaggtcgtatactgcggcacctttaccgcaaagggcctcaagaccgagtgcaaggacggcaagctcgtcatcacgcaggagggcgcgaagaagaagttcgtaaagcaggttgagcacatcaccttctccggcgactacgcgaacgaggttcatcagccggttctgtacatcaccgagcgctgcgtattcgagctgcgtccggaaggcatcaccctgatcgagatcgctccgggcatcgacctccagacccagatcctcgaccagatggagttcgagccgaagatcgcttatcaggcagacggcaccatcaagctgatggacgagcgcattttccacgaagagctgatgggtctgaccatcgaataacggctatattttgtgcatgatatgcaagcggcatttattattttcatgcgaattatatgaatttaatatttgcccttgcattctgttcaagagtttgataaaatattaacgaactcagaaatcaatcgagttttcatcaccgtgcggcggcatagttttttcgccgcatcagtagaaaaggagaaacagctaaatgaacgtttacatctgttccgctgcccgtaccgcaatcggcacctacggcggcacccttcgcgatgtgcactcctccgtactcggcaccgctgctgcaaacgcagcgatcgagcgtgcaggcatcgacaaggcagctattgatgaagtcctgttcggtcaggttcttcagggcggcgtcggccagaacgtagctcgtcaggtatgcctcggcgcaggtctgccgatcgaaaccccggctatgaccctcaacaaggtctgcggttcttccatgcgtgcgatctctctgggctcccagatcattcgctccggtgagaacaaggcaatgctggtaggcggctgcgagtccatgtccggtgctccgtacatctcccgcaacacccgctggggcgctcgcatgggcgacatcaagatggtcgatatgatggtatacgacggcgtatttgatgtattcaaccagtatcacatgggcatcaccgctgaaaacgtagctgaaaagtacggcatcacccgtcagatgcaggacgagatcgctctcgcttcccagcagaaggctgctgccgctatcgctaacggccgcttcaaggacgagatcgttccgatcgaagtcaagaagaagaaggaaaccgttatcttcgataccgatgagcacgtaaagccgaacaccactctcgagatcctcggcaagctgcgcccggcattcaagaaggacggcggcaccgtaaccgcaggcaacgcttccggcatcaacgatgcaggcgctgctatgatcatcgcatccgaggagttcgtcaaggcaaacggcctcaagccgctggctaaggttcgctcctggggttctgtcggctgcgacccgtccatcatgggcgtaggcccgatcgagtccacccgtcaggctctgtcccgtgcaggtctgaccgttgctgatctcgacctgatcgagtccaacgaggcatttgctgcacaggcttgcgctgttaacaccacccttggcttcgacatggacaaggtaaatgtaaacggcggcgcaatcgctctgggccacccgatcggtgcagcaggctgccgcatcaccaccaccctgatctacgaaatgatcaagcgcgacctgaccatcggtctggctaccatgtgcatcggcggcggtatgggcgaagctatcatcgtcgagcgcgacgagctctgcaagtgatttatagggggtacccagtaccccctatataccgaaatcagttccagtagaaactgatttcggataccccctgacgccgcccaaggcggctgagtcggggtgtaaaaacccacgcacatgtcgcgggtttttacgaacaggaacgagttcctgttctcatttgactcaaacatcctccggatgtttgtccgtctccgcatggggacgatctccgagggtcagccttggagaacatatactgaaaggaagtcttaaaaatgactgacgtagtaatcgaaaaaaagggccatgtagcgatcgttaagatcgagcatatgaaggctatgaacgcactgtccaccgatatgtacgctcagctcgaggaagctttcgacgagctggctaaggatctggacaacgtttacgctgtcgttctgaccggttcctccaccgtcaacaagaagggcaagaccgtcaactccttcgttgcaggcgcagacatctccgagatggctaccaagacctgtgaggaaggcaagctgttcggcaacgagtccaaccgcgtctgctggaagatcgagaacttcaagcgcccggtcatcgctgcaatcaacggtttctgcctcggcggcggctgcgagctggccatgtcctgcgacatccgtctcgcttccgagaacgcaaccttcggccagccggaagttggtctgggcatcaccccgggctgcggcggcacccagcgtctggctcgcttcgtaggcgcaggcaaggcgaaggaaatgctctacactgcacgcggcaactactccgctcaggacgctctggacatgggtctggttaactacgtatatccgctcgagaacctgctcgacgaggctgtaaagctcgctgaggagatcgctgctcaggctccgatcgctgtttctctggtcaaggaagctgtcaacgttggtcagcagaccgacctgaactctgctctgaagttcgagggcaatgtctttgcacagtgcttcgctaccgaggaccagaagtacggcatggcttacttcctcgacaagaaccgcgacaagccggccaaggaattcaagaacaagtaatttcccctgtgtacatccgcatgagggggagcttcaccgctccccttctgcattgatttccgagaaatcacaatcaaagaaccgatgagtgagtaagagagaggttttataacatgaaagtatgtgtattcggcgcaggcaatatgggcgcacgcattacggaagttttcctgaacgctggccatgacgtcaccatgatcgacatcaagccggagttcaccgagcgcggcaagaccgtcatcgctcatgactacgacttcctcgtaaagaagggcaagatgaccgaggagcgcaaggatgagcttcttgctgccctcaagaccacggtagaccgcaacgccgctgccgacgccgacttcgtcatggaagttattctggagcgcatggatctgaagaaggatctgctcgaggatctggataagatctgcccggagcacaccatcttcgcttccaacacctccgccctgtccgtaaccgaaatggctgcatgcattccgcaccgttcggacaagttcatcggctgccacttcttcaacccggctcagatcatgaagctggttgaggttacccgcgcacttcagacctcggatgagaccttccagaccgcgttcgatctgatggcttctctgggcaagactccgattgccgttcacgagggtccgggtttcgttgttaaccgcattctgatcccgatgatgaacgaggctatgggtatcgttgctgacggtatcgcttccccggctgacgttgatgttgctatgcagctcggcgccggcatgaagtccggtccgcttcacactgctgacctggttggccacgacgttaacctcgctatcatggagaccctgtaccacgagaccggcgacccgaagtaccgtccgcatccgctgatgcgcaagatggttcgcgcaggctggctcggtgttaagaccggcaagggcttcttcgaatacgacggcccgttcggcaaggagatcgtcaagtaaatacagtattttactgaattttacgcaacagaaaagactgctttgcacagtgcacagcagtctttttcttttgtgataatattttctcgtgcgtttttgtctattttgcataaccaacctcatatatctttgttgcaaacgacaaagttgctgaaatcatatggtttttcgactttaaatgcgttataatattaacaaattgggaataatttatcagcaagcgctgcggacatcataaaagctgccaaatctgcgcataatgctgccggaattgcgtaacgagtcctcttgagcccgagatgtccggcatataggcctatggtataaatgcttgtttccgacgatccgagcatgactgctgcgacgcggccgacatagctgtccggtcccgcagtacggataagctcgctcccgagcgcaagtcctccccctccgctgattggtttgagcagcgcgagaggaacgcactcctgcgggatgccgagcagatggaacagcggcgccagccacgctgacgcaagatcgatcgcgccggaagcgcgcagcatatatactgccgtcagcatgccgatcatcgtcggcagaatgccgacagctgtttgcattccctttttagccccttctatgaaaaccggaaatactgccgttcctctgtatacagcgtacattgccgtaaaggcaagcaggaacggtacgaccgccgcctgtatggtttgcaaggcataaccttctttccttaaaccgcaggcagcactatttttgatacgcagccttctcagacggaaaaactgcacggcctgccctgcacagcaggagcgctgtcgcaaccgatacgacggaggcaccccataccggcagcataatgtcaaacggttcctgcgccccgcaggctgcccgcactgcggcaactgtggacggcacgagctgaatggaagccgaattgagcacaatcagtgtcaatacagcgtccgaagccgtatcgctgccggacaatttatgcagtcgcgacgcggcacgcagaccaagcggagtggcggcgttcgataggcccagcagatttgccgtgacattcgcgctcaccgcctgcatcgcttcgctgtcctcagaggcttttccgaacagcggacgcagcaccggcatcaagaaccgcgcgataatatgggtcaatccgctctgctgcatcagttccataatgccgctccagaagcacatcagtccggcgatgccgatcgcaagcgttactgcgcctgcggctccttctgtgagcgcggcggatacctcagacagccgccccgtcactgctccgcagacaaacgcgagggtgagaaatgcggcccacagcacgttcagcataccatgctgtcccccctttcgacgcgaaatcctttgacggatcgtgtatagatgaaatggaaaaagaaatgaaattgaaggagtgttttaacatgaaatccaccggtattgtccgtaaggttgatgaactcggccgtatcgttcttccgatcgagctgcgccgcaccatgggaatcgacgtcaaggacgcactcgaaatctacgttgagggcgacaccatcatgctcagaaaatacgagccgtcctgcgtattctgcggcaacgcaaaggatattatccactttaagggtaagaatgtttgcagcacctgcgctcgcgagcttggaatgctctgatacacatacctattccgtttatatggggtcatttcgctgcgcggagttgcccctttttaaatctgcggaaccggcttcccttctgggcggccggttttgttttgcgtgcgcgatgcacgcgaagcagctgccccccttttgcgcgcttcctcgcggtatttatccctcgttgcattgccgccgcggatatgccgctcgcttttgttccgcagcagcaccgcctgcacctcggcgtacagcacagcgttctgccgcttgaggcgcgtggtaatatccttatgtaccgtcgatttcgatacgccgaatcgcgcagcggcctgacgcaccgtcgcgccgctgtcgaccatataatgcgcgagtgctatcgttctttcctcgggtaagcctttcaccatcgtcccccctcatcactgccactttatgaggcggtgacgccggttagaactcccctgcgcatagaaaaaaccggagtacaggccgttttcgtgcccgtattccggtttctgttactcgatgcgaagcgcgtgtatcccctttgtgtgataatcgagcaggcggttcatgcacacgcgcacctcacgcggtcttacgcgatttttaaggatctggatgatgcctcccacgagattatctgccatgatctgcgcgagcagcagcgcgttctcctcgtccgcaagcagcggttcgatttgttgcgcgatgagcgcgaccatcgtcggacgcagatgctcgtagcgtgtacccttgccctgctccatgatgagcagcagaccgtatttttcggcgagcaggagactgaggatctcctcctgcagcagaagctggaactcgcgcgagtccgcgatattggaaaagcgaccgctgcgcgagcgcaggatcaaatttttcagtccttccgctgcactgtccgtcagctcgtagaacagctcctccttgtttttgaagtagtggtacaggtttcccttgctgatatttaccttgtccgcgatcatctgcatcgaggtgcggtcatagccgcgctgcaaaaacagatgctcggactcaaggagaatcctgtgccgcagctcatccttcagtacctgcatgttcttcacccgttcattctgaaaattcagccgaaaaaggaacggtctctcatgctgaaaccgttccttcgctcgttttacggcttattttgcgctctcaagcgcctgtcgaacgccctgcgcgagctgatccgagcagctcgtaccgcgtccgttgcaggaaataccgcggaaatagccctcgatctgatcgaccgtcatgccctcgacaacgcggctgatggcctgaagattgccgttgcagccgcccgtaaagctgacgttgtgcacggtatcaccctccagatcgaacgaaattcgcatcgggcaaaccccatgcggcttgtaatcaaaatgctgcatcctgttcctgtcctcctaagttaaaaaagcgtgcggatgtggtccgcggcctcaaggaaatcgtgcgcctcgaagcagcctacctcgctctcggggcgttccttgtgcgtccagttgagccagataccggaaataccggcctcatgcgcgccgcaaacatcatgtgtgaagttgtcgcccaccatgagcgcttcgtccgactgcacgccgcatttgcgcatagcgagatcaaagatcgtgcggtgcggcttgtcaataccggcctcctcgctcgttacaagatagtcaatgcgctcggaaaggccgagacgcatgagcttttccatctgaatatccgcaagcatattggtgacgacggcaatcctaatgccgtgcgcgtgaagctcgtccataaactcgggagcgcccggacgcacagtcattttcgcgaacacggcatcccagtagacggcagctgcttttcgggcatacggaacggcattcagacccatgttttccagcgcacgctgcgcaaacagcacgcggtcatggatcggcggcatatccggctgctcggcggcgagctgctttcttgcggtcagaaacgcggcgtcgaagccgtgtccggcctcgccaaaggtctcctgcgcccacttttccatgcactcataggcgtagcggtcaccagcctggaagctcgtatagagcgtatcgtccagatcaaaaaatactgctttcagcttgctcacacacgcacctcacttgagctcgtcgttatagacagctcggctgccgccgacgaacttgggtctgcggcgtgcgcagacgagcggcgcttctccgatcttcttcgtctcgatgcgcagcggtacaacgaccggcttgatgtgcatgccgatcagcgtattgccgacatccatgcctgcggatgcggactgtctgacgctctcgacggccaccggctcctcaaagcgcttgtatgcggtcgtgccgaacgagccgcccgccttgggctgcgggatgacgttgacctcatcaaggccgaacttctctgccgctgcgcgctcaacgatgagcgcacggttcaggtgctcgcagcactgcgccgcgaggaacagaccgtgcttctcgatcacgctgtaaatgccctcaaacacagcctcagcgacctcaacgctcgaatgcgtaccgatcttttcgccgcagacctcgctcgacgagcagccgacaacgaacagatcacctacgcgcagctttgccgccgcgcaaacctcctcagctgctctggcagcctgttctctgatctcagaaagttccatagttattctcctttaccggcggaataccgccgtgagttctatttgcggccgggagcacgctttctgtgaccggtcgccgcctgtttattctattatactacattttccgcgtcttgttaagcaccctgcgtttttttcataaattctctccattctcccttgcaaaaccacgcggcgcggcctataatcttttttaagagaacagttctgcggcagcgagccgcatggaaaggaagaaaacgttatgcatgacgatctgacggcgcaggatattgcgatgatgcagaaggagcttgaccaccgcaagctggagctgatgcccgagctgatcgaggaggtcaagcgaacccgcgcgttcggtgatctgagcgaaaattttgaatacaaggccgcaaagcaggcacagaaccgcaaccgcagccgcattcgctatctggaacgcatgatcaagtcggcgcatgtgatcgaggataaggccggtgcggacgaggtcggtctgttcgacaaggtcgagctgctgttcgaggacgacgaggacaccgagaccgtgcaggtcgttacaactgtgcggtgcgatccgctgagcggccgcatcagctgcaaggcgccgctcggcaaggcgctgctcggccgcaaggccggcgatgaggtgagcgtcaccaccgaggagggcggcagctacacagtcaggatcaaatcgatcaccaaggaagatgacaacggcgacggtccgattttgtaagcagtccgccggttttccgcgaaaaagaggggataagatgccagtggcgtgtcttatcccctcttcccttttctttcgcctatcgaatactgaccgccttcagatgccgcggcagcgagccgaccacgacaagccggttctcctcgtcgagaacgaagtaaatgcgcagtagattttccggatcgtttcctaccttcaaatgctgatcgagcgccgtttcgcgctttttaccctgcgcattggtaaaatacttgatcttgtactgtgccggcgtgaactgaatggtcatatcgccgatcgaagagacctcgaacggacggccgtacttgcgcgaacagctgtcgagcaccgcgtgccacggcagacgctcaaaccggctcgaccagtagtccgtcgcgagaaaatccagtgcgtcgcagataagcggcagactgatctcccgtgcgctcttctcctcgagcatcgcggccgctttgggtacaagaaccacacggccggcaaactgccgctgcacccagtcggcgatcttcgcgtgctcgctcgggcgatccatacagcgccgcagataagcgacctcctcccggtcctgaatggtcttatggcgcagtttttcatctgcctccacgaccctgcgcatcagctcatccttttcattttccagccgcaggcggtactgttttgcgcggtcaagctgctctgtcaggcgtattttctcgtcctccagtgcagaaattctgcttttatatgcagctgcatcctgttcgagcctgtgtctgaatctctcttccgccgcttcgctgagccgcagcgcattctgtgccgctgcccgctcgcgtgcctttgcctgcacgacaaacaggcagggagacagcgtaatatcacgaccgcgggcgtgattttttccacgttccatgagcgcggcaagcagcttttcgcgcgaagacgtacccggcggatatgggaaacgctcgctcgagccgccaagactctcgctctcccagtaaagcgtttcgcctgcctcaagcgtcttgtccgtgacagacggaaggcgtctgcgtatctcgtccgtcagcagaaacgtccggtaatacgccagtccgcttttcgcaaacgaggcaagatcaaacgccgggtcgaccggctgcttcggctcggagagcgtcatgcttttcggcaggtcaggcagcttgaccgggaacgggctgatgccgatgcgcaggtcgggcagagcgtcgcgcggcgcgatgtcgagcggcgtgatctcccgttcctcgagcgtctgcgtgaacaggataagcggcatatggcttgccggatttttttgcagcgatgtaagctgacgcagctgctccatggtctcgacgcgcgtaaccgatggagtgagcggcgcgatctggcgcagaccaaagcgcggattgtccgcgagcaggcggataaacgccggacgatagacctcacacagctcttctgtgtcctcgggatcggagatcatcgtgcggaagccgcagtgcagctctccgtttgaaacggtaaacgcaatattgctttcaataacgcggccgggcacagcctgacggcgctgctccgggttgccgggatccgagccgagatccggctcgacaatctgcatcgtccatgctccctgctccggcagcgaaacaatatcgatgacatagccttgatttatgtataatgagcgcagattttcccacgaaaagtctgcatactgctcgggctgcggcgctgtgagcgtctcgggagcatccggaccgagtcggtgccgcagccagtcgagtatggtcagcacaccgattttgaggccgtcctccggcgtcgttttgcgcgccgccataacggcatgcagctgataagtcgggtacagccggtttttcatcaagcgcaccgtgcggtagtcggctggcataggctcgtcctccttcattcctgcatggaatctgtgatggttacagtatacacccaaaatgcgcacaacgcaaacgatgttttgccgttttgagcgctttcatcgagccttttcgacaaaattcggcagttttatttgtgacaaatactcatcccagttcatcgagcagcgcacggcagccctcctcgatatcgcgccatgtggcttcaaattctccggtgtaccacgggtcggctacatctcccggccggcatgtgtggtcaagcagacgcgacattttgccgtccgggtcgccgccgcaaatgcggcacattcgcgtaatgttggagcgatccatgccgatcagcagatcgtatttttcgtaatcctgcgcggtcatctgccgtgccgcgtgcccctcgcatcggatgccgtgtgcagccagaacccggcgcgctggcggatagaccggattgccaagctcctcccggctcaccgccgccgatgaaacggcaatctccccttctttgcccgtctgctcgagcatgtctcgcagaatgaactccgccataggactgcggcagatattgccgtggcaaataaatagtactctaatcatctatgtaaaactccttgaatttactgtatttccttgatgtatcggcattttctttcgcttgctgtttcctctcattcgtggcatatcgtagcataaattagcacatcttttacctcaaaagtagtacaaaaagtagtaaattaagggctgaatactcattttactactcgccatttactacccgtttcagttcctctttcgcgtcgtcatagcctatatgtgtataagtatttaacgtgacgctaatatcagaatgtcccatgaggtactgtaaagttttagggttcatgccgcttttagccatattagaacaaaaagtgtgacggcaaacgtgtggcgtaacctttggcatttgcactctataaatactattatacttctcgcaaatatgctgaaagtatttttcccagtgcaaggctaccataggcatatcgtttttatccaaatataagaagccacatttacctcctacaataggttcaaccctcggtttctttctactggaaataatacgttgaaagcacttataaacttcatctgtcatagggatttctcttgtgccacaagaagtctttgtatcttcaattacatactccatattccgttttctttgtaactgatgattgacactaatttttctattctgcatatccaaatctgataatgtcaatcccacaaactctgaaatacgaagccctgttttgaataagataaaaatcccctcataatatctgcaaaagtgcttatcatttgccacaaattcaagaaatgctcgttcttgctttcttgtaattgcttctcttgttacgctgtcgtttacaacaaccgtagcaagctgaaattcaaacggatttttgcgtatcaaatcatcatctaccgccatttgaaaagctggtcttacaacacctctgatagaatgaatagagctatacccgcgcccgtcctgctgtaactttatcagccaacattttgcgtcggacagtttcactttatctatccgctttttaccaaagtcctctttcttaataatattgagaacaaaattgtaatttgcttctgtgttatgccgtactcccgttttttgtaaaagatatttctttaccagttctaaaacggtcatttccccaccacgcgggacgatttcatcatcaatcgctttcattatctgcttttccttttcccttaatgaaaggtcgtcgcgctttccctgtggtgtcttatctgtcttttctaatttccaactataaacaaactgcggtttacctgttgtatcaatatatttgaacgcatatcgtccgtcccggcgttggctctctccattgcgaagaatacgatttttgctatctcgtctttttccgctcatgtctatgctcctttcgtacaaaaagagcctcgccacgatatattaaattatatcataagcaaagccctttttctatccttttatcaagcagcactcaaagcggaaagactatatagcctatccgatatggctactgattatcctatatttattaaattgctgtcaggtcattcagaaaatcttcaaatcgtttccttttgataagaaacttcactccattttgaataataaaaccggagtccaaattatctgaaacaagttttcttaatttcttttctccaatattaaaataaattactgcttcatcaatcgttaaacaaaacttattttgtatctgtacctgtgtttcattattcatttattctctcccctttcttgaactataaaactattgtaaaattataaaggctcatcagacggttttagcaaacctcacaagaatttcacttccgcatggttctcatgcagctctacccgttgtctgcgacgcttctaacgctcggactacggcggtaaaggagtatcattataacgatatatggattgtggcgacagagttgctaaatctgctttggaacgctgatagttttcgctcgttttgtccctcctttcggtcatggcgtatcagcccaacggctccccatacatcgaatgtatctgatttgccttatactgcgtcgccgttctattgcaccgctttctttgtcaaagagcagagggctgttctgcgatatggaacggaaaagggggaagcgttccaataccttgttggtttattcagccctaaatgtgaggattgccctcattagttttgcttgcagcctttcgcgtatttcttcgtctactccaaaataaacatttcctcgctcatcatagagctttcgcatggaaagacttgctatgtagccgctgaaatgctgcaatacaatcttcattgcgtccgggtcgcctttgctcgccgccaaaataacaggataaggaacaagggcattttccgggtactcggtcggtttaccattcaatccattcatcagcattttcctccaaatatttttttaactgctcaaaggagcttgtccggcgatactgtaccgtacttcttgagatattgagctgctttgcgatttctatatcagtcaatccctcaaagtaatacagcagtacaattttgcgccgttcttcgggtaaagcccggatagcttcaagcagcagttttggggttatttcttttcctgccatttgataagacggctctgcttcttcgtcttgaagatacttatcgacggtataaagctgccgttcctcatgcaaggcaaggttggaaaaagtaacctcccgaactctgcgccgacgaatttcctcatgggtgttgcacgcttcattgtgaagtactgatttacagaacttttgaaacgcacattgcttttcaaattccctgcgattaggtgtcatggtgttcacctcctttctgccgaaaggcggtagtacctccccttttcgcgggataatacaggcgactttttgctttgccaaaaagagggcaaagtttttgaaaaatcttctgtaaaatgcgaaatgcgcctgcctgcaaaatgcagacagacgcataggaaataacagcagtatttaattgatttgatagttcatctacatagccggaataccccgtcggtggataatggctttttttgatagtaacccattagggtatagaaaaaaggacatggcgatacctccttgataccgtcgtgtccccgaatagcaggattttaatatgccctctgttttagattttcaaaagaaaacgacggttttgattgttatttcaaaaccgccgttaaaatggcatgagaactttctatttcataagcggttttttttatttcatgcttatgaagtagagaatttttaccttatcgtaaattcgcaagataaattatatgtatcgtaatcccaatctctttcactttcaaagaacgcaaattgtttaatcaaacgatagtgtccagcaggcaattctccataaaaacttttaacatcaatttctaatgttaatcgttcgttaggcttaataaaacaatccttttcattgctctttgaagggtcatcaagctgttcaagttgataccaagtgccggattgttcagtttctatttcaaaataatttggtgaatatcggtattctttatcagaagtattttctattagaaatgaaaggtgctttaagtctaaatccttttctgcactcattgaaatcttcaaatcgtccaaagtgtcaagtgcttcttcacttccataaggagaaacctcatattcttcggaataatcttgtactacatgaatatcactgtcctttgtttgactacacccaacaatacacaccaatagcaataaagttagaaacatacatattatttttttcatttgtcattatctcctttcttttaaatttataatagcaataaaatgtctattttcaatcaactttcattgcaatttattttcactgtaacacatgctccccctgctttattattagcaatttggatatttccgccatgtctttcacttaaaatcttactaatattcagccctaaccccaaatgttcagtagatatatctttcgatgatttataaaatggtaatgttgctttttcaatctcaatatttttaaacccgcaaccatcgtctgaaacagatataaccaaattattattctctattactacgctaatagcaatatcactttttgcatatctaatactattagagagtaaattttcataaatctgcatgactgtatctaaattgataaacaaggttatattatcaccgcttgcagtaattgaaaaatgtttgtcataacaaagtgcttccgctgtgttattaaaattatcaataagtgaatgaaatgtaatctgttgtcgtggaatatcaatatcctctaacctgtataagttcgtcatagcatttacatatttttcaagacgtgaaatattttttgacattactgatatttcgtctaatatttcttcttgtgatactaagcctttgggaataaaggaaagcaacatagtagcatgaccctttagtaaagtcaaaggagtgcgtaagtcatgtgaaaaagcagcattcaaacggcgctgttcagcaaattgtctaaacatagtttcattatttttcgacaaacaatctttcattttttcaaaggcgtgacagagtttccccatttcatcatttaatggatatgataatgtaaaatctaagtcatttgcttcaattttatgatacgcattagttaatagcttaatgggttttgataatttttttttataaaaaaatgttacacaacatatcatactaatagataatacgataggaataattgcaatatttaatgaacctaaagcactgtcaataagcctatcccggcttgtaaaattaggtaaaacttcgatatatgaaacatggttcggatagacatattcgtgtactgggcgttctttttgataatcaacattgaacttgcatatctcgtttcctttcgtgtcaaatattgtatattttgtttggtcattactataagtggcggtaaatgagccattttccggtatatcataccttgttgacatattttcatacttatagtttaaatttattctgtatctgtcaaccattgaaattaaaaatatacaaataattattccaatcaacaacgaaaacaaagcataaagaacaaaggacattctaatactcatgctatttaaccgattgaac

SEQ ID NO: 12846 - DNA, 75605 bp, Unknown
  gut microbiota DNA sequence
gtgctgctgccagtcagcttgcccacataagccttgcccgatgctgcgtcttcgccgttaatagtgattttcgcgccggaggaagctgcggtcggaacgatctcgatcgaagtcgtcttctcgtccacctcagcgacaaagctggtggtgttctttcgggtcggcttagtgccgtctgtcgggtactgccagtttacattgatgccgaaattcgggtcgttccagagcaggttgcccttctcgcccttcttgtgtacggacaggttggaaagatctgcaatcttgttctgattgccgtcgcggtagccgtcggacaggtaattctgcttgttaacgttaatgccaacccagttgatgtccttcaggcggtcaccgactacgacagtcttggtgttttccagatatcccttaaagctgtccagcgtgcgcagggtcggagtcgctgcactccagccctcgtcaacgaccttctgcaccgccgtctgaagattgtccagatagcctgccgtgccgtccagtacaacgtcgttgtgaccggtgaggatgcgctttaccgtgccgaggctgtcaacgcgctccagcgcgatctgaagcgaggacaggtaaacgtccatcgagtccgcgaagaacgtcggggacaggtctgcgaactgcatccagaacgagtccgtgatgtgtgcgcggttgttgccgatctggtcggtcgtgaacagattgccggtcgcggcatcgaacagcatgatgcctgccacctggtgtcccggcagctcgattacattaaatttcgtgccgcccatgtcgtaaacgtcaccgtttttcagcgttgccagctgtgcatcataggctgcgcttgcagcggcctcatctgcgaacatgccggaggctacgccaaactgcttgacataatcacgcagtacctcaataccgcgctcgttgacataaaccttagcgcccagatccttgttttccttgcacaggaactgatgcgtcatctgcacgtggtccgggtgcggatggccgatgataaggtcgatcggcttgccttcgccgacgatctttcgtgcggtctcgtacaggtttgccgcgtcctctgcatcaaagtagccggcatccagaaccattgcgcggccggtgccttctaccagatacatcttatcgctgtcgtaatcctgaatgagcgttacgttcggaacgtcgctgccgttccagtccttcggtacgccaaccttcagttcgtggtgcgggatgctggtaacatcgtagttccagttcgctacactgctggtcctgccgtttttcaccgcgactgccttaacgttataggtcttggtgaccgggcctttcgcgcttgcggtcggctgggtgatctcgatctgacgatactgataggtatcaaactttttgcttgctgtggtcgggacagctgccttgtctgcaccttccgcgatctcataataaatgtccgcgccgtcctgtgcggtcagcgtgacgaaataggtcatgtcgtaattgaatacgcctaggctcttggaggtctcctgacccttggggagcggatatgcgctcggtgccgcgggcgtagacgagctgccgcccgaagaaccgccggaggagccgcccgtgctgccggtcgtcagagtagagttatgaatcttgaccaccttgccggtgatttcgcagccggtcgccttgacttcgccggccttgccaccgagaatgaccgtgccgctcaacttcgccttgttcagcgtcacgccggatgccttgacgatgacaatgccggtgcccttgggcgttaccgtgccggactccgtgatgtaatccgaaatcatgttgtcgagcagcttgactacttctgcgcgggtgatattcgcctgcggctcaaagcggtttccgctgcggcctgcgatatagccgttctttgcaaaagcggctacgttcgccatcgcccacgaggaaatgcggctgttgtccgcaaagctcgtcgagctgccgcctgccgttaccgacagcgcacgcgccagcatgctgacagcctcttcgcgggtgatcttgtcctttggacggacattttttccgtcgccctgcatcacgcccgcctgcgccacacgcaggatcgggtctttgtagtacgcattatccagatcagagaatttgttctctgccttggtctggtaatccattatgcggtctatgataaccgccatgtctgctcgtgttatgggactgtccggttcaaagtctccattgtggccttggatgacaccgcggtcgctccagcggctgatcgcatcctccgcccagtgtccgcgcgtatccgcaaatgatgcggcaagcgctgacggcagcatcgtcagcagcattgccagtgtaataaaccatgcacagatccgtttgcgtttcattttcattctcccttctttactcgttgtcggccgaatttcatcggcttcctgctgccattattgtaccgtgtccgcgccaaagcgaaaatgaagcaaaaccagaattgttgtgcgatccgcaggagtttgttctgaccctgttcggtgttgcacaattcctatggtatttgttgtccgattgtcagaacagtccagaccgcgcagagctccgcgttaccgcttgccggatgatatgcctgaccggcgtcttgaaacaacattttccctcttttatctccgaaaccttgacaaaaccgctgttttgcggtacgataaatacagaaattcaaacgctcctcagccttatttcctttcgtttggcgagatacacatctcacaggcgcaggtatcccgtctggaaaagggcgcgctcgcgcacatccgcgacgggctggcataaatacagaaatccctccggctccaccctgttcgagtggttccggagggattttcggttttatctagtgattcggtgtgtccctgtcattctgtctcactgcctacagcatcgccataccagtcggcgatctgatttccatattgttccttcatcatctgtgcgagcgccatgatacattttttgttcgtcggcctgctgtgaaatctcagaaccgtattgtgcggatcacccttcacccggcgcagaccgccgccattccatgccgctgtgatcgcgtgccgcaccgaacgctctactgcgtgcaccgttgtgccgtacatggcggcgacgctcggatatacatattttgtcactccgacctgcgccgccggctcgagcagcagctcaatcactgcgtcgcgcagataaccgtaccccgaaacgtgcggcggaatgccgagattatagatatatggcgttaagcggagttcaatctctctcgcagcaatcgtacgcagattctccgcatacagcccggttccccgcttaattccatcgttcatcttatacacggcctcccttttaattctgtaccctcagcttattccctgcctatacaaaagttatatcataagatttcattggaataaagtctgattttctcgcgtgatatccattatttccctatcgtgtcgaaatcttatattgcaaacagcattttatacaaataatctccagaattgtacatctccgtgttaagattccgttaacgaaatcgtccgaacgcggccagcgccattttgtcatatttttcctgtctcgaaaaagtacttgctgatttttcgccttggtgacagatttccgcgcgtcccttccctccatcccttgaaaatctgccgatttttcgcttcagcattttccccatgatgcttcgaaaaatttcatgaaaaatcaacaaagccggagtaagccgacatatcccgttagaataaattattatcgtacaataaacaggctgaatatctattatttctcaatatggcaggtccggagcttttattcgatacatctcgtactttcagtcttttcctgtctcaaaggaccgggcggcgatagcatcgagctgcgccgcaccatcgaagagcggtggcacctcgggtgaagtaaaaagcagtgatacccttttcaaacatgaagagtaccactgcttttattcttttttacagctccagcggagcaagcgtcgtcgtgtcgatcgaccggatggccgaccgcagcggcagcaccgccgacggcgaaaccgaaagctcgtcgatacccatcgacaggaacgtttcggtcagctccgcatccgcgcccagctcgccgcaaatgccgatccagattccggccttgtgcgcattctccgccgccatgcggatcatacgcagcaccgccggatggtgcgcgtcgaaaaaccggtcgagacctacgccctgccggtcgacagccagtgtatactgcgtcagatcattcgtaccgaccgagaaaaagtccacctcacgcgccagctcgacgctcatcatgacggcggccggtgtctcgatcataatgccgagctcgaccttgtccgccatcggcacgccctcctccgcaagctcggcgcgaatgttgcggcagatgcgcttaatctcctgcacctcccagaccgacgtgatcatcgggaacatgatcgcgatcttgccgtaagccgacgcgcggtacagcgcgcgcagctgcgtgcggaacacctcgggacgggtcagacagatgcggatggcacgcagacccatcgcaggattttcctctttgtcgaggtggaaatagtcggcctgcttgtccgcgccgatgtccagcgttcggatgataacgcgcctgccgcccatgcgctccgcgactgtcttgtatgcctcgaactgctcgtcctcggtcgggtagtcgctgccctgtaaatagagaaattccgagcggaacagaccgatgccaccgccgtcgttctgcaggaccgcgtcaatatccgccggagagccgatattgcagtaaaccatcacattccggccgtccttggtcacattcggcttgcccttgagctgatcgagcagttctttcagcgccttctccttggcctgctttttgagcagacgctcgcgctcggcgtcatccggctcgataaccgcctcgccggtctggccgtcgatgatggcatacttgccctccatttccgactgcagcgcatctcctgcaccgataatagccggaatgcccatcgtgcgggccagaatcgccgtgtgcgagttcgccgagccgcccgccgtgataaagccgaggataagcgacttatccagctgtacggtctcgctcggcgcaaggtcgtccgccgccacgatgcacggcacatcggacacaatgccgctctcgccctcaccggtcagaatgccgatcacgcgcgtcgaaatatcccgaatatccgccgcacgcgcctgcatgtagctgtcgtccatcgcggcaaacatctccgcgaactgtgcgccggtgtcgctgacggcggcctccgcattcagacggtcgttttcgatgagtctctcaatactctcgacgaaatccagatcatccagcatcatctggtgggcctcgaacagcattgccgcgtcctcgcctgcctcagcgagcgccttgtcatgcagtacgccgagctgctccttcgcggtctcgcaggcatcatgaaaacgcacgagctccgccgcggtatccgtcaccgaacgacgcaggatttcgccgctcgggcggcggtaaaagctgatcgggcctgccgctacgcctttggatacgcctttgccgaaaatctgctccatctcgctcactccttacaggtttgccttgaaaaatgcctcgagctgcgccgcagcttccgcttcgtcctcgccttccacttccacgcggacggtattgccgtgcttgatgcccatgcccatgatggcgatcagacggcgtgcatccgcttttttatcgccgaaatgcaggaaaaccttgctcttgaacttcgcggcttccttcgccagcatgcctgccggacgtgcatgaatgccaatggaatccgtaatggtgtactcaaatgctgtcatgatgaaaactccttttttctttgttcaaatgggttgctgcggcaagaaaatccgccgagatccgctgttcctgtccgtaaaagtccacggcgcccggccggtgcggcggcctgttttcgctgagaaagccgctgccgccggtaacgagcagaccgtatttgcgtgccagcgagagataccgcgcagtgtccgcccgggcgtgactgccgtatgccgcaatgccgtcgaatgccgccaccggaaaggtgtcgtccatctcattcggcggcatgagcacggccagtccgcctgcttcgtgaatcgtgtgaatcgcctgctcggctgcaaacgactgcaccggatcgttccgcgtccgctcgatctcgagcagcgccggacaagtgatgtcaatgccgatgccgagcgtgagaaaatcctgttcccgccagcggcagtcgagttcaatgccgggcacgatgcgcacaccgagctgtgcgccgcgccagatacattccggcacaccgctgacggcacgccggtcggtcagtgcggccagtgtcagccgcgcttcacagcagcgctcggccagtgcgcgcggcgaaagctcgccgcctgcggtcaggctgctgtggatgtgcagatcggtttgtgccatggaaagacctcctgttcaggcggtgcgtcagggttcaggaaagcggatgctgcgccgaggggcaggccgccgtttccgggataaaccagcgctgatgcacgcgcacagcgcccgaaatcatatgattctcacagagctcgcgcagctcactgaccgaaatatgccacaggatcgcggcttccggaatggtcataaacggcatgcgccctcctcctcttgtgttatttgaataggtgatagaccgcctgtgccacgccgtcgtggtcacagtctgcggtgatgtattttgccagattcttgagcgccgcgtctgcgttgcccatcgcgaccggcatgccgaccgcgcggagcatttccgcgtcgttgtcgctgtcgccgatggcgaccatttcagcgggcgtcacgccgagcagctcgcccagccgagtcagcgcacgacccttgtccgcaccggccggcagaatctcaaagttgtccgagccggagcttgtgatcgtaatgcccggcagcggccgaatctccgcgagcgcctgctcgagcacctcgcgttcgccgatggcgtacaccttggtgacgttcagatggtttttccgaatctcaccggcgatgtcctccacgacgattttgttcgcgtgaaagccctccacgcggtagtttgcaacaaaatcgcggttggaatattcgttgatgtagattttgctgccgacgtagatcatcacgcgcaccggtcggctctgcaccgcctcgaccgcctttgcgccgatttcgcacggcatatcccagctttgcagaatgcgttcatccgatgcagtggcaatcgccgtgccgcccgccgtgaccatcaaatcctcgcagggcagctcacgggcaaactccgccgcttcgccgacaatgcgtccggtcgagagaacgacatacacaccgcgctcctttgcccacgcgagcgcttttctgacctccggcgtgatctccttctgcgaattcagcagcgtgccgtcaaggtcgagcgcgagtaaacggtatttcatgactgtacctccctgatgtggcggtaaatggcgtgtaccgcgccgtccgcatcgcacgagccggtcagctcgtcagccgctgcccgcgcctctgccgaggcgtttcccatcgcaatgcccagtccggcagcgcggagcagcggcgcgtcaatgtcgtgatcgccgagtgccatcacctcattgggcgagatgtgcagcgaatcgcacagcacatgcatggccgtgtccttgcccgcgcctgccggtacgacttcaagatattcgtccttggagcgcacgagcgtcatcggcaggtgctttgcctccagtaccggaagcatttcgtcaatctgcgatttctcgcccatgcagagcagtttgtgcgcgcctgcgtcgccccagtcggcaaacagcgtctccagcgacgcgaccgccggctgtacgccggttatctgtgcctcggcgcggctccactcgtcctcggcggcgatcagccagtcgaggtcgcggtaaacgctcaagtggatgcctcgcgcttttgtttcccgcagaacggtctgagcgcacgcacagctcaggcggctgtccaccaggcggttgtctccttgcaggataagccctccgccgcagcacgccagcggtccgtccacgccgagcgcatcccgaatcgggaacatcgcccgcggcggtcgtgcgctcatcaggcagatggtcacgccgttcttcgccgcgaactgcacagcctcgcggctggcgggcggcagctcgtgcgcggaattcagcagcgtgccgtcaatatccatgcacagcagccgatattgttgttgattcatcgcatttcttccttttacgcctgctctgccgccgacagaatgttggcgacattgcggtttccgttgcggatgccccgtccgattacagccgcgcagaccgcacacgccagcgcgataaccacgccgcatacgccgcccgcgaaacgcaatccgctgcctgcgattccccaccaagccagcaccgccgcgcaggaggagatcagcatagcgattcgcttccagagggaaagctgccgaagggcctgctgctgctgtttggcttcgtgcagcagtgcgattttgttcatcatagggaaaactcctttcctgccgatagcttgctgctatctgtacggcggccgctgaacgacttcgctcagcggccagaggggtgaaagtgtgatatagtttgagtgaatctgaatcagtatgcgagctgcggatcaaagaatccgatcagcacgccgaccagcgcgatgccgaccagcacgagcataacggtcgtgggcgccattttcttcttgctcatcagccaatagcagagcataacggttcccagcggcagtatcttggggaatatggtatccagcacatccttctgaagggaaatatcaccgggcaggacgagcggcgttgtgatcgagatccagcttgcggcgactgcgccgatcacgaccgtgccgagcatgatgatgctctcgcggatggcgttcgccttttcaccgacgatcatctcaacggccttgccgccgagctcatagcccttgaaatacagcagacgcatgccgagggtcaggatgacgttgtacgcaatgatgtagaagatcgcgccgagcggcgaaccgcccgaggacatgccgagcgcaacacccagcaaaatcgggatgagcgtgccgacgagcaggctgtcaccgataccggcgaccgggcccatcagaccggcgcggataccgttgatcatctcgccgtcgatgtcctcgccgtttgccttggcctcctccaggccggcggtcatgccgacgatgaccgtgccgagctgcggctcggtattgaaaaaggcagagtaggtcttgagggcttcggtctgctcctcacgggtgtcgtacagctcctctaccagcggcagcatggcgcacaggtagccgaaggtctgcatatgctcctgcgagaagcaggtcaggtggccgtaaaaccagttgcggaacgatttgttcagcgctttcttggaaagtttcttttctgccatgtcagatctcctcctcatcgtcatcaaattccgccgcggcagcagatgcagctgcgggagcggccttctgcaaagcaaggatcttgatgcggtagttgatgaccgcgaagaagccgccgacgatcgatgccgcgatcaggttgaggcccatgcacgcggccagcgtgaagccgaatacgaataccagaatgtcgaccggcttggtcgcgacctgcttgagcaggatggcgataccgactgccgggagcagcgagccgacggtgaacagcgttttcatcgccacgccgtccatcggcagataagccttcatcaggtctaccatgctggtgccgaccttggtgatgatgaatgtcgggataaaagagcacaggatgtgggaaatccacggcagacccatatcgaccacatacagcttgcgcaggtcacccttttcgagtgcgcgccagcccatgtgctgccaaacgaggtttaccgttgccgtaccgtagaacagcacggtgccgatggtgccgacggccgaaccgagcgttacggccatcgcctgaccttccggcgacgccgggttcagacccatggaatgcacggcaaccatggaaagcggaataccgatgtaggaaattgcgcgaacgtcagcggaaaccgtgccgcccggcgttacgagcgcgatgtatacgacctgaatggccgcgccgagataaatacccgtctgtacatcgcccatgataaggccgacgatcagacccgctaccagcggacggcccagtgtgtagttgccgaacaccgtaccgcccagaccgggcatggatgccagacatgcgagcaatccaaacaatgcagcctgccaaacttgaacttgcataagttctccctcttttctttttattctgtgaaaccgagcttagtagccgaactgaccgcggaacttcttccagttgccgatagcggcttccttgatgagcgcgaactcgacctcgtagcccttctgcatgatggcctcgagtgcgtctgcctccggctgggtgatcgcctgattgttgcccagcttggtcgcgcccgggcggtcgttgcacggtccgatgatgaccgtctttacctcaccggggtcaaagccgtcgtccacgaggatgctcttcatcgtgatcgggtccttggtgatgaggaagtagcgatccttgctggcaagcaccttgccgcacttggcacgccactcgtcgagcgtccacacgaacgttttcttgtcgctggcgttcttgtacgccgccttgagcaccggggtggtagccgccttgtcgtttacggcgatgaggccgtcgcagggatactcgagcgcccagcgcgtgcaggtctgaccatggatcatgcgatcgtcaacacgaatgaaagagatagacataattttttcctccttatacttaaatatcgtcgtcctcgtcaccgccgagggcaaaacgcttgatctgatcctttgcctcgccggtaagctcagcctcgagttcatcgagcggcgtatccgcatctgcgaatgcggcggtcagcacgagcggcaggttcatgccgccgatggcaagcgtgcgcgccagcagacccttttcggtgagcacatcgagtgcggtggtcagcggcgagccgccgatgatgtccgccgtgaggatgatctcgtcctcgggggtgatgtcctgaacgagctctgcgaagttggcgcggaaggtgtcaacgtccatgccgtcgagcaggctggtcgagcggatgtcctcgcggtcgctgcctgccatcatgccgagcgcgttgtgcaggcccggtgcaaaggttccgtggctgactaaaatcaggtatctcattttccgttccctctttcctgtttgttgagcatagtataccggattttatcctgtatgaaatctgcattttgtcatgactcacttgtgataatcgtcctgtttttatatgacaaatgtcatgccggctatcaaaatacgcaaagaaaaagcgccccgtctgtgcatatcacacaaacagagcgccaggcgcctgtaaattcgcgtattattcctgtaaatattcctgcacttcgtgctggacgcgctgaagctggagtgacagattatgctcgtcctccatcgcggtctgcaccagtccttcggtcagcagcagcgcctgatcataattgcggaagcgcggcgccgctaccgcctgctccatcacgtccgacagcatttccacgccgttccggctctcgccgggcgtgtcctgccgcaggatccggcgggtttcgtccgagtcggtcacgctccgcagcgcggacacgctgtgcgagtccgtgaacagcatggactgattatccgcattggcggtcagctcgcgcaaaaactgccacgcaagcgtcatgttcgccgaacggctgctgattcctgcgagcacggtgctcagctccgagctgttgccgcctgccgggccgtgcggcatgggaatgcagtcccacgagaaatccgagtagcgcttgatgcgccacggatacggctgataggtccggtaatccgagaacaggaacggccggaatgccacttttccctcgtcgaagtcccgtgccgagggcgcggtctccgcggtgagcttgccgagccgctgcgcaaacgccaccgcctgcaccgacttcggctcggagatcaagcagctgccgccgtcctcggtgaacagtgatgcaccgtttgctgtcagcgcatcctgccaggtgtagccgcagcagccaaactgatcgttttcgccgtcgccgtccgtgtcgcgcgtaaccctggcgcagatgtggtaaaaatcctcccatgtccagtcgccggacggcacggtaatgccctcgctctcgagcaggctcttgttgatgcacatcagtgtcggcacgcactcatatggcagcgcatactgcacgccgttctccgcaccgctttgcagcgcggcgggatagaaatccgtgtcggagacctctttatcctgtgcgagacagccgtccagaggcgccagtgcgccgagttcgcacagcgtaccgaagtcctccggcagcacgagaaatacatccggttcactgccgagcagatactggtcgatgagccattccgagtaatcccgtttgaggataccgctcgtgtaggtgacgcgcacgttcgggtgctcccgctcgaaccgctcgatggctgcgtcaatgacggcatagcagttcccgctcggcgcatcccagtagctgcctgccataaagccgagccgcagctcgaccggctttgtccgactgtacaccgtcgctgtcaggcacaccgccgcgagcagcacggccgccgtcaggcgctttgccagccgcttcactgcggacctccgaacggccgcccggctacgccggtctgcaccgcccagatggcgagctgcgtgcggtcgcgcaggtcgagcttgctgagaatgctgctcagatagttgcgcaccgtgccttcggacagacagagcgccgccgcgatctccttattcgacaggcctgcgccgacctcgcggatgatgcgccattcgttgtcctgcagctcctcggtctgcttttcgtctacgccgatggtaaggttgcccttcgccatgcgcgcgaacatctctaaagccttgctcgccacatcgggcgcgatgatcgagccgccgcgcacgacctcgcgcaccgcgtttgtcagatcggccaccgaaacgcccttgagcagatagcccgacgcgccgaaccgcaaggcattgaacacatactcgtcatcgtcgaacgtcgtcagcacaatgaccttgatattcgggtacgccgacttgatcagccgcgtacactctacgccgtctacctcgggcatgcgaatatccatcagcacgacatccggcttttcgctccgcaccagctcgatggcctcacggccgtttttcgccatgccgactacggtaatatcgccctgcgcccccagaacaaagcccagactttcccggatcagctcctgatcgtccgcaagcagcactttaatcatatacatcaccccatcgcagcggaatttccgcgtgcagttcgaatcctttttcgctctttacctttaatgtaccattcagcagccgcagccgctcacgcatatgccgcagaccaaagcccggctcgatcttcgcgcagccgcagccgttgtccgttaccgttatgccgaggcggcgctcctccgccgcaatgcgcacgcgcaccgccgtcgcgtgtccgtgccggatggcgttcgtgatgctctcctgcacgatgcggtataccgcgtcctcctcgtccggcgacaggcgcagatcctcggcctgcaaatcgagcgtgatctccgcctgcgaggtcgtctgcatttcgctgcacagcttcgcgacagcgtcggtcagctgcatgcgctcgagcgcgtccggccgcagcgcccgcaccgagcgccgcacctcgttcatgccctcgcgcgcggtggacgcgatgcgttccatctgctttttcgccatctcgggcgaaatctcgagcatctgtatacaggcgtctgcaccggcggtgatgccggtcagcgcgtgaccgagcgtgtcatggatttcccgtgccagacggttgcgctcgcgcgtttccgccatgcgttcgctctcggcagcgtaggctttcagctgctcgttcatgacagagagccggtcgttcgcctgctcgagttcgccgttcaggcggcgtatcgccgagttttcctcggtccgctgcccaatgagcaccaccatgtacaccacgaataaaatcaggtgcagcgcacccagcagatccactacgctctgcaaaagctgcctcgtgtgcatgtcaaaatacagcagatattccgagaagggcaccacatgcagcgccccctgcaatgcacccagtccggtcagcaggaacagcgcggtcatcgcgccgagaaacctgcggcgcgttctgccgtgcaggccgtcgatcagatccacgaccacatacagcagcaggccgttgtaggccagatgcagcgcgaaaatcacgcataatgcaaacagaggctcgatccatccgatgaaattctgcccgcgccggcgcagcacaccggccagaataagcgccgccatgccgagcacggcgatggccagcgtccacggtttggccggcagcgcgctcaaattctgtgcgaacgtcacgccgtccgactgccgcgccgccagtaccggcgtcatgccgaacacccacacaaggaatgcgcccacggtcacgttcagcagcagcatgatgcggcggaaaaactgcaaactctgtgccataccgttccctcctactgccagccgtccatgtcgtagccgtttacattgtccttcgttaccagctcgaccggaaccgtaatctctttttcgtaggcctcgccgttcaggatcgcgtagaccgtctgcgcggtgatctggcccagccgaataggcgactgtgccgccgtagccgtcatagcgccctcaccgatcatgctttttgcctcgggcgcaccatccacgccgtagaccgtcgttttttccagcagaccgtgctcctgcagcgccgccatcgcgccgagcgcactcgggtcgttgaggcacatcaccgcgtccggcacgatgccctgctcgagcagccggtccatctgcggcatggcgacctcaagctggccggcactgtccgcccggccgatgatctgaaaattcggatgcgacgccagcgtatcgcagaagccctgtatacgatccgtgccggacttggtggaagcgtgctcgatcagcacgaccttcgcggaatcgcacgtattcatcaagtgctccgcgcagagcacacccgcaccgtagttgtcggacgcgatcgtgcacgcgaccaaatccggattgctgacctgcgagtcgatgaccacgaccggcacacccgccttctgcgcctcgcggagtgcaggctcgatctcgcgatagtccaccggattaagcaccaacaggtcgatatcttcatgcagcagatcccggatttcttcgttctgccgctcctgatcgagtgccggatcgcgcgtcagcagaatatcgccgcggctttcgatcaccagccgcagttcttcatcgatgacgctgtaaaacgggttgttcatcgtcatgtacgtcgtgccgatgcggagcggctcgtctgcctgcgatacaaccccatgtgtcacagcggcaagtccggccgccagcagcagcgccgctgccgcaaggattggtcttgtgcgcaacggtatcccgcctttccttttagtagctgacaccattataacataaatttttccggtgaaaaagatggctgcggcgggtttgtcagatcatccgttttacgggcgatggtgcgttttgctacgcagcactgcggataatccgatgtgttcctgtcattctgtttcgttacatattttatcactctgacctgtgccgcaggctcgagcggcggcgcggagggcgagcgaggcctgcgtatcgtgaagccgcaggatggtcatgaagcgtctcgacaggcgcactgtgagacaaaaatttggccgaaaacagcaaaaaaccgccccgaatggcggctcgttgacagatttcgactgcgcatgatataatattgacggacgctgttacttttggcggtcagaccctcttttcctttcccatggttcgtggcaggaaggaggtggcgcatgtgcggaaaaaggcttttcggcttttagtatgtgcagtgattttgctgtacattttctgtataaaagcgcattgaccgctcggctggtacccaaacggtcaatgactaaaaaaatttgacttaaaatgggtctgactgcggtaacagcgtccctttgtctatattatagcatacgctccggctttgtcaaggcgacagggccggagcttttatcggtccggtgatgtcgtattctgtcgtttcatgtcgaatttgtacattttatataaaatttcagaaagcagagcagtttaaaccgtacagcgtgccattcgacgttttttacagcaatttgaagtattctcgcacaatattgacacgcagtgtgaaaaacaggttaagctgccgttaggccggagggcggccggggcttcctgcggcgcattcacagacggccttgaattcttccgattaacggaatcctgacgcgaaaagagagattttccgcgtctgtttgtgcaacctgctgttcagcgcctcgattttcgacacagcagtaagattatggataactcatcgaatttttcttcttttttcctgttttttctcatgatataatgggaatcaaagaaggaaattttcttcctgcataccatattcaagagaattgtttatcggaggtcgtggttatgatgttgatgatggatgatgaagttgttgtgaaaaaagcggaatctgtcgaaaaagaacactcttctctcgcacgggagattgaatttcgcttgacgccatatctttaccagcttggtatcccgccgcacgttacggggtacagctatctgcgcagtgcggtggtcgagtttttactcaatccgtcggagatgcgggagataaccaaaacgatttacccccggattgctctggagcatggtacaacggtcagcgcggtggagcgcgcgattcgccatgcaatcgctgcggcatggaacaacggcggcctgcgcggcataaagggtgacccgtgcacggtgcttctaacattccgccgcaagccgacaaacaagggctgcatcaccgcgtttgcggatatgatccggctcgtgtacggcacggaaatcggtctttgagcgcccaaaaaggggaaaataacatccgtttttacgtacaaacggcagcttttctgcataaaaaagcagctgccgaaaagcagctgcgaaatgaaaacgatgccgagatatggggccagcgcgagcagcggacggattttacctgctgataaagcgcagttttcgcggcaatacctgatgaacggcccgtttagagcttgatttcgtcgccgagcttgctccggacagccgctgcaagacggtcgataaactgtgtcaccgtcggcatttcgcggaatgcgagggcatcgggaccctcatcgtctgcggacatatacccttcgttccacgcatatctgatcgcagcggcgcaggcgcgctccacagaagcaagcgaggtgccgcgctcaacagcgatcgtcaggagcagggtaaggtgggtcgaattctgaatgccgtcaaggaggtacagaataacggcgcggcataaaatttcataaccgcgcatctgcggcgtgatgccgagccggaacagatacggaagggttgcgcaggcaattttctcctcgtcagccgcgcggccgaacaggatattctgatgcaggtacagcgctccctgctcctcctccggcatccagaggtaatcgtacagatcgttcataaaatcgtccttattcatgtccttatccatagttacacctcctgaaagtgcataaaaattcattatttatattgtatattataccatatttcccgtgccgcgtcacaaggaatattgcgttgaaaataatgaaattcatgccgtgtttttggtcgttttggtgaaaaatgatgaaaatcacagttttatggcggaattttgaatttacaggcggggaaaccgcccggaagggcggttccagtctgtcgataaagtttattttcatgcaggaacggctgccgcgcggcgcatgaggaagccgggagaggtgatcttctcgatgccctgatcgtggcccgggcgcaggtcgtacagaccgcgctcccacttgctcttgcggcgcagcgtgacctgtacgcggtcgaacacgacgtcctcgatatggttgctctcgcagccggaaatgatgcagttgtcaacgataacgttttcgaaatcaccggtgccctcggtgccgatcttgagcgcggcggaggtcgaggtcagcgtacagccagagagttcttcatggtgataccggtaaaggtgatatgattgcagtgctctacatagcacatggtcggatggggatagaagtcaccgttgaagtaataggggctgacgcgcttcatgaaagcataaacgttgccgtcgatcgcgccctgaccgggtatatccgcaactgcatacaggtgcagcagcagccggacgccgtatccgcccggcagggtcacgcggacagccgccgcatcctccccaccggtcaaagccccctcagccgcagctatgacggcgcggcaggcgttgcggacacggcggaggaggtgcgggcgctgcggcagcgcggcatacgggtcgccgccgtctttatgggcgaaagcgccggtgcccccgatgcgcggacgatctacggtcacgatctcatccgcattcagcggatggatcagcttgccggggccgccggaaagctcattcaggaggagatacgggaattgtccggctgattttccggcagctctcatgatacactcatttttctgagaaaacacaaaagaggctccccgtttcgggaagcctgagtttgtcgacaaagtccgttttcgcgatgttgacgctgacgcgcgtcagcgcgcattcaaaagcgtttgctgcgcaaacgcatccaaaccgggggcgtgtacctcggtttggatactttgagagggagaaagtttccgcatgggaactttcggacgactcgtgttttgcgaagtcaaaacacagattgtcggaaaaacgaagtttttcgacagtctcaggctccccgtttcgggagagcctccttttattctcattttggaatatctcagagcgccagctcgacgctctgctcgatctcgattttgctgcgcgcaatatctgcgcgatactgcgcgaataccgccgcctccatgcgccacgcgatgccgcagcctgccgacagctgccgcggcacgggaatcagtctgccggggatgccgctgtcccggcagaacgcctccatctccatcgccgcatccgtggtatggaacgtgagcacccggtacgcttttctcgtccgcttcacgcctcaaacgtgatctcgaagcagccgtccgggcgaacggtcgtcgcaaagctctttttttcgtattcgagcatcttttcgatgttcctgcgcgtatgcgcctcgtcgccgagaacgcggacgggcctgccgggattgtcctgcatggcgtccatcgtcagcagcaccggctccgggcaggaaaggccgcgcacatctacttcaacaaagttttccattgcattttctccttttccggcttatcgagccgctttttttcggcgcagattggttcctgcgataacgaacagtacgacgatgcagacgatgacggcgatcttgcctgctgccgacgggccgccgggaaccgccgcctcggtttcggtcgcagcctttgccgccgcaccgaccagaccgaagttatgcgcagccgctgcgccgagcagcatgccgaggaaggtcacggcgctgtcggacgagccctgaccggccagaataagctgacgcagcggacagccgccagccagaacagccgcaaagccgacaacgtacatgccgagaatgttccagaggtgctgagaatgcgcgatcggctggccggagaagccgaggtgaaaactgccggcggcgagattgtagaccgccatgaccgcgaacagcgccgcaatgatgctgatgaggtcaaaattcttcataaggagcacgtcgcggatgcttcctgcgaagcacatgcggctcttctgcgcgagcgcgccgatgatgagcgccgcgaccagagaaaggataacgggcgcgtgcttgctgccggggccttcggcgctcatggcgtaaacgccggtcgccgtgccgacgacgagcagagcggcgagcaggacaggcaggactgcgccgctaagcggcttcgcctcataggcgcggccgagagagaagccctttttgaggaagaacgagccggtcgcaacgccgcccgcaaagccgatgagcgcgacccatgcgttcagatcacctgcggacatgcgcagcaccatgcggagcggacagccgaggaatacgagcgcgccgatcatcatcgcggcgccgaggataaagcgcaccatcggcgaagaaccggcggtggacttgtattccttcgtcagcagggcgagcaggaacgagccgcagacaaagccgacgatctccggccggaaatactgtacgggcgcggccgtgtgcagcttgagcgcgccggcgctgtcgcggatgaagcaggccacgcagatggccatattcgccgggttgccgtagatcgccagcagcgcgaccaacagaccggccaccgcgccggacagcgcgagcttccatgtcttgtcaaagaatttcatgtttttctccttttactgtgcttttatatctgataaaagtataacacagccggattttgatgtgaaattcattctattgatattctattgtattttattgaaaaaatctataaatcagcttataatagagaaaacgaaacagaagggacgcgcggtaaatggatattcggcagctggaggcctttgtatacacggcaaaatatcagagcttttcgctcgcggcgcaaaagctgtatctttcccagcctacggtcagttcgcacatctgcaatctggaaaaggagctgcacacgcagcttttgcagcggacgaccaagacgctgtccatgacgccggccgggcgcagactgtacagctatgcggcggaaatcctcgacctgcggcacaaggcaattctggagctgaccagtcagcaggaggccctgctgcacattggcgtgtcctcggtgccgtcgctgcatcttctgcccgagctgctcgcggcgtatcatgtgcaggcgcccgaggtgcgcttccgcacgagctgctcggacagtctggacgtgatacgcaaggtctccgagggcggctgcgacatcggtcttgccggcacgaaaaccgccgcgcccggctgcggatttctgccggtgacatcggacgagctggtcctcgcagcgccgaatacgccgcatttccgggaatatcagcagcagaaggagccgctgcgggcgctgctgcgcgagccgtttctgctgcgcgaggacaactcgggcaccaagcaggaaacgctgtactttctgcggaacatggggctgtcgctcgacgagctgaacgtcatcgccgtcatggatgacgcggcctcgctcatccgctgcatcacgctcggcatgggtgtttccatcctgtcgcgcgcgaccgtgcagaacgatgcgcagtcgggcagactgctgctgtttccgctggggcagtcagcttttctgcgcaggctttacatcgtgtatccgtccgcgcgccgtatgtcggagcagacgagacgttttctggatttcatgaaggaatattatcagaccgggcagcagcaggcatgagcctgaccattgcacccggtctccgcacgctcacagcagcttttcgaactgctcgaagaaccggaacagcatatcgccgctcatggccagtgcacggacgcacacgccctgcaccgcccggtctgcgcatatcatttcctcccccagataaaacaaaagagcaaaggcacccctgtaaagcacctttgctcgattgctgcataccatatttgtgtgaaaaagtcaagaggatcatctgcacacagccgcggcataaacgcagaaatcccctgtctgcaatgacagcgtgcagacaggggaggcttttttgcgttcttactccatcaggccgacgcagtcgtagtacggcttttcggcaatcaacttcttgttatctttgaacatagtatgtcccagagtaatcacaaggtagtccgccttcttgaggatctcctcgaaggaaacgttcgggataccctgtacctctgcatccttggcgaacggctcgcaggcgataacgttgacgcccttctcctgaagaacgtggcagagctcgatggacggggactcgcgcagatcgtcaacgtccggcttgtaggacaggccgagcacgccgaccgtatccgtgaccttcttcagctcggaaacgaccttgccggcaacaaagaccggcttgttctcgttgcgctcgcgggcagcgaggatgaccttggcctccgccgggaactgctcatagatgaaccacgggtcgaccgcgatgcagtgaccgccgacgccgacgcccggggtcaggatattgacgcgcggatggcagttggcgagcttgatgagctcgaatacgtcgatgcccatcttgtcgcagatgacggacagctcgttcgcgtaagcgatgttgacgtcgcggaaggtattctcggtcagcttgcacatctcagcggtcaagtcgtcggtcttgtgtacgacgcccttgtcgaggaccttttcgtagatggaagccgccatctcagccgcctcgggcgtgcgcgcgccgacgatgcggtcgttgttcttcagctcgtacatcatgttgcccgggatgacgcgctcggggcagtgcgcaacatggatcttctccatcgggatgccggactcctcgctcagcacgcgcgcgagcatttcagaggtgtgcggcggaacagtggactcgaggatgacgaggttcggcgcctcgagcaccttgcctgccatgcggccggcggactcgacgaacttcagatccgccctgtggctgccggtctcgtccttgtagaacggggtcggaacggaaatatagaacacatccgactttccgagcgtgtcggagaagtgcagatggccgtgagcgactgccttttcaaacgcctcctgcaggcccggctcgacaatgtggatgtggccgccctgaagggtttcgatggttttcttgttgacgtcgaagccgcagacctcaaaaccggcttcagcgagggtgatcgcggtcggcaggccgatatagccaagacccatgacagtaattttcatagttttcttacctcattcagcgtaatcttcttacattataccacttttttcgcaaagttcaacgtagtgtttgaatttttacgcgaatacgtctataatgtattacatagtgttttcagcgaaacggctggttcgctcaatttccaacgaatggatgtctgtattatgattttcaagggcctgctcgacgacgctcgctcgatccgcgaccgcgaccctgcggcgcgcaccacgctcgaggtcgtcctcctctatcagggcttccatgctctgttttaccaccgccaggcacactggctctatcagcacaagcactttttcctcgcgcgtgcgctttcgcagtttgcgcggcatatgaccggcatcgagatacaccccggcgcgaagatcggcaagcgcctgttcatcgaccacggcatgggcatcgtcatcggcgagaccgccgaaatcggcgacgactgcaccatctaccacggcgtcaccctcggcggcaccggcaaggacaccggcaagcgccacccgaccatcggcaacaacgtgctgatctcgacgggtgcgaaggtgctcggcccgttcaccgtcggcgacaacagccgcatcggtgcgaacgccgtcgtgcttcaggaagtgccgcctgactccaccgtcgtcggcatcaaggcgcgcgtcgtcaagatcgccggtcagcgcatcggtccctcccctgcgtacacgctcgatcagatcaacctccccgacccgctcgcacaggagctttgccgcctgcagagccgcgtctacgcgaacgagcagaagctccgcaaggaagaggagcgcgagcgcgaagccgaccagtaacaaacagaaatccctccgggttgcattccggagggatttttttgcgtctttggacgatttagaacagctcggtaatctttccgaacagctcattgatgcggtcatatctctgcttgagatacagccagccgaacagcgcctcgagcgcggtcgcatgggcgtactccgcgaccgttgccgacttgggcacggtcttgggcttggcgttgcggccgtgacggtagacggtctcctcctcctcggtgaggtcagggaggatatgctcgatggctttcgcctgtgcggaggcgcgcacgagcgttatcgtctgactgtgcagatttttcgctgtctgcgtgccgccgcaggcgagatgggtgcgaaccagtatctcataaacggcatcgcccacatgggcgagcgcgaggctcgacatgcgggcgatagcggcatcatccagcttgggatgaagataatccattacttgtcctcggacgccggagcggcagtctcagcagcctttgcagcctcagccttagccttggcggcagcagcctgctttgcctgcatttccttgaacttcttgacttcctcagcggtcggaaccggctcgatgcagcccttcgggcaggccttggtgcacatcttgcagttcttgcacttgtcgtagtcgatcttggctacgccgtcgacaacgtggatcgcgtcgaacttgcaggtcttttcgcacatgcggcagccgatgcagccgttcgagcagaccttcatgacagccggacccttgtccttgttcacgcagtttacgtgaaccttcttggagaccgggatgaggtcgatgatcttcttcgggcaggtggaaacgcacttgccgcaggcaacgcacttgtcgatgtcgacctttgcaacgccgtcaacgatgtgaattgcgtcgaacgcacacgccttgacgcaggagccgaggcccatgcagccgaatgcgcaggccttcgggccgcctgcaacacgcattgcagcgttgcagtcctgaaggccctcgtatacagccttgtcgactgcgttgcagccgccgttgcacttgacgtgagcgacattgcgctcgccctcagcaacctcgacgccgagcacctttgcgatcttttccgccgcagcggcgccgcctacagggcagccgttgaccggagcgcggccctcgacgatcgcagcagccaggccgtcgcagcccgggaagccgcagccgccgcagtttgcgcccggcaggcactcgcgtaccagcgggatgcgctcatcaacctctacggcgaagaccttagcggcaacgccgagcaggatcgcgaatacgatacccatgataaagagtaccgcaaccgcgtaaataacattttgcatatccatttcttgtgtcctcccttaccaaatcgacaggccggagaagcccatgaaggacatagccagcagagctgctgcaaccagagagatcgggaagccttcaaagcacttcgggcacttggaagttgcgtccagacgctcgcggatggaagcgaacagtacgatagccagcgtgtagccgacaccggctgcaacaccgtataccagagagccgatgaacgaatagccgttggagatgttggtcttagccgcgccgagcaccgcgcagttggtggtgatcagcggcaggaagatgccgagcgcagagtacagcgacggcatagccttcttcatgaacatctcgacgaactgaaccagcgttgcgattacgagaatgaacgcgatggtctgcatatagcccagaccgaggggctcgagaatgaagtactgtacagcccaggatgctgcggaagcgatcgccataacgaagataaccgccatgcccatgccgagcgcggtgtcggtcttcttggaaacgccgaagaacgagcagcagccgaggaactgaacgaggatgtagttgttgaccaggattgccgcgatagcgagcgacagaatgtcagtcaagcccatagaggcaggtaatgcaaaagacatttacttgtcctcctttccagccatgatcttctggatcgcagcgaggatgaagcccatcatgaggaagccgccggccggcaggatcatcatgaccatcgggttggagttgaagaacggaactgcgatgccgtttacgccgttgacgtagccggacaggatggtgcctgcgcccagcagctcacggaagaagcccatgagaaccagagcgaaggtgaagcccagacccatgacaacgccgtcgatcgcggagggcagaaccttgttcttggaagcatacgcctcggcacggccgaggatgatgcagttaactacgatcagcggcaggaacagaccgagcgacgaagccagcgacggcaggaatgcctgcatggacaggtcgatcatggttacgaaggtcgcgatgaccgtgatgaaggctgcgatacggatcttgtccggaatgatcttgcgcagcgcggagataactacgttcgagcagatgagaacgacggtagccgccgcgcccatgccgatcgcattctgcagagaagtggtggttgccagcgtcgggcaaagaccgatcgtctgcatgaaaaccgggttatcgaggataacgcccgatttcagctgttcagaaaatttcattgtggcttttcctccttaacccagagtagcgacatatgctgccgccgtattaacgccgtcggttactgcacgggaggtgatggtcgcgccggtgatggcgttgatcgtaccgccgtccttggtaacctggagctgaccgtcagccgcctgacctgcgtactgggtgatccagttcgggtctgcctggctctttgcgccgaggcccggggtctcagcgtgagaagtaacctttgcgcctgcgaccgtgccgtcagcattgatgccgacgatcatggtaacgttgccgccgaagcccttcggctctacctgtacgcagtagccgacttcttcgccgtccttggtagccttgtaaacgccgtcgatctgagcggcggtgcggcctgccggcagggtgacgcctgcggctgcgacttcgtctgcgctgagcgcggtgttcatgtcctcgaactctgcgtccgggatgatctctgccatggcagcgtcgcgggtttcaactgcgttctgcgcgatcttgtccgcggttacgccgttgatcacgccgagcagcagtgcgcagatgaacgtaatgaggcccagtacgacgacaagctgtacgatgccgccttcctttttgttgctttccatgatttactgcgcctccttcttaaccttgtcgagctgataaccgaacttgcgcggatgggtcttcttgtcgatcgcccaaaccagcgtgttcatgatcaggatggagtaggatacgccctccggcagaccgccgaagtaacggatgaatacggtcagcagaccgcagcctacgccgaatacgatctggcccttcggggttaccgggctggtaacgtagtcggtagccatgaagatcgcgccgagcatcagaccgccgtcaagcacctgatacagcatccactgcaggtggctctggccgcccatcgggaagaggaaggtgatgactgcaacggtgaggatgtacgccgccgggatgttgatggtgatgaccttgcgccagagcaggtacaggccgccgacgatcagcgccagcgcggaggtctcgccgatgacgccgccggtctggccgagcagggattcaacgatcgaaacgtccggcagagtgccggtcttgaggcttgcgagcggagtcgcggtggagatcgcgtcggtaacggtaacgttgccgaagagcggcagctttgcgtgcggcgcggtccaggtggtcatgaagccggcccaggaagccatcatgaacgcacgcgcgccgagcgccgggttcatgaagttcttgccgatgccgccgaacagcatcttgacaataacgatgccgaacagaccgccgaatacggtcagccacagcggagctgcgaccgggatgttgaaagcgatcagaacgccggtgacgaagcaggaaagatcgcctaccgtgttctcgtgctttacgattttgttgtaaatggtttcaaatacggcgcaggacaccatcgcaatgatgacatggatgagtgcgcggacgccgaaggtgtagatcgcaacagccagtgccggaacgagcgcgatgagcacgtcgagcatcaggctccgggtgtcatcgtccgccttgatatgcggcgaggaggttacgactactttgctaagatcataagccattttcgtttttcctccttacttgttctctgccttggcagccgcctcagcctcggccttcttcttttcagcctcagcctttgcgcgctctgccatgcgctttgcctggatcttgcccttggtcagacggaactgtgcgaccagcggaatgcgagccgggcagacataagcacaggaaccgcactcgatgcagtccatcatgccgcagtcaacagcattgtcgaggtcctcctgcttgccgtatacgttcatgtagatcggcaggaggtgcatcgggcaggcgttgatgcacttgccgcagcggatgcactgggggtccttgacgcgcttgtcctcatcgcctgcgaaggcgaggaaagcgttggtgcccttgacgaccggagcgtcgagggagaactgggcgttgcccatcatcgggccgccggccaggagcttgttcggcgcttccttgaagccgccgcaggcgtcgatcagcttttcgatcggggtgccgatgcgtgcttcgaggttcttcggttcagccacagcggagccggagatggtgacgacgcggcggatgaccggcatgccggtggtaaagcggcggtagatcgcgcccgcggtgtctacgttgaataccgcgcagcctgcgtctgccggcagcttgccggacggaacctcgcggcccgtgcaggcattgatgagctgcttctcagcgccctgcgggtacttgcacttgaggggatacaggtgcagacgcggatcgtctgcgatcagctgctcgatcttcgggaaggtgtcagccttgttctcctcgattgcgatgatcgcgttctgtacgcccatcaggtctgcgagcatcttgaggccgccgatggtttcctcggggcgctcgagcagcaggcgatggtcggacgtgatgtacggttcgcactctgcggcgttgatgatgaccgtgtcacacttgccgataccggactggatcttgacatgggtcgggaaggtcgcgccgccgtgacctacgatacctgccgaacggatgcactcgatgcgctcctcgttggacatggatgcgaagtcgtagggatgtacggactcgtgcggacggtcctcgccgtcattcgtgataacgatggacaggaccttgctgccgttcggatgcaggcgcggctcgattgcctttaccttgccggaaacggttgcgtggaccggagcgctgacgaagccgccggcctctgcgatgggctgtccgagatccacagtgtcaccgaccgatacgatcggcttcgccggggcgccgatgtgcatggaaaccggcaggattacctcgtcgggcagagccagcttctcgatcggcttggtgtttgtcgcggatttatatcccggatctgcatgagtgccgggatgtatgccgccacggaacgaatacaccatttttttcacctctctgttattttgcgcaagaagaaccggcatgaccggcttcctcttcttcagaattgagcaggctgcacaaactgcgcaaccatacaacatagattatactgttttatgcaccttgtgcgcaagtcctaattacaaaaaaaatcaaccaaattacatattttctttgttcatcttgccaaacgaggtctattttccctcagtttcctttgttgattacgcatgagttcagccatattccatcatcggaaacggacagaccgccggttagcaaaaagcaacttcatgacacaaaagagagcacagcggtatgctgtgctctcctcggtctgtcgataaagtctattttcatccgcgcggcagcgcgcattcaaaagcgtttgctgcgcaaacgcttccgagccgggggcgtgtacctcggcttggataccttgagagggagaaagtttccgcatgggaactttcggacgtccgtgttttgcgaaatcaaaacgcagattgtcggaaaaacgaagtttttcgacagtctaaaagagagcacagcggtatgctgtgctctcctgaaatctgtggaatatgcagtcttttagattgcgcggacagagatcatgccctcgatggcgcgcagcgctgcgaggttctcctcggtcggctggtctgccaggtcgatgatggtgtaggcataatcgccgcgcgaacggttgcccatgttctcgatgttggtgtggaccgccgaggtgatggacgcgatcatgttcggaatgttcttgtggatgaggcagacgcggtagccgccctcatacggaaccttgaggttcgggaagttgaccgaattgcggatggtgcccttctcgaggtactcggtgatctcgtaaacggccatcttcgcgcagttgtcctcgctctccggagtggaagcgccgaggtgcggcagcgtgatggcattctcctgctcgaggatctcgtcggacgcaaagtcggaaacgtatgctgcaaccttgccgctttcgagagcctttgccattgccttagtatcgaccagctcgccgcgcgcgaggttgatgacgcgcacgccgtccttcatcttctcgatcgcctctgcgctgatggtgttcttcgtatcagcgttcagcggaacgtgaatggtgatgtagtcgcagttcgcgaaaatctcgttcagatcggtaacgtgcttgaccgagcggtcgagcttgagtgcgccgtcgacagacaggaacgggtcgtagccccatacttccatgtcgagcgcaacggctgcgtttgcgaccttgacgccgatggcgccgagaccgatgatgccgagcttcttgcccgcgatctccgggcctgcataagtcgacttgcccttctcagccgccgggccgatgtccggcgtgcccttgaggctctttacccagtttgcgccctgtacgaccttgcgcgacgcgagcagcagcgcgcagatgaccagctccttgacggcgttcgcattcgcacccggggtgttgaatacgacgatgccctcctgcgagcagcggtcgatcggaatgttgttgacacctgcgcctgcgcgtgcgatgcacttgaggttcttcgaaaactcgacctcgtgcagctttgcggagcggaccagaaccgcatcatagtcggtgaagtcctccgagcaggtatatttcgcagcatccagatcatccagaccgaccttggaaatcttgttgtaaagctttacgttatacattttgttctcctttgccgaacgatctcttacttgttttctgcggcgaacttcttcatgaagtcgatcagatattcaacgccctcgatcggcattgcgttgtagatggaagcacgcatgccgccgaccgaacggtggcccttgaggttggacatgccggccgccatggattccttggcgaactttgcgtcgagctcgtcgtcgccggtgcggaaggtaacgttcatgtggctgcgcgaagccttctctgcgacagtcttgtagaaatcctgggagtcgaggtaatcgtacagcatggaggaacgcttctcagcgcgctcctgcatggccttgacgccgcccatctgctcgacccactcgagaacgaggccgagaacgtagatgccgtacgtggggggcgtgttgtacatggagcccttgttggccatggtctgccagtcgagcatgaccgggtacttttcgagcggatagctgccgagcagatcctcgcggacgatgacgacggtaacgcccgccgggcccatgttcttctgcgcgcctgcgtagatgacgccgtacttggagacgtctaccggcttggagaggatgttcgaggacatatccgcaacgagcggtacgcctgccggagtctcggggtcgtactggtactcggtgccgtagatggtgttgttggcgcagatgtagaagtaatccgcatccggacggatgtccagctcggcctgcgtcggaacgcggtcgaagttgcggtccttggaggagaaggcaacatggatgtcgccgaacttgaccgcttccttgtaagcgttgtttgcgaagttgccggtgagggcataatctgccttgccggtcttgagcaggttcatcgggatcgctgcgaactgggtcgaagcgccgccctgcaggaacagcaccttgtagttgtccgggatagagagcacacggcgaagagccgcttcagtctcggtaatgatgccgtcatataccttggatcggtgactcatctccatgactgacatgccggagcccttatagttcagcatttcggatgcacagcgctcgagcaccggaaccggaagcatggaggggcctgcggagaaattgtagatacgattgtctgccatagttgatagcctgcctttcaaaaataaacattccgttttatttgtggaatgtgatattcattataatataaaatacttcgatttactaccgaaaaatctcccaaaaatccgcggtcaaacgcacctgctattatacattttaatcggtgttatgaaattttttaatagtacgctgaaaattcagctctgcctgtaataccggccgtttcatttgccattttccggtctgccgtgctatacttaaaaagctgtcgcgaaactacagtttcgccgacaagctgtgttctgctcgcgcagaacacgagtcgtccgaaagttcctgttcagaaactttctccctccagaagtataaaaaccgaggtacacgcccccggtttttatgaaatcgctgcgcgtttcctattttatgcgcgctgccgcgcggctgcttcatttcgcaagcttcgcttatctgacaaacaatacttatatattatagtaaggagccacccttcatgcaccatcgaaaaatgccggccggccgtgcatccctgcaccgccgccagcatcatgccatcgaccggctgatgccgtttaccggcgcgccgcttttccacgcgcttcagctgctcgccacctcggattcggcgcgcttccatatgcccggccacaagggacagccggtttttaactcgttccgcgatgtttttgccatcgactacaccgagacctacggcacgggcaatctctacctcggcgacggcccgatccgcgacgcagaggtcgcggcggcgcgttatttcggcgcgaacgactgctttttcctcaccggcggctcgacgcagggcatcctcgccatgctcggcgcggcggtcggccgcggcggcagcgtgctcatcgaccgcgaggtgcaccgctcggtctgccacggctgcgccctgctcgacatcacgccgtatttcttctccgcgcccctgctcgaaccgttcggcattacgggtgcgctgcgcgtcgaggacgccgagcgtcagctgctcgcccatcccgacatccgcgccgtcctgctcacctcgcccacctactacggcctgcggcgcgaccttccggccttcgccgacctgtgccgcgcacacggaaagctgctgctcgtcgacgcggctcacggcgcacacttcccggcggtcggtctgccgtcgccggtcgaggagggcgcagatatggccgtgctctccatgcacaagaccatgccctgtctcgggcaggcggctgtgctgctctccggaccgggcacagaccgcgcatccctgcgcgagaacaccgccctgttcggcacctccagcccctcctaccccatcatggcctcgatcgatcttgcacgcgcatataatgaaggccccggccgcgaaaaataccagaaggccgccgccgtctgccgtgaaatgcgcgaatacatctgtgcgcacacggttttcaccgcgctcaccgagcgagattttccctcgctcgacccctgccgtctgaccgtctgcaccgcaggcaccgacatcaccggccacgctcttgccgatgcgctgtggagcgagcacggtgtcgcctgtgagatggcggacgagcgcagcgtcgtgttcatcctcaccgaaagcgacaccgcaggcgcgatccaccgtctgagacgcggcctgcgcgtgctgtcgcgccgccgcagggagaccgcccttccggtcgaaacgcggccgttcccccctgccgagcgcgtcatgagcgtgcgcgacgcccggttcgcgccctccgccgaggtgtcgctctcggacgccgagggccgcgtctgcgcccgtcccgtgacgccctatccgcccggcgtgccgctgctctggcccggcgagaaaattacaaaggcgcacgttgaacttatccgcgaaagatggtacaatgatatagacaggatcaccgttgtcatgccggaaaagtgacggccgcggtgcttccgcacgtttcggaaatcatcgtctccggacgcatgaacgaaaggggatttttctatgaaaatggtactcgcgatcatcaactacgatgatgcacaggacgtaatcagcagcctgatgaaggcaggcttctccatcaccaagctcgcgaccaccggcggcttcctcaaggccggcaacgtgaccattctggtcggtctggacgagagccgtctggatgagtgcttcgacatcatccgcgagcattcctccacgcgcaagcagatcatcccgaccaccgcagagctcggcatgggctttttcccgtccgcgccggtacaggtcgatgtcggcggcgcaacggtattcgtgctcggcgtcgagcgctttgagaaactgtgatctcctttgacgcgctccccggcaaccgcagcctgaaggcgagcctgcggcgcgcgctcgccggccgcgtgccgcagaccatcctgctctcgggggacgacagccgcagtctggaaacgctctcgaccgcactcgccgccggtatcctgtgcgaggcggacgggccgcgcccctgcggcgcctgcctttcctgccgcaaggtgcaggacggcgtgcatcccgaccttaccctcatcgacgaaggtgaagacgagctcaaggtcgatcttgcgcggcgcatcaaggcggaaaacgccatcatcccgaacgacggcgcgcgccgcgtgaccgtcatccgccatgcgcacaatatgaacgcctacgcgcagaacgcgctgctcaaggagcttgaggagccgccgcacttcgcgtttttcatcctgacctcggaaaagccggacgcgcttttgcagaccgtgcgcagccgctgcacgcgcttcgcgctcgagccgtccagggaggagcaggccgtctccgacgacgaggcgacccggctgcttgcgccctatctgaccgccgtcgccggaaagcgcgagggcagcatgatgctcgcggcgctcggcatggaaaaaacgccccggcgcgcgctcatcggcgtgatgggcgtcatgcaggccgcgctgcgcgatgcgatcttccgcgcggagggcctgcgcgagccgccgctccagcctgcgctcgcaaagcagtccgaggcgctcgcctctgcgctcacgcccgagcgcctgcttgccttttacgactttacggacgagctcgtccaccgcatctcgcgcaacgcggcctctgccgctgtcacctgcgcgctgacgagcgacgtttaccgcatctgctaccagtagcacttccccgcagggcgcctgccctgctttacagatacaggaggacaaacctttgacgaccataatcggagtccgtttcaaatcaaacggaaaaatgtattattttgacccgcaggataccgaagtcaccgccggtaccggcgtaatcgtcgagaccgcgcgcggtctggaatacggcgagtgcgtgcagggcaacaccgaggtgaacgagcagtcggtcgtgcagccgctcaagcgcatgatccgcatcgcgactgaggcggacatgaaaacgctcgagcgcaaccgcaagcgcgcggacgaggcgtttctcgtctgcaagcgaaagatcgaggaccgcggtctggaaatgaaccttgtgaccgcggaatgcacgttcgacatgaacaagctgctgttctacttcaccgcggacggccgcgtagacttccgcgagctggtcaaggatcttgccggcgtgttccgcacccgtatcgagctgcgccagatcggcgtgcgcgacgaggcgaagatgatcggcggcctcggctgctgcggcagagagctgtgctgctcgacctacctcgacgactttcatccggtctccatcaacatggccaaggaccagaacctttcgctcaatccggcgaagatctctggtgtatgcggccgtctgatgtgctgcctgaaatacgagcacgaggcctacgccgagctccagaagattacgccgcgtcagggcagcgttgtcgatacccccgagggccgcggcaaggtcatcacgacccagatgctgcgcggcatctgcaaggtgcagctcgatgacagccccgagcattcgctgaccgagttccgctgtgaggactgcacggtggtcaagggcgcgtgccgcaaccgccagaacgccgccgcgatggccgaggagcgccgtcagcgcgaggaaaacggcgaaaatccgccgtccgagcgcccggcaaagccgcagagagcggagcgtccggcgaagcccgagcgtcagctgagaagcgagcggcccgagcgtcagccgaaggtcgagcggccgccgcgtcaggagaagccggaacgtccggcaaggggcgaacgccagccccgtcctgagaagccggagcgcatcgaaaagaatgcaaatcctgctgaaaccggcgaaaatgccgcagcagaaccgcgcgagggtgcacctcgccgccgctcgcgcggcggccgcagacaccgccgcccgcagaacggcgaaaatgcgcctgcccctcagaacagcgccgaataaaaagttctccacaggctgtggagaaaaacaagggataagccgaaacgcagacttttgtctgcgtttcttttttacagacaaaggcgctcccatctgagtagacgggagcgcctttgcgttttgagatatttgaaattgaaaagagagagatttctgcaagatatgcgcttacggcaaggggcgctcttacagcagctcgcgcttgatgcgctcgagcgcctcgggagcctgctgctccatcttctccgggaagccgaagtaggatacgcagatgatgttgtcgccgccgaccttgggtgcgtccggcttgagctgcttgtttgcgaagtccatgtcgcgcagggtctcgaagatgccgtcgaaatcgacctcgccctcgcccatggcggtgtgctgatggatggtgtagtctgcgcggccgcgctggttgagccagggcggattgacgatgtagcggcagtccttggtctggttccaggtgtcggccagaagtacgtgggtcagctcgtcgccggcgtacttgagcatatggcggacgtcgcccttgccctggtcatagaagaagccgtgggaagcggagtaaacgtagccgaggttcttggagcggaaggacttgacgatgtcgcaggcctcgtcattcagctctacgaagtcatacgggtgagactggcactctacgcggatgccctcgcgctcgatgatcgggagcagctcctccatggacttgaagaacatgccgttgcagatctcctgctggttcgggtcgccggagaactcggtgttgatgaccggtacgcccatgtcaaccgcgatctcgatcatgcgcttccagttggcaactgcgtgctggcgctgctcctcggtcgggccggaccagcggtaaacaacgatgaaggacgagatctctacgccggtctccttgagagcctgcttatactcctgctggcactccttggagaacagcggatgcttgtagaacgggttgatgcgcggatgcggggactgctcgatgtacttgtagccccagtctgcgaccttgtgtacgtaatcattgatggacatctgcttggccagaacgtcaacgtcaaatgcgattttcataaatgttttcctccttgtctctttgtgccgtttccagggcggcttccctttcgatggctctattatacggcgctttatccgctctgccaatgatacatttcgccgtataactgcgaaatcctgctgtttttccgcgattgtgcacttctgattatattttgcgcaaatgctgaatgtctgcgtattttattcattatttcgtataaatttctgctttttcttttcagaacacgctttaactcttgcgcagcagggtaaattctgctatgatgcaggaaaggagcgtgacgctttatgctgatcccggagaaaggcgtgcatcaaacctcggaacgatatttcttcaccccgtcctcgcttgcacgcgagcttttttattaccccacgcgcggcggtcattacttttgcagcagcctgtattctttcgaccaccgctcggagatcgccatgcagggcgatcacaaccagaacatcatgctgttctatatccacagcggcgcgatggagctgacgctcggcggcgtcagagcgctcgccgccgccggacaggtcgtgctgttcgactgccgcgagccctaccgctacgccgcctcggacggcctcgaattctcgtggctgctgttcaacggactgaacacgcgcgcgttttaccgccgcatccttcaggcgcacggcggccggcaggtctttatgccctcgggcgtcagcgagatcgcgcagctgctcgacagcatcttcaccggctgcgccgcagacgagcgccccggcgaggcacagctctcgcagatgctccaccgcatactcggcctgctgctgctcgacgacacctctccggctcacgccggcagcgaccgcatcgcagaggccatccgctacatgaaccgccacctgttcgaggagctgagcgtgcaggaggtcgccgcctcggtctctctgagctcttcgcacttttcgcgccaattcaaggccaaaaccggctattctccctatgaatacatcatcctccgccgcatcgacaaggcgaagtacctgcttacctcgacccagctctcggtcaaggagatcgcctatgccaccggctacaacagcgaggaaaacttcatccacagcttccgcagcaacgtcggcatcgcccccggcctgttccggaagcacccgatctgacagaaaaagagcaaggcgtatcttaagccttgcccttgtccaattatgcggtattgccttaacgaacttgaatttgtttaacctcttaaattctttttctttacaaacatggaaattaactctgctacaattcctaagagcaaatataccaacgcatataaaataaatgctttttctcccatactaaagaacagccatgtcccaagcaaaaagaatagcgctgtgataattggtagtgtccaaaatatttttatgtccttgccggcgtatgctccggaacaaattgcataaataggattcactgcaaaaaacagaatgaagcaaactgccatgccgccatcaccttttatgaatgtaaccgcaagccatggaaacaccaacataattactgctgtcgctaatatccaaggtataatttttttcatgtaatccaccccttaagcaaatacccgtttgtctgaccgtctttgttttcctctatcatacaatatttctgtcccttgtttcaatgccgtgatccacatttccggcaaaaccgccggagtttattttgtcagctctcggggtaacggggagtttttctcctgccacttgtgcagaccataaaaatgcggtataatgacatttgtatatgaattttaacgaaaacgaggtccggatatgagacttagaaccagactggccgtcctggtatgcaaggcatcgggtgcggttctgcgaaagctcggccgcggcggcaccaacctgccgggcaaacttgcgctcaagatcgacaaaaacattctcggcgagctgtcgcgcggcgtcaaggtcacggtcgtgaccggcacgaacggcaagaccaccacctcccgcatgatcgagcaggcgtttgctgacgcaggactcaagtatttctccaacaagtcgggcgcgaacctgctgaccggcatcatcgccgtgttcgcccagcattccaccctgtcgggcaaatgcccctacacccacgcgctcatcgagtgcgacgaggccgcattccgccgaacgagcgaatatcttcccgtcgagtgccttgtcgtgaacaacatcttccgcgaccagctcgaccgctacggcgagatcacgcataccctgaacgccatccgtgagggcattacccatgtcccgaacgcgacgctgtgtctgaacgcggactgctcgctgaccgcctcgctcgccgaggacggcatcccgaaccccatcatccgcttcggcgtcaacgtccccatctattcggagaccgcgcacgagctgtccgatgcggtctactgcatccactgcaagacgcagtacgagtatgactaccgcacctacggccatctcggcggcttccgctgcccgaagtgcggctaccaccgcgtcgcccccgaggtcgcggtcacacaggtcatttcgaccggcgcggacgcctcggacatcgtgctcgatattttcggacacgctcacgaggtgcacgtcaacctgccgggcggctacaacatctataatgccgcggccgccgcggccgccgcgcatgtggtcggcatcgacgaaaagaccacggtcagcgccctcggccagttcgaatgcggcttcggccgcgccgagcagttccgtctgggacaggcgcaggcgcgcatgatgctcgtcaagaacccggccggctacaatcaggtcatcaacctcatctcgcacgacgtcggcagctgcaagctcgccttcctgctcaacgaccgcttcgcggacggcacggacatcagctggatctgggacgtcgatttcgaggcgctcgccgcgcagcagggccgctttacgcgcatcttcgtctcgggcgtgcgcgcggacgacatggcgctccgcctcaagtacgcgggcttcccggccgagcgcatcgagcttgtccgcgactacgaaaagctgctcggtgagatcggcgcggacgcggcgccggccttcatcatgccgacctacaccgccatgttcgacctgcgcggcgagatcggcagacataccgacgtcaaggcgttctacgaataaggaggaacggaaaaaatggaactcaatatctgccatctgtacccggacatccttaatctgtacggcgaccgcggcaacatcatcaccatgaagcgccgcctcgagggccgcggcatcaaggtcaatatcgacgaatgctcgatcggccagccgctgaacgcggacaaatacgacatcttcttcatcggcggcggtcaggacttcgagcaggaggtgctgctgcgcgacctttcctccggcaaggcgcaggacatccgcaccgcggtcgaggaggaaaagacctttctcgccatctgcggcggctaccagatgctcggcgaatactacaagacctgggacggcgtgcagctcgacttcatcggcgccatcggcgtgcacaccatcggcgcaaaggagcgcatgatcggcaactatatgttcaggaccaccccggagagcggcgacacggtcgtcgtcggcttcgagaaccactccggcaagacctatctcagcgagcaggtcgccccgctcggcatgatgctctccggaaacggcaacaacggcgaggataagaccgagggtgcgcgctacaagaacgtgttcggcacgtattcgcacggctcgctgctcccgaaaaacccggtcctgtgcgattttatccttcagaccgcgctcaaccaccgctatgacggcgccgagccgctcgcgcccctcgacgacacgctcgagctgaacgcccaccgctatatgcaggagcgtctgtcgcacaacggataatgacacacaagtgtaacacacaggcctgttgaaacgtggtattattattataataagaggtgattacttttgaaactgaaacgatttttctccgcctttctggcggcggccctgctcgccggcactgtcccggcagcgctcgcggccgacatcgactcgcactggtcgaagccctatgtgacctcgctccacgagctcggcatcatcaacccctccgcctcgaccggcaactatacccccgaggcctcggtcacgcgctgggaattcatgcgctacatcaaccgcgcgtttgacttcaccgaaaaggcatccatcagcttttccgatgtcaaaagctcggatatgtactatgagaccatccagatcgccgtcaagcacggctacatcaacggcacgggcaacaacaagatggaccccgagggcacactgacccgtgagcaggccgcgactatcctcggccgcctgcacaagtacgcgccgaccgcgtccgcgtccaagctcgatgtgtttaccgacaagtccaaaatctcctcctacgcgacgagctacgtcgccgaggcggtctctcagggctacatcaacggctacactgacggcaccttcaagccgcagggcaacctcaggcgcggcgagatcgccaagatcctgtacttctacctcggctcgtcgctcagcgaatccggcaggcagtacactgccgccgccttccacagcgacacgaagaacgtcaccatctcggcggcctgcacgctgtctgacgcgaccgtcgagggcaatctctacatcacagagggcgtgctctccggcaacgtcaacctcaacaacgtcaccgtcaagggcgatatcatcgtcggcggcggcaacgtcacgctcgacggcgtgaccgcgatgaacctcatcgtctccaacccgatgggcatcaagccgaccgtgatcgcgaccggctcgaccaatatcggcaccgccgaggtgcagtcctccgcctcgctctctgagagcggtctttccgcaaatgcaggcggcttctccgatatcaccgtgaccggtgagggcgcgagcctttcgctcgatgcttcggtctgggatctggacaccaaggccgcttccaccatcgtcaccaccggcagcacgctcatcagcgagctgaccgcggacgcaaagaccaccgtcaccggcaacggctcggtacagaccgcaaagctgaacgcgagcggctgcgagcttgtcatgcagccggctgaggtacagctcgccagcggcgtcaccgccaccatcgcgggcaagtccgccgcctcctcgacgagcgtttcggtctccccgtccaccctgtccatcgacatcaacaacaaggacaacatcgccttttcctacgaatttctgttcaatgcggacaagaacgacctgacccgcgtcaccgtcggcggcaagaatctgcgtcagggcacggattacaacattctctccggcaagaacggcatccgtgtctacaagacctatctgtccactctgtccgtcggcacctacaccgcagagctgaagttcgaggacggcaccaaggccgccatcggcatcgtcgtcagcaactcctcgctcagcgcggtcagcccctcgcaggtcacgttcgacaagtacgaaagttcggcgaactacaacgacgtcaccgtaacgctcagtctgccggccggcaccctgctcgatacggtcaagctcggcagctcggtgctcgagcgcggcaaggactacaactacaacgcaacctcgggtacggtcaccttcctgcgcgagacgctcgctaaaaagagcaagggcagctacaccatcaccttcgtccccacgcgcggctcctcgtcgagctgctcgctgaccgtcacggattccgcgccggtcaatgaagtcgctccctcctcggtcgatttcgacgcgaacacctcgtccggcggctatcacgatgtctccgtcaccctcaacccggcggacggcgcgaccctcaagaacatccgcgcaggcggcaagacgctcgaggagaactggcagtacaaggtagacggctcgaccgtcaccctcagcaagtccgctgtcgcccagttcggcaaggacggcgcgacctacgccgacttcaccttcgtcatgagcaagggccagagcccgacgctgcgcgtcaactacgtcacgacctacgcgctgaccgcgaacgtggtcgacgacctcggtctgcccatctcgggcgcgaccgtcaccttcaccccgaatgatgccgaaagcggcaccgctgcacagaccctcgtcaccgactcggacggcaaggcgaccgtttacgtcaagcgcggcagctacacgctgacggcgacgcacgagcgcttcacctcggccatcacgcagaccacgagcgtctcctccggccgcacggtcaagatgaccggcgagattctcgagacggttcagctcgtcgtcaccaacgaatacggcgctccgctttccggcgcggcggtatccatcggcggcaagaccatcaccaccggcgcggacggcaccgcttccttcagcgtcaagcgcggcagctatgtagcgcaggtggcctgcaccggctacaagacccaggcagttcagctttcggtcacgggctcgctccgcgagcgcgtaaagctcggttaaacccgcataaaaaagcacctccgacagccgtaaaaggcatatcggaggtgtttttctgtatgcggcgctgcccctattcagtctcccatggacaggccgagcgcacgcgcctgcgcgacgatctcgcagtcgggcggcacggtcttcagcttgcccgccacctcggagagcggcacggccacgattttatcatcgcgcagcgcgaccatgcagccgaacttcccctcacggatgagctcggcggccgccgcgccgaagcggctcgagagcacgcggtctgccgcacagggtgcgccgccgcgctgaaaatggccggggatggtcacgcggatctcctgcccggtcagctccttcagctccgccgcgagccggtaggataccgacgggtacggcatggcctcgcgcgatgccttgaactcctttttgctcatggccgcctcctcgcggctgaccgcgccctccgcgaccgcgatgatcgagaagcgcttgccgtccttcgcacgcttttcgatggcctgcgcaatctttttcgcggaatacgggatctccgggatgacgatgacgtccgcgcccgaagcgatgcccgcgtgcagcgtcagccagccggccttgtggcccatgatctcgacgatgaacacgcgcgagtgggaaaaagcggtcgaatggatggagtcgatgacctccgaggcgatgttcaccgccgactggaagccgaaggtcagctccgtcccccacaggtcgttgtcgatggtcttgggcagcgtgacgacgttcacgccgttctcgcgcagcaggttcgcagtcttgtgcgtaccgttgccgccgagaatgaccagacagtcaaatccggcctttttcaccgttttcagcattttatccagtctggtctgctcgctgtcctcctcggggcgctgcatctgcttgaacggctgacgcgaggtgccgaggatggtgccgccgagcgtcagaatgtccgaaaagtcgtccggcttcatctcatggtagtctccctcgatcaggccgcggtagccgtcgcggataccgtacagcgtcacgcctttgcccatttcgttatacagtgtctttgcgacaccccggagcgccgcgttcagtccctgacagtcgccgccgctcgtaagcattccgattttcatattcatcgtccttcccccgccggtctccctgcggttttcttctctccattataggatattatgccgcacggaaaaagcgattttacatacttttttcattgcaatttgtgcgcatgagatttttctgtcgatttttgatttttttgcaggaattctgttgacaaagctcgctgtatgggtttatactgtaatcactaaaaaaagatgatgcagtcgctttgaccgcatctcaaacgataatagcaaaaccatcgaaagatggcgacgcaaagctatagggccttacccctctgagagggctggcagccagttaccgaaaggagatcgccggatatgaagcggctttttcgttttgcatgcacagtttttgcagcagctgtcctctcgatgggtttcaccgcagcggcagcgaatgacattgttgacatgagcaacacatcccacggttatgtaaccgttaactacacctcgagcgccaagctcaaggtcggcatccagtacaacggcggcaagacggtttaccgcgactgcccgagcggcaaggatgcttcgttctcgctcgaccagggcgacggccagtacactgtaaccctgtaccgcaacgtttccggctcctcttatgagcaggtagcgtccagctccatgaacgttaccgtcaaggaccgcttcgctccctacctcgtctccacctcggacattcagttctccaagggcgacgctgtttccgccaaggctgctgagctctgcaagaacgcaaagaccgacgaggaaaaggtcgtcgccatctacaactacatggcagaccgttactcctatgattacaagctggcaaatgagatcaccagcggcaagatcaccaagtacatcccggataccgccgctactctgaacggcaccaccggcatgtgctacgatttctcttccctgttcgcggcaatgtgccgcagcgagggcatcccgtgcgcactgaccaagggctacgccggttccagctatcacgcatggaacaaggtcaacctgaacggcagctggtaccagatcgatctgacctacgccgttacccgcaatgtcaggaacgcaaagaccctgcatgactgcgtatctccgctgacctatacgaacaccagtgatacgctcgccgcagaagctgcttaacgctttctgctcttccgatttgtatacagatgacgccgacttcacctttttcattacttaatcagcggtcattttgtataaatacgctgcgaatcaaaatcttattcagtttacagtatttacttgtcgtttacggctaattgtagtatactgaaagtgttgatccgcggcattctgtccggccgtgcaaaaggactgtatgttttccgcatactgccttaccggcagacagcgaccaacaaaatctgtgcatgactcccgcgaacgggtaccggtacagacaaaagcaccaccggcgaaagccggtctcgcaaagccaggggcctaaacggagctcttttctccgcacggcagccggttgccagtgataccatgtacctccttcgcagagctgtgcgcgctgtaaagggggtattttatttggaggttgaaactgcattgcattctgagattatcgcaaacccaaacacacatgatctgtgcggctcgttgaggagcaagttgtacagacaaaggcaccatcggtgaaagccggtctcgcaaagccaggggcctaaacggaaggttcccttccgcatggcagccggttgccagaaatacatctgcaattcctctcgatcagcatgcacgctgaccaaggaggcattccatatgttaaaaaagaatacgcgcaaacgtctgctcgcaggagctcttgcgactgtcatgatgctgaccatgtgcccgagctgggcgctggccgacgatgagggcatcgcaactcttccggcgaacgaagaaatcgcagtgccggtggttgattccactcccgcagcagaccccactaaaactcccgctgatcccactccttctgagcccgaggcaaagcccgagaatcagaataccgcaccggctccgtctggcgacgaagcaaacggcggtacggacagcacggagtctggcaataacaacgcttcttccgacgcttcggaagattcgaaaaacaattctcagaataatgatgtagtaagcaattctccggaaagtgaaatcagcatggcatcgctggacatcgacctcgcatggaatcggaatacgaaagcccagtacttcgtacttctgccaaaccgtgataagccgacgagcggcaaaagccagggccgagcaagctacctgccgaataagacttcggacggcggcgttaccggtcgaaacgctgaaaaaggctacgaaggctatctgactccggaaggcaagaagatggctgataggaatcacagcatcctcgatgccaagaatggttataccaagattgatggcgttgaaagcgaatatctggagccgccgactaacctcggtttcttcaccaaggccaactggtcggaagatggcaaaacctacaacgagaagtccaagaccactgatccgttctcggtactgggcgaaaactttaatgtaaataatattagagttgtatggtacaccattaagaggcagatagacggctatcatgttgacggctatgtagccggtgttccggttaaggttacttatcataccaactatgcaaagaatggaatcaccggtatggaagagactttcgaggaagtttctgcaacgagcggtgagacatataccgttcgtgataacacgttcaccgtcccgaccggattccacttcgacggctggtacaccgataaggactgcaccaaagaatatcagacgactacgctgatgaccagcctggatctgtacgcaaagtggactaccaacagtaccccggtcgacccggaaaccaagaccccggctaagtatttcgtacttctgccgaacctcggcactccgcagagcggcgcaagccagggctggaaaaattacctgccgaatgagacttcggacggcggcgtaaagggcgtatctcgccagaccggttacgaaggctctctgaccgcagccggcagacaggcagcagaccgcgcgtacgacacggacgacaaaaaaaacggcgtattcgacgacaagggctttggcgacgactatctggttccgccgactgacctcggtttcttcgatgcggataactggtcgtctgatggtacgatctataatagtgagaaggaatccaataccactgatccgttctcggtactgggcgaaaactttaatgtaaaaaacaacattagagttgtatggtacaccatcaagtatcagggcgatgaaggtagctatcacgttgacggctacgttgacggtgttccggttcctgtaacttatcattctaactttggcacggatgttaccgaagctcgcaccgcaaagaccggcgaggtctacaatacggtttcttatgatgagctcactgagctcccgagccgtccgaactatgagttcaccggctggtataccgacaaggaatgcaagcagccgtattctccgacgctcctgatgagcagcatggatctgtacgcaggctggaagcagactgcgttcgacgtaagctacttctataaggacgcgcagaacgtcgaaactcaatttggcaccacggagacctataaagttaagtctgacgtaaccgtaagaaccgctcatcctgaaaaggaaggctacaccttcaccggttggacgaatatcgcgaatatcgtaactgtcgatactactaccggcaagttcatcatgccggcgcatcacgttcgctttgatgctaccttcgagatcaatcagtacaacgtaacctacaaggttggcactgaggtagtcggcactgatgtctacaacttcgatgccgatgttgcaatccgacccgttccgactcaggaaggctacaccttctacggctggacctctaaggattctgcattcgatatccgcggcttcaagatgcctgcgcacaatgttgtcatcgagggcaagttcgagaaaaacccggcaaagcagtacacctataccgtcaacaagcacttctacaacgagaagggcgttgaggttaaggtagagaacggcacgcccaatcctgctgttgagaacacggctgtttccgagctttacaaggacgcggctgtaaaacagacggtcgacggcaagacctacgtttacgtttccggtctgaccaccgttaccgataaccttgaaaagctgaccaaggacgttaccatcgacctgtactactaccttaacgtcgagggcggcaacgacatcccggacgcctgggagtaccgtcttacattcaaggttgtaaacggcgagtggaacgacggcggcaacgctgacatcgtaacttacgttcagttcaaggaccagaaaaccggcgaagcgttcaaagacgaagccgttgtggttccggtcacccgtatcccggccgttggcgacaagccgaactccgactaccatgcgggcgcatgggatacgtccccttacgataattacaaggttcagaaggacaccgtattcacctacacctacgcgaagaacagcagcggcggcagctccggcggccaccaccgcagacctaccgttaccattccggatgatgtaccgaccggtctgaacggtgacgatcactatgcttacatcgtcggctaccccgacaagaccgtccgtccgcagaacggcattacccgtgctgaggtcgcgaccatcttcttccgtctgctgaccgacgagacccgcgacgctaactccaccaagtccaacagctactccgacgtagcagccggtgcatggtacaaccatgccgtttctacgctgagcgctatgggcatcgtgaagggctcgaacggcaagttcaatccgaatgcgccgatcacccgcgctgagtttgcggctatcgcagcccgttttgacgacaaggccaacacgacgactgctgatttcagcgacatcgcgtcccactgggcaaagaacgagatcagcgccgcctccaacaacggctggatcaccggttatcccgacggcaccttccgtccggacaacaagatcacccgtgccgaggcaatgacgctcgtcaaccgcgtcctcaagcgtctccccgagaccgaagaggatctgcacgacgatatgatcaagtggagcgacaactctgacgtttctcagtggttctatctggacgtacaggaggctaccaacagccactactaccagaccaaggagaaccagttcgagaagtggaccaagctgcgcgagacccgcgactggaccgaactggaaaagtaaatttccgctgcatcccccgacctgtgtcgggggatgtttttttgctccctgccgccggtttcttgtacatttttaccgaacttgcacaaaacaggcggctgcccttgtctttcgcggcgctgcggtgtataataacatcattcggcaggacttttctgcccgtaaacaaataaacaagcgaacagacggtgccgctgaacgacctcggccgggtcagcggttaaaagggaaacaggtgcaaatcctgtacgatctcgtcactgtaaacggggagcattccgctttttatgtcactgatgctgtgcatcgggaaggcggcggcgtgcgcagatccgcaagtcaggaaacctgccgcctctgttggtacggaaagcttttccaggtcacgagtcattgactgtactgatgccgcattcttctgcatgattacagtccctttctgcgcacaggcgcagggggactgcgtgttttctgtacccttttcagggcttttccccggtgcgcttgccggaggagtcgaaaaaaggaggaactttttcatgaaactcaagaaactgggcgctctgctgctctccgcaagcctgatgatggcggctctgaccgcctgcggcagcaagccggctgcaaacgacaccgccgaggacaccaagggcgcggatagcgctgcaaccgataccgcggcagacgacgaagaaaactacgaaacgggtgacgcaagcttggataatccgctcaatcaggacgaaatcggcgaaaacgagctgctggtcgtcagcttcggcaccagctacaacgacagccgccgcgagaccatcggcgccatcgaggccgcgatgcagaaggcgttcccggactactcggtccgccgcggcttcaccagccagatcatcatcgaccatgtaaacaagcgtgacggcgagaagatcgacaacgtgaccgaggcgctcgaccgcgcggttgcaaacggcgtcaagaacctcgttgttcagccgacgcatctgatgaacggcctggagtacaccgacctcaagaacgagctggccggctactccgactctttcgagaagatcgcgctcggcgagccgctcctgacctcggacgacgacttccagaaggtcatgaacgcgatcgttgacgctaccaaggagtacgacgacggcgagaccgccatctgcttcatgggccacggcaccgaggcagactccaactccgtctacactaagatgcaggagaccctgaccgcggcaggccacaccaactacttcgtcggcacggttgaggcgactccgtccctcgacgatgtgatcgcggctgtcaaggaaagcggcttcaagaaggtcgtgctgcgtccgctgatgatcgttgccggcgaccacgcgaacaacgacatggcaggcgatgaggacggctcctggaagaccgagttcgagaaggccggcttcgaggtaacgactgttgtagagggtctgggcggtctgaccgacattcagaacctgttcgttgcgcacgcgcaggcggctgttgactcgctcaagtaatctttccataccagatacaggtccggactgcgaaagcgggccggaccttcttttatccgtcaaacacaaggagaaaacaatctatgaacagcaaaaaaacacttctggccgctcttctggcggcgctcatgctcacctccggctgcggcagctccgcctctcagcagcagaccgacaccgccgcgcagaccggcgagaccggcacctcgaatgttgcttctgcgtccgacatggccgaggtcgaggaggtcgtcgaggagggcatgacccccatttccggcgacaaggtcaaggacggcacctataacgttaccgtcaagtccagctccaaaatgttcgacatcactgcgtgcgagctgactgtcgagagcggcaaaatgaccgcgaccatgcacatgggcggcaagggctatctctatgtctacatgggcaccggcgagcaggctgccgcggctgacgaggcggattacatcccgttcaccgagcaggccgacggcacccacagcttcaccgtcccggtcgacgcgctcgatgagggcatcgactgcgccgcattcagcaagaagaaggaaaagtggtacgaccgcaccatcctgttccgcgcggattctctgccgatggatgcctttgccgacggcgttgtcacgacgcccgacagcctgtctctcgcggacggctcctacactgctgacgtcgcgcttgcaggcggctccggccgcgcctccgtccagtctccggccgagctcaccgtcaaggacggcaaggtaacggcgaagatcgtctggagcagcaaaaactacgattacatgaaggtcggcgacacgaaatacgacaccgtcatcgaggacgagcactccaccttcgagatcccggtctcctgctttgactgggcgatggcggtcaaggccgacaccaccgcgatgagcgaagcgcacgagatcgactacacgctgacctttgactcggcctctgtcgcgccgctgagcaaatgaaaagagccgcagcatatctcgctgccgccgcgtgcctgaccggcctgctgagcggctgcggcggcggcgcggccgtctccggagaaaacgatgacccgctctccggtctgacccccgccggctcgatggagctctccttcgccgagcagttcacggtcgataccttcgagggcggtctgtcgctcatcacgatcggcggcgaggaccgctatctcgttgtgcccgagggacagcaggcgccgcagaccggcgcggacattaccgtgcttcagcagccgctcgacagcatctatctcgttgccacgagcgcaatggatttcttcgtttcgctcgacgcgctcgataccatctcgctctccggcacccgcgccgacggctggtatctcgatgcggcgcgcgaggccatgacagacggcgatatcgaatacgccggcaaatacagcgccccggactatgaagccatctgcgacgcggactgcgacctcgcgctcgagtccacgatgatctaccacacgcccaaggtcaaggagcagctcgaacggctcggcatccctgtgctcgtcgagcgctcgagctacgaaagcaatcccctcggccgtatggaatggatcaagctgtacggcgtgctcacaggaaaggaggagcaggcggaggcgctctatgacgagcagctcgacgccctcgctcccatccttgaccggccgtccaccggcaagaccgccgcattcttctatatcacggcgaacggcgcagcaaatgtgcgcaaatccaccgattatgtcgcaaaaatgctcgagcttgccggaggaaagtatatcttcgacgacctcaccgacgacgacgcccgctcgaccatgaatatgcagatggagagcttttacgccggcgcgaaggacgctgatgtgctcatctacaactcgaccatcgacggcgagctgcaaacgctcgacgagctgctcgccaaaagtccgctgctcgcggatttcaaggccgtgaaaaacggaaacgtctggtgcaccgagcagagcctgttccagtccgcgatggggctcggcggcatgatacaggactttcacgccgttttcaccggcgaaaacaccgacgatctgcactatctgcatcagctgacctgaaaaggaggggaaaaccatgcagcctgaccaccgcgcgcgctataccttcggctttgccctgctcgcggcgctgctcgcggcgcttattctctggaacctcaacacaggcagtctgcatctgtccccggccgaggtcatggacatcctgctcacgcgcacgggcgaaaacgccgccatcgtatgggaaatgcgtctgccgcggctgatcgccgccatgctgctcggcggcgcgctgtcgatttcgggctttctgctccagacctttttcgctaaccccatcgcaggcccgttcgtgctcggcatctcctcgggcgcgaagctgaccgtttcgctcgcgatgatcggtctgctctcgcgcggccgcgtgattggctcgaccggcatgatcctcgccgccttctgcggcgcgatgctgtcgatgggcttcgtcctcgcgctcgcgcagcgcgtgcgccagatgtccctgctcatcatcgccggtgtgatggtcggctacatctgctcggcggtcacggatttcgtcgtgaccttcgccgaggacagcaacatcgtcaacctgcacaactggtcacagggcagcttttccggcatttcatgggacaatatctgcgtgatggcgccggtcgtgctgatctcgctcgcgctcgccgtgctgctgtccaagccgatgagcgcctatcagctcggcgagggctgcgcgcgcagcatgggcgtcaatatccgcgccttccgcgccgcgctcattctgctctcgagcgtgctctccgcctgcgtggctgcgttcgccgggccgatctcgttcgtcggcattgcggtcccgcagctgatgaaggggctgttcggcacggcaaagccgctcgtgcaggtaccggcgtgctttgccggcggcgcggtattctgtctgttctgcgatctggccgcgcgcacggtctttgcccccaccgagctcagcatcagctcggtcacggccatcctcggcgcgcccatcgtaatcttcatcatggtgcgccgccgcacacgcacgctgtaaagggggaaaacgcaatggcagaccagcttctccgcgcggagaacatgaccgtcggctacggcggcgtgccgctcatccgcgacatcgcgctgagcgtgtcgggcggcgaaattttaacccttgtcgggccgaacggctcgggcaagtccactatcctcaaaagtctgatccgcgagcttgccctgctcggcggcacggtctatctggacggccgcgacagcagccgtctgtccgccgcagagaccgcgcgcacgctcgccgtcatgatgaccggccgcatcgcgcccgagcgcatgacctgctgggatgtggcggcggcaggccgctatccctataccgggcggctcggcattctcggcgcggaggaccgcgaaaaggtgtgcgaggcgctcgcgctcgtccatgcagaggagcttgcggaccgcgatttcacctgcatcagcgacggacagcggcagcgcgtgctgctcgcgcgcgccatctgccagcagccgcgcgtgctcatcctcgacgagccgacctcgtttctcgacatccgctacaagctcgaactgctgaccattttgaaagatctggtgcgcgagcgcagtgtcgctgtcgtgctgtcgctgcacgagctcgacctcgcgcagaaaatctccgaccgcgtcatctgcgtggcgcacggcgagatcgcccgggtcggtacgcccgaggaggtctttaccgacggcagcgtgcagcgcctgtacggcctgaccgccggcagctatgacgagcgcttcggcagtctggagcttgagccggtgcgcggcgcgccgcaggctcttgtgatcggcggcggcggcagcggcattgcgctctaccgcgcgcttcagcggcacggcatccccttcgccgcaggcgtgctgcacgagaacgacatggatttcccggtcgcgcgcgccctcgcgtgcgagatcgtctccgaacagccctatcagcccatcggggatgcggcgcagagccgtgtgcgggcgctcatgcacgcctgccgctgcgtttacgcgccgctccgtaccttcggcccgatgaatgagggcaaccgcctgctcatcgcagaggccgccgaaaacggctggctggtctctgcaatttcaccaaaaaagccggacgcgacttgaaacagacggcccccttgtgttagaatggatgttatgcaaaggcagacaccatcaaggaatgcagttttatgtcaaaaagcgtaagaaattcaagaaaacagcatagaaatcacggacatcgtgcgtccctgcgccgcacggccgaacccgcgcatatcaagccgcgtcccggcccgactgcgcgcaagcgcaagcgccgccagaacagagcacgccgccgtcagctgctcgtgctgctcatcgcggccgttctcatcgcgctcatcgcggcgctcgtgcatcagccgtccacctcgggcagtacgtccgggacgggcgctgcctccgacgaccgcccgctcgagaccaacatcacccacggcctgatctcggacgccgtcgtggcctaccgcgacgtggtggcggactacgccgagcagaacggtatttcggagtataccgacgtcctgctcgccatcatgcaggtcgagtcgggcggtgagctcgatgacctcatgcagtcctccggctcgctcgagctgccctcggattcgctccagcaggaggcctccatccggcagggatgcagctactttgcgcacctgctgcaccgcgcggagagcgagagctgcgacctcgacaccgtcatccaggcctacaactacggcagcggctttattgattatgtcgccgaacacggcgggaaatatacgctcgagctgtccgaaaagttcgcacagcagcagtcgggcggtgcgaccgtcccctatgacaacccgatcgccgtcaagcgcaacgacggctggcgctatgcctacggcaatatgttctacgcaaagctggtcaatcagcatctcgtaagataaaaagagagtgcaaatcctgtcgaaaaacttcgtttttccgacaagatgtgttctgactgcgcagaacacgagtcgtccgaaagttcccatacggaaactttctccctctaagagtaaaaaaaccgaggcacatgtcctcggtttttttgcgtttgcttcgcaaacgctttttaacgcgcgctgtcgcgcggctactgttttttcgggaacatccggcgtcggacgacaaggtagcatatcatatgcgcgattacggtcaggacccacgagatcgggtaggaaacgtacagcgtgaacagcgtatgatacatacggaacaccgtgaagatccagatgacgcggaacacgcacgcgccgaccatggacacgagcatcggcatgatcgaatagccaaggccgcgcaccacgcccgagccgacatccatcatgccgcacaggaaatacgtcacgctgaccacgctgaagcgctgaatgccgtaggcgatgacctccgggtcctgcgaatagatgtgcagcagcggatcgcccagacggtatgcgccctgtccgagcacgacgccgatgaggatgacgaggatcatgcagcgaacgaggatgccgtccacgcggcggtactgcttcgcgccgaggttctggcttgtgaagctgagcgtggtctggtagagcgagttcatcgagatgtacacaaagccctccacgttcgccgccgccgtgttgcctgcgaccgcaactgcaccgaagctgttgatggacgactgaatgagcacgttagagatgttgaagataacgctctgcataccggcgggcaggccgatcttcatgatctgcgcaaagcgttccggatagaaccgcaggcggcgtatatccagatgacacatgccgtctgagccggtcagacaaagcacggtcagcgtcgcggagacgcactggctgagcacggtcgcgagcgccacgcctgccacgcccatgccgagcacgcacacgaacagcaggtcgcccagcacattcatcacgcctgccgccatcagaaagtacagcggccgccgcgtgtcgcccaccgcacgcagcaccgccgcgccgaagttgtagatcatggtcgcaggcatgccgataaagtacacgcgcatgtacagcaccgcgccctcgatgacctcgtccggggttttcatcagcgtcagcatgggccgcgcgagcacgatgccgagcacgaccagaataacaccgccgaccagaccggtgagcagcgaggtctgcacggtctgctgcacgccgtcatagtttttctcgccgcagtagcgcgccacgagcacgttcgcgcccaccgaaatgccgataaaggcattgatgagcagattgaacagcgaggtcgtcgagccgaccgacgccatcgcattcgcgccggcgaactggccgacaacgacaatatccgtcgcattgaacagcagctggagtacgcccgacagcagcagcggcagcgtgaagatcagtatgctgcgcagcagcggaccgcgcgtcatatccatttcataagattttctcatagcttcctcttttttcacaaaatccggttcacagacgggttttcttcctgttattgcctgccgaatggcagagcaacgcatatcctgtctctattgtagtccttcgccgcatatgctgtcaactgctcttgcaatccgagcggaatggtgatatattattggttagatagagctaaccaaaggagtgtatcatatgtatcagacgactgtcggcgtagacggcatgatgtgcggcatgtgcgaggcgcatgtcaacgatgcggtccgcaaggcttttccggtgaagaaggtcacctcctcccatggcaggggtcagaccgtcatcctctccgagcaggcgctcgacgaacaggcggtgcgcagcgccatcaacgcgaccggctacaccgtaacctcgttccggtgcgttccgcacgagaaaaagggtctgttttccttccttcgccgctaagatcatgcccggccgcgctcttgcctgcgcttcgtctttttcggtgtttttcgtcttttctcttgacaacggacgcgaaaaagactaaaataatttcagttaggccgtgcaaactccccgcctgcacggcctgtttttccgggtattggttagttttaactaacctggttagcaaaatgcaacctgtttttgtgaattctgggcatatgcccctgtctggaggtcctacccttgctggaaacgctgctggactccgccgccggaggttctctgtccggccggctgcgccgcatccccgtgcgcgaaggcgtgcgcgcatgggactttgactgcgcgctgagtctcccctcgtcgctgcccgcggcgaaagaaaaccgatatcagatcctgttctgccgcagcggcgcgctgcggctggagctcgcggtcggcaagcagcttttcctgcatgaacgcgaggtgctcctgctcgcccccggcacggcgctcgtacgcgcctccgttcctgacgggcggctcgccggtgcacttgtcatcgttgaggtatccgaacgcgaccgcctgccgtacaccctcggctcactgctcggcggcctgtcgctcgacaccgcacggctcgaggagcgcctgcacgcacggagcggctgtgcggtcctgcgcggcacgccctggaccgagacggtcttctccgcgctccaaccgcttcaggccgaggaacgcggccgctactgcgcgttcaagaccgccgagctgctctacctgctcagcacggacagtccgctgctgcctctgccgcccgaggcgcccggccgcgaacgctatcaggtcgagctcatgcgtcaggtgcgcgaccatatgctcgcgcatctcgccgaccccctcaccatcagccagctcgccgcacgcttccacatctcccccaccgcgctcaaggactgcttccggcaagcctacggccgtccgctgcatcagtatctgctcgagcaccgcgtgcgccgcgccgccgagctgctgagcgaatccgggctttccatcgtcgaaatcgcctccgccgtcggctacaacagcgcgagccagttcggcgtcgccttcaagcggcgctaccagctcacgccctcgcagttccgccgcatggcgcattcgcagaaggagttgcgtcaggatgcgtaacaagttagcctgaaacaaccgcattttctgcataaaaccgagattttaagcaacatttgtctgttttagatatttttacgtccgtttccagtagacatcgtttttattttgtgataatctttaaaacaaacaaaaaccatgtaaacatacagagctgcggcgctttaccccgttgcctctgcttaatttcattcaggaggaattgcatcatgaaaactctttacaagaatatcgcactgtttgtcggcggctccctgtttggctcggcgggcgtcaagctgctcggcagcaaggacgcaaagaacgcttacacccacgcagccgcagctgtcctgcgcatgaaggactgcgttatgaacaccgttgacaccgtccgcgagaacgcagacgacatcctgcacgctgcaaaggacatcaacgagcagcgcgctgccgaggcagaggctgccgcagcggagatcgaggactgcgcagaggagatcgcagacgagatggctgctgacgctgcaccggccgaggcataatctgcaccaaagtaatcaaaaagggggacgaaatgtccctctttttccatctttccctggttaaatggaggtaactcatcatgaaagcattcattcagcacgagagccgcggtcggctgcgtgtccggatgcaccagtaccgcatgtcgctcgagcaggccgacctgctcgaagcctacctgctcgatcagccgggcgtcaagtccgccgccgtccacgagcgcacctgctgcgcgactgtgtgctacaccggctcccgtgcggagctgctgcacgccatcggccgctttgactaccgctccccggccgttaccgcgctcgcgccgcagcacagcggccgcgcgctcaaccgcgaatatcaggaaaagctcgtgaccatggtcgccgtcaaggctgcctgcacgctgttcctgcccacgccgctccagatcgtccgcacggtctgcatggcggctccgttcctgtgccgcggcctgcgccgcctgctgcgcggtcagctgcgcgtcgaggtgctcgacgccctgtccatcggcgtatccatggcgcgccgcgacttcggcaccgccggttcggtcatgttcctgctccagctcggtgaactgctcgaggaatggacgcacaagaagtcggtcgacgacctcgcgcgcaccatgtcgctcggcgtgagccgcgtatggctccagaaggacggcaccgaagtctcggtcccgctgtcgcagatcgcctccggcgaccgcatcgttgtccgaacgggcagcgtgatcccgttcgacggcgagatcgtttccggcgaggtcgctgtcaatcaggcttcgctcaccggcgagtcggttccggtcatcaagcgccccggcgcgaaggtctttgccggcacggtcatcgaagagggcgactgcgtgatcgaggtcacgcagcaggccggtgaaagccgctacgacaagatcgtttccatgatcgagcagtccgagcagctcaagagcgccgcggagagccgcgcgtcccatctggcggacaagctggtcccctacacgctcgccggcagcgtgctgagctacgcgctcacgcgcaacgtcacccgcgcgctgtccgtgctcatggtcgacttctcctgcgcgctcaagctcgccatgccgctcgcggtgctgtccgcgatgcgcgaggcgagcacctatcatgtcaccgtcaagggcggcaagttcctcgaggcgctgtccgaggcggacaccatcgtctttgacaagaccggcacgctgacccacgcctgcccggtcgttgcggacgtcatcccgttcggcggccgcgaggcgaacgaaatgctgcgcgtcgctgcctgcctcgaggagcacttcccgcactctatggcgaacgccgtcgtccgcgccgcgaaggaccgcagtctggcgcacgaggaaatgcactccgaggtgcagtacatcgtcgcgcacggcatttcgagcacggtgaacggcgaaaaggtcgtcatcggctcggcgcatttcgtctttgaggacgagtcctgcaccatccccgagggcgaaaaggagcgctttgacgccctcgacccggcatattctcacctgtacctcgccgtcggcggcgagctcgcggccgttatctgcatctccgatccgctgcgcgaggaggcctgcgcggtcatgagatcgctgcgcgccctcggcatcaagcgcacggtcatgctcaccggcgacagcgaacgcaccgcaaaggcgattgctgagcaggtcggtgtggacgattaccgcgcggaggtcctgccggaggacaaggccagcttcgtcgaggccgagcgcagagccggccgcacggtcatcatgatcggcgacggcatcaacgactctcctgcgctgtcggcagcgaacgtcggcatcgccatcagcgacggcgctgccatcgcgcgcgagatcgcggacgtcaccatcgcggcggaaagcctgttcgagctggtcgcgctgcgccgcatcgcacagcacctcatgcgccgcatccacgcaaactaccgcttcgtgatcggcttcaacggctcgctcatcggtctgggcgttgcgggcatcctcatgccggcgacctctgcgatgctgcacaatctttccaccgttgccatcagcctgcgcagcatgaccaacctcatgcctgccggcgatgcggaaaagccggtaaaataagctgccgcaaaaccgcaaaacgctgcacagaatgttatctgtgcagcgtttttttcagtctgttaagaaatctgttttcgtggaaaaacagcagccgcgcggcagcgcgcgttaaaaagcgtttgcatggcaaacgcgaaaaaaccggggacatgtgcctcggttttttcactttaagagggagaaagtttccgcatgggaactttcggacgactcgtgttctgcgcagtcagaacacagattgtcggcgaaacgtcagtttcgcgacagtcttgcagaccaaaaccgcaccctttcgggtgcggtctggtaaagaagagagagagtttttcggatttaaggttaaatttcacagagaaaaggtgatgtcaaatcaagaatgataggatatgtgcctcaagctcttccgttgagcttttcgagatacggcacaatatctgcgatcttttcgaccacatgatcgggctgccatacgctgtccacgccctcgtccttctgcgaggagaggaaggagcggatctgaatggcggcgccgaagtgcatgcgcttcgcgccgatgacatcgcgggagagcgtgtctccgacataggcgcattcctcagccttcgccttcatctcgcgcagcgcgatctggaaaatgcccggatgcggcttgcggtagccggtgacgctcgaaagcgtgacgtcctcaaaatagtcgcggatgccgtaggcctccagcacatcgaataccgaatacagcgaagcggtgttcgagatgacgcccaggcggtatcccttgtttttcagttcctcgagcgcctccttgacgcccgggcgcagctcgcgatggtaataggtgacctcccacaggccagccatatcctcagcgtagcgtgcgactttttccttgtccagatcgaactcggacaggtaatactgcggccagatctcctcaggcttgagctcgagcgcgttgccctcgctccactgtttatacctgcggataccgttgttgatcttgttccagaagcagatttcgttactgccggtgaccatatcgtgctcctgcaggaaggtcagcagcttgcgtgttacgtcctgaatggtctggtcattgtaccagatatcctcgagagtgcctcccatatcaaataatacggtattaatcaaagcaactcctccttatttgtgtaattgcagagatgcccatacaacattatggtcgctcagctcgggctcggcgaaacgtgccagcgcgccgccctctttcgcgaaatcgatgtccgccgtaacggtcgagatcacacggctgtcctttgcggtaaagccgcgcggaatgatccagtccagacgcatcgcgaggaaatttccctcgccgaccggcttgcggcgcgtcaggcggccgtcgccggatgccgtcctccatgcgtagcctgcgtcgccgcaggccgtcaggagcggctcagaagaatcgatttttacaatattgtcggcaagctctgccggatgatccgccagatgacggatatagtctttgtctcgtccgtcgaatgtgttggtattcaggtcgccgcccagaatgaccggcagaccggcaaacacccgctgcacctcgtccagcaccgcctgcatctgcaccctgcggccctcgccgtccgtccggttctccagatggatggacgcgacgccgacctctctgccgtgcacatcgagcttcgcaaggatggcgcagcggccgccgatgcgtttctggcggtcattgtaccagttgtactgctcgggcaggcggagcacctccgcccacttgacgggccagcgcgagaacacggcgtttccatggaagccgagcgcggcatccttgagttcgatgaactccagcccgaacacatagctcagaccaagcgccttcgcgacttcctctgcggtattcttttcgccggaccgtgcagcgccgaaatcaagctcgttggcgagaatgagatcaaagggctgaagcgacggattatctttcagaaactcgatcgcctcgtcgatatgcacgccgcgctccatgttgaacaccatcgcgtgcacctctgcacacgcgggcggttccgaagcccaggtatcgacgatgtcggcctcggagaactgcgcgatgtcgcgcatgacgctctcctgcgtttcctgctccagacgagccgcaaaacgggccgtctgttctttttccagtttaatcattgaattccccccgcaccatcagcggcgcaggccgtctttgctgcgcagcttgaagtagatcgtccatgctgcgagattgccgatgagaatcggcagcagcgtataaagaagggtgacatagaccatcatgccgcggagatccgcctcgagctgcgtcgatgcaaccagacacatgatcgtgatgaccggcaggcctgcgaagctgtacggcacgatgcgcttatcgggcagcaggaacagcacgcagcagactgcggtgccgatgactgcgataatcaggcagtgcagcacggtctccggcattccgccgccaagcggaagcaggctgtgaagcggctcggtcagaagcgcatatgcgccgccgaacacgagacagaacagcaggtcaacaaagaaaacagtcactgccatcgggcttttgcgttttccttccttcgtcagaaacagcgacataacaggtattctcccctcttatctcgttgcggcggggttttcaagccccgccgcgtcagagatcaaaacatgcgatgaaaaatttcagatgcgtttatcagcccagaagagtccagaaatcgcggacagggttgatgttttcgtaaatatcggtaacgttaaagtcggatacgtgcagctcggagtacggggtggaaccctctgccggctcgatgtcgtcgcgtaccggccagccgccgagcgtgttgaagtacttgtagccggacacgtcgccgtcaacgccgcccatcatgaagcggatgaacagcttggctgcgttcggatgctcgcactcgcctactacatacagggtgttgatagccgggataccggtggtcggctcaaggtttaccggagccaggcaccagccgttgtcctcgttcttgcggagcttggaggatgcgcagaagcctaccggcgggttggtctgacccttggtgccgacggactcagcgatttcgtcagaagaagaagtgaagatcggctcgttgtcgtgcagacgcttcaggaactcatagcctgcgttctcgcagccgtcggacagctcaagatccttgccgtacagctccttgtaggaggctgccagctgatccggaacatcgcctacgcagaagccggtgatccaggagccccatgccaggttgtccagcgggttctgcatcagaacgcggcccttccaatcgggctcggtcagctgccagatgttggtgatcggggagccgtccggatttgcttccgcattgtagaacagctgagtcagctcgatgtagagcggagtctgggtcgaggtgaacttctcatcgatatgggacaggatgtcagccggcttgtagttgtagaacttgcgggcggtgacatactcgttgtagagcgtaccgtcctgatccttgatatggacaacgtcggcaacgtgctggcctgcgtcgtactcacgggtgaccttctcgagcagctcgttggtggagatgtcgaacggctcaacctcgacgtcggggtacttctcagcgaaggccttggctaccttggtgatacgggaagagatcgagtaaaccgttaccttgccctcctcctttgccttctcgtacagctcttcgtcggtctcgtcggtgttgaagatgccggaggacttctcccagtcggtcagctccagggtgcctgctgctgccgctgcgttcgggtcctgcgggccctcagctacatcgccgtccttctgagaaccgccgcctccgcatgctgccatcgaaagcatcatcgttgcagccaggatacctgccagtgtgcgtttgtgctttaacatagtgttttcctcctctttattccttctttactcttttgggggcggatcagagttttccgcccccctttatccgataagcggctcttttccgcttataccgaatacttaatgagtttcgtggacttcttgtcgaatacgttgatcttgttcaggtcgatggacagataaacgacctgatccgggttgtaatgcgtgatgccgagggccttgatgacgagggatacgccgccgaccttgacggtgacgagggtctcggagcctgccggcatggaggtgtagatatgcgcctcgatgtccgagggagactgacgggtggtgttgatggcgatctgctcggggcggatgccgaggactgcgtcgaagctcttttccttcggcagcatgtcggtgaggtccttcttcgggaataccatcttgccgagcgggctgctaacggtcatgccgtccgggccgacctcagccttgccgtctgcgaagttgatggacgggttgccgatgaagtctgcgacatacaggttgaccgggttgttgtacagctcgagcggaggagcgacctgaatgatgacgccttccttgaagatggcgatcttggtggacatggtcagcgcctcgacctggtcatgggttacatagatcatggtcgtgccggtctcgatatgcaggcgcttcagctcggagcgcatgtctacgcggagctttgcgtcgaggttggaaagcggctcgtccatcagcagcagatgcggctcggaagcgatcgcacgagcgattgcaacgcgctgctgctggccgccggacagctcggacggatagcggtcgacgtactggccgatctgcatgcgggcgagtgcgtcctcgatgcggcggttgacctcgtccttgggcagcttctgaatgttcaggccgaaggcgatgttctcgcgcacggtcatgtgcggccacagagcgtaggactggaaaaccaggttgaggtcgcgctcgctcgggggagcgaagtgagcctcggcagcgtttacgatctccttgccgttcatgaggatggtgccgttctgcggcttctccagaccggatacaacgcgcagcgtggtggttttgccgcagccggaaggaccgagcagcgtcatgaagtcgccgtcctcgatggtgaggttaacgtccttcaggatgtggtttttgccgtagtatttatcaacatgctttaattcaattttgctcattacccaaactcctttttcatttcatccggggggttctcttgttccgatgcggtatcagccgcccatgctcttggcgaggtctgcgtcgccgaagatgttggccagagcgtaaaccaggaatacgatggagaacatgacgattgctacgcagtcagaagcctgcggagagttactgttctgatactggaatgccaagtacggcagagtggaggtcttcggggtcatcaggaggatgatcaggtcgagttccttcatgatagaaacgaagatcagcatgaagccggagataaagccgcccttggaaagcgggaatacgatgcgaacgaagcgcttgaagaagcctgcgcctgcgatttcagctgcctcctcgagctcgccgccgatctgcagcatgtttgcggtacctgcacgggatgcaaacggcagatgcttgacaacagaggtgacggtcagcagtgcgaaggtgccgtacagggacggaaccagggtaacgccgccgatggtctgcggggtggagaacatggagaggaagatgccgccgaatgcgatggacggaatcagatacgggatgaataccagctgctcaacaatctggccgtgcagcttgccgcggcccttcgcgcagatataaccgatgatctggccgaagatggtgccgaatacgccgttgacgaaggtgagcttgagggagttgatgagagagttgatgaagttctcattcttgaagatacccggctggccttccatgacgttcgcgatcggatcgccgatccagtaatgcagcgtgaggttggacagagagtagtcgccctgacggagcatgaaggactcgaggatgagcagcgcgatcggcatgatgataccgaagatgaagaacacgatcaggaccagagtgatgatcggcttgtgcttgccgaggcgaagcggagtggaacggccgcccttgccgccgatggtggcgtaggacttgcgcgaaccgatgagcttctggttgacgaagaccgaaatcgacgcgaggcagatcatgatgagtgccattgcgaacgcggtctgggtgttctgggacttgctgttcatgtacagctggctggacagggtaacgaagtttaccttggagcctaagtagttgataacgccgaaggtaccgatggccttggagaaggtcaggatgatcgccgacagcatggacggaagtacgagcggaagggtgatcttgcgcaggatggtcgccttgccggcgccctgaatctcgcccatttcctcaagctcggagttgatcgagttgagcgctgcggatacgagcaggtacgcatatgcgtaatagtggagcgagagcaccgcgatgatcgcgaccgggccgtaagccagccagtcgggaacgttgatgcccatgctcatcaggaagcccggggcaccgccgatacgctcggtcttgaacatggtcagccatgcctgagacttacaccagctggggatcatgtacgggatgataacagccagcgagaagaacggtttgaacggaagatcggtacgaaccatcagccatgcgaggaccgagccgatcatgatagcgaagaacgatacgcagacgccgatcagcagcgagttgagcagcggctggagcagcatctgcttggtcagcgagctgccgagcagtcgctgccagtagtacaatgtaaagtcgccagcggcgccgcctgcgaggcgggcatccttctgagcgagggtgaacgaggtggagatcatgtccagcagcgggagcacgatcaggtaagtcagcagcacgatcgcgatcagcacgatcacgttgtaggggttggtaacaaccgccttaatctggtttttcagacgtctggacttggaatagttctgatcctttggtttcattctatcaagttccctccttcagcttacgattaaattcttccacagccgggaggatctcggcgagcgtcttgatctcgacgtcggccttgtatcccatgccgcggtatttttcgtctttgtgatagatgcgggggttatcgatctggatcatcagaggccatccggcattgctgatgccgcgaacgtcgcgcgagatcgtgtctcccacatacgcggcctcctccttcgggatgcccatttccttcagcgcaatgtcgaaaatgtcagctctcggctttcggattccgcatacgctgctcattgtcagtgtttcgaaatactgtctgacgccgtgctcctcaaggatgcgcggtacaaacgtggtgctcatgatgttggagatgacgccgagacggtatcctgcgtccttcagaccttttaatgtctcctccaggccctcgcgctttacgatgtgcttgcgccagcggtcgaacatgtagcaaaggtcttcgccgagtccggcgagcttttctgcggggatgtggaagtcggccaggaagaattcctgccagatccggtcggccggtatctcgatcagctcttcttccgtatatgccttgtacgcctttgcacctttattaatgtgctccagcagctcgtcgggggtgtccgctgtgcggatgccgtgctcctccagatacctccagaggcgctccttatagtcccggtcactttccggcgtggcgtcctgtgtgtgtaccgtgccgccgatgtcgaagaaaaccgctttaatcataacagctcccctttttcctttttctttcatactcttgtggtcagtgcttttactcttttacgaaaatttttacgcaaacgttttcgttccatgtccataccctaccaccatctcgccccgttgtcaatagaaatccttcatcttttccatttttcatgaaaacctcccccagtattttgtgattattgcacagttgtatttttgtttttcatacgctatactgtaatcaacgcaaacgtttccgtagtaattcgaaaagagtgattgctatgaaatacgatcttatgttgatcggacccgcaacaagagacgtcaacatcgactacaccggcaaagaagtccacgaaatcggcggcgccgttttcttctgcgccgcagcagccaaggcggctggcgcaaaccttttcgcttcggttaagatccatccgaacgacaccgatatcattgatgcgttcaagctggacagcgaccacgtcgctatcctgccgagcgaaaccaccacgctcatgcagaacacctacttcaccgccgaccgcgagcgccgcaaggcggaatgcctcgcccagtccggccccatcacgccggatcagatccccgaggtcgactgcggcctgtatcatctggcaggtctgctgtacggtgatttcccgaacgagctgatcgtcgagctgaaaaagcgcggcaaggtctccgcagatatccagggcttcctccgtcataacgagggcggcctgatgaacttccacgactggtcggacaagctcgaatatctgaaatacttcgatttcctcaagaccgacgccgcagaggccgagatcctcaccggtctgaccgaccgccgcgaggctgcaaagcagctgtatgcgtggggcgcaaaggaaatcctcatctcccacaacagcgaaatgctcgtctatgacggcaaggacttcttcacctgcccggtcaaggcgcgcaacctctccggccgcaccggacgcggcgacaccaccttcggcgcctaccttgcaaagcgcatgaccggcagcccgatcgcggaggctctgctcttcgctaccgcagcggtttccctgaagatggaagcgcccggcccgctctccgcatccgaggccgacatccagaagtatatcgacgaattctacgcctgatttcatatgaattcgaccatcactttttacaaaaaacactaaaatcccagcgtgaacggcttaatcccttgtctttcacctgcaaatacgctatcattatggcagtaccctgatactgccgaagagacggaggcaacgggtatggaacgatccgtaagatcaaggaaggaagctgcaagccatatgcgccacgtaaccattaaagatatcgcccgcattgccggcgtctccacttcgaccgtatcccgcgccctcagcggctccaaggagctgagcgaggcaacgcgcgagcggatcgtaaagatctgcaacgaacagggctatcgcgttaacgcgctcgcgcgcagtctcatccgcagccgtaccaacgtaatcggtctcatcgttcccgaggtgaccaatcctttttatgccgaggtttcgctcggcatcgaaacgcacgcccgccagctgggctataatgtcatgctgtgcaacagccagcaggacaccaagaccaccgaggagctgttcggctttctcaccagccaccaggtggacggcattattctcgccaattcccacagcgacgcgccccgctggatccagcagttcgcgccgcatcttccgaccgtgctcctcggcacgcccgcctctctgagcggcgacgaggtcaactcggtctgcgtcgacaatctggcaggcggccgccttgcggcggaatacctgctgtcgctcggccaccggagcatcgcctatctcggccaccgttccggcagcctgacccatcagctgcgcctgcgcggctttatggaggtgctcgggaaggaaggccttacgcctaccgtcatcgagaacaccgcagactcctcttccatcggcgccggctatgagctgagccgcaagctgttcaacgagggctgcccccataccgccattttcgccgcgaccgactcgctcgccctcggcgccatgcaggcggccgacgagttcggcatttccatcccggacgacctttcgcttcttggcttcgacaatatcatctattcgtccctgcccaagatcaccctgtccaccatcgaccagagaaagtctctgctcgcagaggctgcggtcgatatcctcacccagatcatcgagtccgatgaacgggatgagttcacccaccgcatgatccgcccggcgctcatccgccgctcttcatgcgcatccatcgtcgactgagcgagagcagactcgcacggcacaggacgaacttcacacactcgtctctttctcacacactcacttcacacaccatatgctgccgtgcgcccctgcaaccgctttttctgaaccataccaactttttgaacagctcgccccgaccggcaacggttcaaaagaacacaagctgccgttcctgcggcagcctttgttttgccgcaaaagcgctgttcgctcccggaaaaggagagataatcatgtacaaaatcgaaacgcacctccacacgacctatatttcccactgcggctggctcggcgcacaggccatcatgaaggcgtattccgccgccggctacgatgccatctgcgtgaccgaccactacaaccgtgataccttcgactacatcgaaatggacctgtccaccccgggcagcaagacccgcgacttcctgctcggctaccaccgtctcaagcgcgagggtgaaaagtacggcatccgtgtttatgcgggcgcagagctgcgctttgacggctctcagaacgactacctgctgtacggcttccatgacgagctgctggccgacccggagcacgtcatgagcgagggtctggaggcgttcgcgcccaagtaccgcgcggacggtgcgctgctcattcaggcgcatcccttccgcaacaagtgcaccccggcgcccgccgagctgctcgacggcgtcgaggtcctcaatctcaatccgcgccacgacagccacaatgaccttgcgctcgcttacgccgaggagcatcatctgctcatgaccgccggttcggactgccatcgccccggcgacgagggcacgaccggcatccttgccgaaaccctccccgaggacagcttcggctacgccgacctcatccgttcgggtaaatataccatcatccgtcccgaataacgactccttctattccttttcatctatatcactcgctgaggacgggccgcagaacccgtcctcagtctgtcgcggaaccagcgtttcgccgacaggctgtgttctgaatatgcacgaaaaagccttcccgtttttgccgggaaggcttgatttttgcatcttatcggatagttctggtcaaaagcgcgacggtctcgacggtattccctttat

SEQ ID NO: 12847 - DNA, 54054 bp, Unknown
  gut microbiota DNA sequence
tgtactcttggagcaccaaacgtccctgtgggcccctcgcatttagacgcgcgaccgaagggagtcgcgtcctaaggaaggttaggggagtcaagaggggacaggaaaccatgtttggtgtcctgtccccttttgtctctgccgggagaccccggcatccccggccgccgaaggcggccactgtgcgcacgctcaccttgagcgtaaagtcgcctccagcggcaagccgctgtatcggcggaaccgcttaccctctgctgagggtaaagaaagaagaacgctcatcgcctccgacggcgaaaattaagcctttttcgcctgcctccgctccacagcggatttcacgatcagtatgccgatcagacacacaacacccatcagcacaatggttccgccgggcttcagtccgccgtagtatgcaatgacgagtccggaaatggtgaacagctcggcaaagccgatggaggcccagaccgtgccgcggtagctcctcgcaagctgcatcgcgcacgcaacgggaaggaccatcatgctcgatacgatgagcgcaccgaccgttcgcgcggcgatcgcgaccgtgactgcggtgagcatggtaaaaatcgtggagacgacattaaccggcacgcccgaaagccttgcggcgcgctcgtcgagtgcgatggagaacagctccttataaagcagcacgctcgcaagcagcacgagcaggctgaccgccgcgacgctgtacagctccgcatcgctgatcgcgacgatcgagccgaacaggaagctgttgaagttcgcagcgttcttcgtgaagccggacagcacgccggcgagaccgacgcccgccgacagcatgaccgagatggaaagctcagcgtagcgggggaacctgcggcggatgccttcaatgccgaacgccgcgccgacgcagaagaccgacgcgccgaacaccgggttgacattcagcagcagaccggccgcgacgccggcgagcgaggtgtggctgagtgcgtcaccgagcatggacaggcggcgcagcacgaccgtcacgccgatgagcggtataatgagcgcgagcagtacgccgacgataaacgcgcgctgcatgaacgcatattcaaacatttccatggctgcctcctgtgtgggtgtgatggtgcgcgagctcgtcgaggatctcgtcgggcgtgagcgcgtcgaccgtgccgtcctccagacggagcacgccggtcacgtcgtgcgcgacggcgcggatgtcgtgggtgacgagcaggacggtgatgccggtctcgcggttgagtcggtgcagcagctcgcggaatgcggcggcgttctgtgcgtctacgccggtcattggctcgtcaagaatgagcagcgacggctgtccggcgagcgcacgcgcgagcagcacgcgctgtctctgaccgcccgacaggtcgccgatggggcgcttttcaaagccgtccatgccgacgagcgagagcgcgcggacgatctcctttcgatgggaggcgtttgcgaagcggaacagaccgatcttcttgtacaggccggcgctcacgacttcgctgaccgaggcagggaagtcggcgtaaccggcctgcgtgccctgcggcacatagccgatgcgcggccagtcgcggaacgagcggatcggctgaccgagcagggaaagagcgccggacgtcggcgtcagctcgccgagcagcagcttgagcagggtggatttaccggcgccgttcgcgccgatcagagcggtatacgagccttccggaacggaaaagctgacgttttcgagcacggggagcgtgccgtaggagaaggagagattgtgcgactcgattgcggttctggtttccattttacttcagcgcctccatcagtgcggcaaggttgtcgtgcatgaccgaaaaataatcggctccggcagcggcctgctcatcggaaagtccctcgagcggactgagcatctttgcctgtgcgccggtctcggacgcgatggcctcggcgaccttgggcgagaccagctcctcgaagaagatggtcgagatgctgtgttcacggacgaagtcgatgacctccgccatgcggccggggtccggctcggagtcgggggacaggccctcgatgccgacctgcgtcagaccgtaggcatcgcagagatagccgaacgcctcgtgcgcgacgacaatggtgcggttcggcaggggagagagcgtgtcgctgtattccttgtcgagcgcgtccagctcggcggcgtatttttcataatttgactgaaaaacggtggagttttccggatctgccgcgcagagcgcgtccttgatcgcctccatctcgatcttggcgttctcggggtcgagccagacgtgcggatcgaaatcaccgtgatgatggtcggcgccctcgtgctcgtgggcgtgctcatgctcgccgtcagtcgtccgcagctcaacgttctcggacgcctcgaccacacggagcgtatcgctgcggctgacgagcagatcgtccgcccacggctccatatccgcgccattatagatgaaaacgtcggccttttcgaggtttttgaggtcgttggtggacggctcccagtcgtgcggctcggtgccggaggggaccatgttggtgacgtcgatgcagtcgccgccgatcttgcaggcaaagtcgtacatggggtagaagctcgtcagcacgcgcagacggccgtcgcccgcggcggtgtccgacggctgcgcgccgcagccggtgagcagagagagtgaaagcgtgcccgcacacgcgagcgcgaggattcttttaatgttcatggcagcagcctcctttgcaggtgtggtcactgtgctcgatgccgtcggcgcatttggcgcacaggccgtacagcacggtgcgcgagggctcgatgcggaagccgtgcgcgccttcgaggtgctgcgacagttcatcgagcatatggcattcgagcgggcgggtcgcgccgcactgaaggcagacgagcttgccgtgcgcggcggtctcggggcggccgacatagcagtagcgcgcgctcgagcggtccacggaggggaccttggagacgacgccgtccgcgacgaggcgctctacggtgcggtaaacggtggactggccgaccgaaatgccgtcctgcgtcagccgcaggcggatctcatcaacggtcagaaactgctcctcctgctcctggagcagggcgaggatgctgtccttttgtctggtatggtactgcatatatcgtatcctccgaaaagaataaaattgaaactgattttcattttgatttatatcatacgctttacaaagcgttttgtcaagggggagaaatacagcattttcgtcaaaaacgtataaatacctgcgattcgcttgcctgcaagggggagagtgtggtatactataggataattgggctttgcggtgcgaaacgggcatccgttcgacgcgccgtgctgcaaggaggagaagctgcactatgataattacctgtccgcattgtcaggccgagcatgactataaggtcaccgaccatatcaatatcgaccgaaatcccgagctgcgggcaaaggtgcaggatctttcctgcttccggatcaaatgcccaaactgtggggagaccgcgctcgcggtgcatccctgtctgtatcatgacatgtcgaaccagttcatggtctggctgtggccggagcaggacaaggcgccgaaggcggagttcgacccgctcgcaggctacagactgcgcatcgtggacagcctcaacggcttccgcgagaagatctctattctcgagcacggtctggacgaccgcaccatcgagatcatgaagctgctgctgttctcgcagctcaaccgcgatctggatgtggtcgagctgctgttccacgaatacgacgagcgcacgggcgatttccgctttgtcgcggtcctgtcggacggcgcggagcagtatgccgccatgcccggcgcggcgtaccagcgtctgcatgaggatgtggacgcatacctgtatacgcccggcggcgagtttgcgcgcatcgatatgcagtgggcgcagcaggcgctggagctgctgcacgagctggggtaagactgccgcacgaaaatagagcgttatcggcaaaaaaaataaaccggcgtttgccggtttatccgaagagcagctgtgtgacggtaccgccgacggcggcgaggacgaaggtcgccagaatgaccggcgcggctctgcggcggccctgcttttcgccgaggagcacgatatagccgaagcctgcaccggtcgacagaccggcgaccagtgcgccgaagctgatcgtgccgctgacgtaaagctcgcttaaaagcacgctcatcgcgcagctcggcaccagcccgagcaccgcgcacagcagcggctgaaaaatgctgccgccgagcaggacggaggcgagtctgtcctcgccgactgcgaacagcacgagatccagcgcgagcagcaccgcgaacaggaagagcgaggtcttgagcgtatggccgaggatattcggcagcggctcaccgcagccgcaggcgttcagctcgatctcgagcggctcgtcgagctttacctcgcgcctgcggaacacggtacagcgcagcaggtagccgccgagtgcggcaagaacgaacttgacgatgagcagcgcgaggatgtttttcgcggacgcgccgcctgccagcatcacgggcacggcctcgtccgaggtcgcgaggaatactgcgacgagcgttgccggggcgagatagccggcggaaaacagtgcgctcgcggcggcggaaaagccgcattgcggaatgctgccggccagagcgccgaccgccggtccgaactgcgccgtgcgcgagagcagggcgggcgtgtcggtcagccggttttcgatataatagagcagtgcgtagacgagaagcagcaggggaacggttttcagaacatcgaaaaacgcatcctgcgcggtcgaaagtacagcagtcatgtcatttttacctcttcattcagattgccgtctctgcggcggcagaactcagtataccacatccctgccgttttctgcaatcgggatttgcagcgtgcggccggattttcaagaaggaaacgatatatttttatgaaattcaaagaactgaaactgaacaagaatatcctcaaggcgcttgcggaggccggctatgaacagccgactcccatccaggagcagtctatcccgtctgttctcgaggggcgcgatctgctcggctgcgcacagaccggcacgggcaagacctgcgcgttctccgtgccgatcatccagcgtctggacgaggacgcgggccgcggcatccgtgcgctcatcctcaccccgacgcgcgagcttgcgctccagatctacgagaacgtctgccagtatgcgcgctatatgccggtgacggcggcggtcatcttcggcggcgtttcgcaggtgccgcaggtcgaggcaatcgagcgcggcgcggacatcctcatcgcgacgccgggccgcctgtgggacctcatgggtcagaagatcgtcaagctgaacaaggtcgagaccttcgtcctcgacgaggccgaccgcatgctcgacatgggctttttcccggacgtcaagcgcatcgtaaagcagctcccggccaagcgccagacgctgctgttctccgcgacgatcccgaacgagatcgccgaccttgcggagagcatgctcaaaaaaccggtcaagatatcggtcacgccgtccgcgcgtccggtcgagaagatcgagcagcaggtctacttcgttgagaaggcggagaagcgcacgctgctgcccgagatcatccgcagggcgaacgtgcatcagacgctcgtctttacccgcaccaagcacggcgcggaccgcgtcgcgcgcgacctcaaccgcgcgggcatcctgacgcgctctattcacggcgacaagtcgcagaaccagcgtcagcgtgcgctctccgacttcaaggaatgcaagatcgcggtgctcgtggcgaccgacatcgccgcgcgcggcatcgacatcagcgagctgccgctcgtcatcaacttcgatctgccgaacatcccggagacctatgtgcaccgcatcggccgcaccggcagagcagggcaggagggtacggcgatttcgttctgcgacaagtccgagcgtccgtacctcgcggatatcgaaaagctgaccggcatccgcattccggtcgcgggcgaaattccgcacgacgagtccaaggacaaggagaagctcgaccgtcagcgccgcacctccaaggcgtccaaccgccgccgcgatacgacgagcgaaaatgcgtctgcggaggcggtagccgaggaggccgagcgcgagaagcaggcaaagcgcaaggcgcgcacggcgcgcgcagcggcatccggcaaaaagccgcgccgcgaaaaggaacaggtgaaaaagcaggagcagcaggcgaagtcggccgcaccccgtgcgtcccgttcctcgcaccgccgccgcgatccgtatgcacgcttcgagaagaacgagccgcgctttgacgcgcacacgccctcgcgcgcttatgcgctgagcgacgaggcctccgagcgcatccgacagaaggtcgaggccgcactcgcagcgcgcaatgagcgcctgctgaacggcgataaggccgagaacaagccgaagaagagcgcaagaggcggccgcagcggcagaaacggccgcggcgcgcacagcaagcacccggcacaggaggcacaggcaaagacggcggatgcaaagcctgccgcaccgcgccgccatcatcgccgccgcacgccgaaaaagccgcagcagcagaagtgaggggacttcgcagctgagacaaacagagagaacggccgccgggagggagagaaccggcggaatcggtagagataaatacgaaagggacgatttgggaccatgaacggcgcaaaacaccgcttttccctgattttgacctgtctgctgctgacgggtctgaccgtcgtctatccatttctgctgtatacggacaatgccttcgtgaccaagtggcgcgaatggtacatcgagacggcaatgggtacgatgactcatcagtggctcgccacgagctttattccgcacgacatgatcgaaaaggtcatgaccaagcgctatctgatgaaccagaagcaggccggcgcggagagcttctgggacttcacgctcgatacggacggcgaggagcaggccatcagtccgaaggccagattctacaagctgtacagcgagctggacgagaccgagttcgagagcttcctcgacaaaaatccggacatcaaggaacagggctacgaggcctttgagttcgatttcatcggtgacgcgaccaggaagggctacgacaccggcctcaagaccagacagggcgacccggtgttggcgctcgatgtgaagcacggcatccttatcgttgaacagacgggcgaggacgcgctcggactggaatatgcaggcaagctcgcgctctgcaaaaagccggaaaacgtctatgtcggcacctgcgagggtctcggcgactacggctcatatgtttccgaaattgcggaccggtacagcgcaacgctcggcatcaacgcctccggctttgcggattacgagggcaacggcacgggcggtctgccatacggcttcctcaagagcgagggcaccgagctgcagggcgcggtcggcaacggctggaagatcatcggctttgacgagagcaatcatcttcaggtcggtgagttctcggacacgagcgggctgcgcgacgcggtcgagttccatccggcgctcatcatcaacggccagaaccttgtggcaggtacgggtctgaacgatcagcagccgcgcaccgccatcggtcaggccaaggacggcacggtgctcatgctcgtcatcgacggccgtcagttccactcgttcggcgtttcgatcgagcgctgcggcgagatcatgggcgagtacggcgcgtatcaggcgtccatgctggacggcggctcgtcctcggtcatggtctacaagggccgcgagatcacgagtccgaccacactctcgcagaatgaagagggcagaaccctgccggacgcattcctcatcaagtgagaataaaaagagaaaagaaaacggctcccggtgaaaaaactcaccgggagccgtttgtgttattgatgcagtttattgtacagacgctccatcgtaacgagcgcctgctcgccggtatagccgccggcaggatggaaggcgttgttctcctcgcccttcatgatgccgatctcgcgcatcgcataaatgctgtcgcgcgaccacgcgccgaactgcgcgtcatccgcataccgttcgcggctttccgcggtctgcgtgccgccgaggattttgtaaaggcgattcagcatggctgccgcctcctcgcgcgtgatggtcgcaaaggggcggaacgtgccgtcctcgtagccggtgacgatgccgagtgcggcggcaagccggacgttctcatcgtcgcagtcgctgtacggcgtttcgtccggtgcagcctgtccgtccggcgtgagcacgcggtacagctgcaccgcctgtgcggcgaagtccacgcgcgtgatgtccagacgcggatagtgatagtttacaagggacagaccgtgtttgccggcgctgtccacctcggcggtcgtccatgcgctgtactggtccaggtttttcggcagggcggtctcgccgccatcgggcgcgatcagatagaacttgtcgccgcgtttgccgatgatgcgcgtgtagttccactggatgccgtcaaaatcgttcgcgctgacgaatttgccggtcgtatcgatcagaccatatttgccgttgccgtatgcgccgtacttgatcgagccgtcccacagcgtgctgccggtctgaatagccatcaggccgtcatggaatgtcggaggcgtgaccataatgccgccgtccagatcgccgcgcacgacgttcatgtcgctgtcgagcagtctgtactggagcacatcgtactgcgtaacggtaggctcttcatagaagatcacgtcgcggaccggctttttctcgtagaccgcgagaatgtacattccctcaccggcggagcagatcatggagccaggaagacccgacgccgccacggtgaggtttccctcggtgtcggagaaccagcagtcgagcgtgttcggctcctgtccgctttttgtcaggagaaaggtatcgttttccagccgttcgaccgtatcgtattcgggcggtacgatgacctttccggtctgcatgttgatgattccgtggttatggcgtgaaacgtctaccgaaaaatacagctcatacaggtttttctccggcataagcgaataaatcgacgcataatagtcatcggttttgtcataagcgtaagtatcgcccgtctgccactgctgctgaagatgcgtcacagctgtttcgagcagcgcgtcccggtctgcggtatccgctgcgcccgcgcatacggccatgcttccggcgaccagcgccgccgcgagaaaataacgaagtctgctcataagttttcctccttttattgtacggtttctgcctacagtataccatagaaaactacagtataccatagaaaagagaaaacagcggcagaaatataaaaatgaggctgtcggaaaagcatagccttccgacagcctcaatacattctggagcaaggtacgggaatcgaacccgcctctgtggcttgggaagcgaccgttctaccgatgaactaaccttgcatttgctgtccgagcatccggacagcagtattattataccgtttttccccgtccctgtcaagaatatacgcagcagttcggaacggcgaatcgggaattatcgagatgacaccgctttctcagccggccaggatcttcggagtgctgcgtaggagattaaaaagttggcgagccagccggccggtacagcgagccagacaaatgcaatgccgaaacgcggcgcgcagatcagggcaacggacagacggatcgcgagatttaccatgtttgcggcgaggaacgggcgcatgattccgagtccgcgaagaacgccgtcggtcgccatcttgatgcccataaagataaagaagaaaccgagccatctcatgtaatccccggacacctgataggccagcgcggttccgtcttttccgaggaacagcgaggaaatctgcgtgtgcagcgtttcgatgacgataaaggcaaggactgcgaagcatatatccagcagcagtgcggcatgatagccttttttgatgcgctgttttttcccggcgccaaggttctgcgaaacatacggcgagaccgcattgccgatggatacaaaaatcagagaaaacacattctccacccgcatcgtcgccgcatagcccgcgagggcctgtgtgccgaaggggttgacgaccgcctgcacgagcatcatgccgatggacacggtagactgctgaaggaccgacgggacagcgatttgaagcatggaacacagctcctgcccgtcaaaccggtgaaaagcgctcttgtagcgccgcattcgccgaagaaagagcaaaagcgacagcacagcggaaatgccctgcgcgatcagtgtcgcaagcgccgcgccgaacacgccgaggccaagaccggccaccatccagagatccatgaggatattgaggacggacgaaaagatcagcagtcccagcgggatttttgattcgccgatggaggtgaacatcgttgagaggatgttgtacataaacaggaacggaaagcctgcgaaatagacccgcagatacagcaccgcctcctccagtatatcggcaggagtttgcagtccgctcatcatcgcgtgggaaaagccaaagctaaagactccgagaatgatgctcagaacaaaaaagctgagcagggaggttgacacgatggttttcattttgccgtattctctggcgccgaaatagcggctcacgagcacaccggcgccgacgccggctcccatcgccacgcagatgaaaacattggtcagggcagcgcaggcgccgaccgctgcaagagcagaggagccgacaaactgaccgacgatgatggagtcagccatattgtacacctgctgaaaaaagctgccgaggatcatcggcattgcaaaaactgtaagcgccttgagaggcgcatctgtgatcaaatattcatccttcgacattgtccttttcctcccccggagcttcgttctctattctatcatatttcgactgcatattccatcccggaagaacgcaataatcgaaagcagcgcagaaaaggcgatgccgcgcggcagccgaaaacggcgctgccaccgcggttcagcaggggatataccgcgtgaaaagcccggagagcacaaaaaagccgtcctctcggacggctttatgtggcggagaaggtgggattcgaattctggtttgaaatcaaattgtgtacaaatatgtttattacatgatatatcatatgttttttgcaaccatttataccacttagtctacatgaaatgtgcttcgtaatttctgcttggggtataaatggggtacgcgagcgaatccttcctcttctgtattcttttgcagacgatacctcaaccttttgcaaaaggaggcaattatggtaatcagtttatgctgcggaaaaggcggcacgggaaaaaccaccagcacctgcaacatcggtgcggcactggctgaacacggcaagcgcgtcctgctcattgacaacgaccagcagggcagcttaacgctctcgctcggctacgaaccatcagccctgccaagtacgctggcgaacctgatgtttcaggcgatcgatatgccggaactgctgaacgagaccatcgaacgcactattcagcaggcatcggacaacctgcacctcattccggcgaataaaaagctggccggtatcctgtcgcggctcgtcagtatgcagaacacccgctccatgttcccgaatgataacgatggcatagcaccggaaaaagtgctgtccactattgtggagcggctcaaaacccgttacgactacattctgattgattgcagcccgcatctggacttgcagatgatcaacgcgcttatcgcttcggaccgtgtcatcattcccacacaggcacatttcctcgatacggccggtctgaatgacaccatcgaaatcattcataaggtgcagcaggcgctcaacccgtcactgaaacaggtagatatcctactgacgatgttcatgccgcgcaccattctcaatcagatttcgcggcagaatatacaggagcgttatggcgagcagatgcacgttttcgagcagccgatagactattccatcaaggtcgcggaacacccggctatcggtgtcagtctgttggagtacgctccgcagaatacggcggcgatttcttatcgcacggttgcagaggaggtcatgcagcatggctaaatcagcacttgccaacgcactgaaagagcgcagcgcaaaatctgccacccaatcagccgatgtcaatgattcggtcgatgaagcatttgaagccttgttcggtgcagccgcaccaccggcaaagaagaagcgcgtgacgatggagcttcctattgagcagcttcacccgttccgcacctctcacatcggcttcaaaccgtacagtcaggagaatttgaagatgcttgccgatgatattgcagagaacggactgatcgaaaacatcaaggttcggccgtccgaacacggctatgaaattctcagcgggcataaccgcgttgccgcctgcaaaatgctgggacgcaaggaaatcaccgcagatattgaattcgttgacaatgccagggccgttgtaatcgctaccgtcacaaatttgcagcggcggcagagtctgctccccagcgagcgcggctgggcgtaccgtgcgctgctcgatgcttatcgtcagcaggggaaacgcagtgatttggttactgcaacttgtggtgaaatccaccacaagttaaaagctcgagagagagtagcgtgtttcttcggagttggggtcaatgatgtgcgacaaaccgtgcggctgacatatcttattcaacccctgcttaatgcagtagatgagcgtaagctgaatatgatgtgcggcgttgcaatctcgtattacgatgaaggcacgcaaaaactgtttcaaaagcgactgaatacagaaaatcatcggatatctgtcgctatgatgaagcagattaagaaaatctgccctccgccgtctatttcagccgaagaactggacaaagcatggaaaactgccgcagagcagctttcggagcagaaaaccggcagtatccgcttctccaaaaagcgttttgagccgtatctgcaccggataccgccagatatcaatatcgaggatttgttccttgagtttctgcaaaaccgctttgcagatggagaacagtcgtgaaaaacagacgcaaattatcacgcgcaccaccatgtattcttaccacatttaatcgtcgtaaaagcacttgatattttgccgtaatttttttacggccgtgattgacttcccgtcttatgttggatatactatatccaagggaggaatgattgtatgctgaaacgatttgaagtacagggatttaagagttttctgcaccctgttacgattgatttttctgatgtccgcgattaccagtttaataatacctgcgtgaaagatggtattctgaataagattatcgtttacgggcgaaattccgttggcaagaccaacctgggactggcactctttgatattgtatcgacgctgaccagcaacaacgtgactcctgggatgtacaattattatctgaatgcagacagcacgacggattatgctcagtttgattatctgttttcattcgataacggagaagtaagataccaataccgcaagaatgctaagcgcgagctgatctgggaaaaggtcctgctgaatggcaatattctgtatgagtatgattacaccctttcctcaggtatactcgaaccgctgcgcgaccttatgcccacgttgaacttgaacttccgcggttcagactctattttgaaatacagtattgcgaactcttctctggaagccgatcacccgctgtatcagctcttacatttcgtatcacatatgctatggttccgcagtcttgacgagaacagatacatcggataccaaagcaacagctctaattatctggatttcatctttgatgatgctgttctgcatgaatttgaacagtttctgcatcaggcgggcatcaaagaaaatttgattgttcgacaggataccgatggtgagcagcgtctgtatttcgatacaaaggtacctctgccctttttcaaaacagcttccagcggcacacgcgcactgtatactttcttctattggtataagaccgccgcagatgtttctctgatgtttcttgacgagtttgacgcattttatcactatgaactggcagaaacgattgttaaactgctgaaaaacatgccgcagtttcaaacaatcctgacatcgcataataccaatcttctgtctaatcgaatcatgcgtccggattgctacttcattctctccgaaaacggactgtactctttcgccaatgccacaaaacgtgaacttcgtgaaggtcacaatctggaaaagctctatatgagtggtgaattcaatgaataagccgaagatactttttctggtcgaaggcgcaaaaacagatgtgcggttaatgcagaaactgctctccatttacggatttgatcagaagtatgagatcatttcgtataataccaatatctataccttatataatgagatgtttcgggataacgatccggctgacttagacctgcttcaagttcttaaagaacacgaaaaagatccccgcaaaaagccgttgttcgatcaatcctactccgacattcttttgattttcgatcttgatccgcaagacccgctgttcacttccgacaagatacagcgtatgacagaatattttgtagaatcgtccgatatgggcaagctgtatctgaattatcccatggtagaagccttttaccatatgcatgatattccggatgcacatttcaacgagtattttgccacacaagaagagttgagcaacggtacttataaacagcgcgtcaatcaggaaaatcgcaaccgtaattacacaaaatttgcagttacaaaggaagaatgtaatgctgtcatacagcaaaatcttgaaaaagcacgctggttatgtaatgtaccagacggtattccagatgaaatatcaattctttctgctgaactgcgttattgggaacagcagatgatttccgtattgtgtacctgcgtgttttatatcccggaatatgatcccaaactgattatatgatgaaacgcactgccctatcttttcagattagaagcagtgcagcaaggagggacttatggctactgctatcagcttactgtgcagtgcggctattgcctgcactgtgcccgctattcttcctgcatccaccgcaccatcgtattccactccgcccatcgcaaccgaagcaccggcagtttctgaagattttaccgtgctggagcaggaaatgctcgacctaatcaacgacgcccgcgaaacagccggtctgccgcccgcgcaggcgaacgatgccctgcacgagatggcgcaggtccgcgcacaggaaattatggtttcgttctcgcacgagcgtccgaacggcaccaaagttgacctcatgcgcgaggtcggcatcacaccacagaattactgcgccgagaatattctcagcggtacagacgtatccacgccgcagtccatgatgaactgcttcatgaactccgagccgcaccgcgcatggattctcagtgaggaagtcaatgcggtcggcgtggctatcgtccaaaatgaatatgggcaattctatgcggttcagtcgttcggctgcttttaatccgaattaaccgcacaaacgagaggtcattcacgatctctcgttttattttgcaaagaaacaggtgattttatgaaattttctctccctcagcggttcacagcggctattctgtcagctgtgaccgtcctttcctgcatgacggtgagcataccgcttgccggtgcggcagacgaggacaacaaagcctctgctatcgaaatcaaggtcggcgaaacctataacatctcagataacggaacgcagaaagcatggtttcggcagaacggttcggcgcgtaatgtatggccgatgtacaccaaagcatcggatggcacgacaattcgcgcatactgcgccgaccatgcgaaaaccaatccgggaaccggcggtaagccgtataccgttaccggaaaagtttccgatatgcacgtttacggcgtggcgacacgcagcgattcacgcacgactctgaacgagtttatcagctgggtgcaggcaccgctgaccgcgagcaacttcacagcggatatgtacttttccgcatcacaggcggctatctgggttgcgttgggcgatgcacagattgcagcgaacaacagctttggcgtgagctacacaagttctacggctctcggctaccgcgcgtccggcaagacgctgagcgcatctaccacctccgaggcgttgacactgtacgccgcaatcaagatgctggaatacggcaacacattctacaatgtgtgggggcctaacgggaaaaatcatgcgccgtggaccggatgcacgatcaattatacaccgggcagcagcacatacaacgcggcaaatgtaaaaaacggctcaatcaatctgactggcggcattatcaaatccggcgtgttcgcagaaaaacagattgacggacagacctgtctggtcctgccgatggcggcggcttccgctacgtttgtacgcggcaataaaatcacgctcaaagccgataaactgccgatcggcgcatttctgatgagcgaaaccggcgtgaaaagcacagacggcacattgacgctgggtaatgtgcggaatgacaaaacgctgtacaaaaacggcaacgatatggcttacggcgaaacctttctgctgtgtatcccgaaaacgaccgccgaacagatggacgcggcagacaccaagttgcagactgctgttaccgcgacgatgaatgtagaccgctatgatgtttatgttgcatcgaccaacgccggcggtgttcagccggtcattctggtcgaaccggcggtcaagcagtccgccgcgcagcttcttttcgtcaatcaggaggtcgcacagggcacggttcgtgtgcgtatcctgaaaaccgatgaagccggtgcgggactgacaggctgtacctttgagctgacctaccccggacaaaaagcaccgctgaccagcgtttcttcctcgtctggcgaggtggtttttaacgatttgccgctgaataccaacgttacgataaaagaaaccgccgcaccgaaaggctacacgctgctcccggcaaagacggtcaacaccggcacgaaaagcggtcagaccatcgaattgcagcttgcaaacagcactgaccatacattcaaaatccacaaaatcagcagtgcggatggccgcaatctgatgggcgccacctttgaaattcgaggcattgacagcgattataaacacagcttcactacggacgcactcggagaaatcacagtacagggccgcgacctgccgaccggctctttcgaggtatacgagatcgccgcaccggagggttacgctaccgatggttcggacattcagacctttgcatgggacaacagcaaggacatcgagctgtcctttaaggacgcaccgcgaccgggcatcaagatctataagtacgacaaggacaccaagatgccgctggagggtgcgacctttgaaatccgccgcgacggtcaggtgcttgcaaccgtaaagaccgatgtaaacggcaatgccggactgtacgatctgcccaagggattttatcaggtagtcgaaaccgaaccgccgcagggttatctccgcgacgaacaggtacacgaggtctacattgacccgaccgcagacccgacgcagctcatccgcgaggtcaatgttgcaaatacaaaaaaattatccatccgtattgtgaaaatcgacaaggaaaccaaggttccgctgtccggctggaagtttgatgtttattacaatgatgcgcatttgactacggtaacgaccaaccagaacggcgaagcgatggttgaaaatctccagccgggtacttaccgcgttaaggaaaccggcggtgataccgagcattacaacatggatgccggtgagcagacggtcgaactggtaaaggatcaggctgaaatcccgacccttacctttgctaataccatcaagaagcatttcggtattctgaaaatcgatagcgaaactcacaagccgatcgagggcgtaacctttgagatctataaggacggtaagctgctcggcaactacaccaccggcgcagacggtcgcatctggctcccgtatgcagagccgggcacatatcaggccaaggaagttgtcaccgacccgaagtatgtgttgaatgaaaaggtattcaccatcgaaaacaacagcgagtatccgactttcttcactattcccaatgtgatgaagaaggacattaccgtcaccaagattgacaaggatactggtaaaccgttgcagggcgttgtattccaaggcttcaaggacggcaagagcatcggctactttaccaccggtgcagacggtaaattcacgatctcctacgcagacagcggcacttatactttccgcgagtatcacactcttgccggttatgtgctgaataaggaacctattactattgagcacaccacggacggcaacgtcgatattatcgtggacaacacagtgcagaaaaagttcgaggtcgttaaggtggacagccagaccaagcagccgctggcgggtgtacagtttaagatttggcgtgatgcaactctgctcggtgactacaccaccgatgagaatggtaaaatcaccatcgaaaaggctccggcaggcacttacaaggtgcaggaagttgcaacgctgaaagaatatatcctcaacgacaaaccgctggagatcgaacacacgaccgataaggatacttcgattacggttgagaacaccaagaagccgggactgtctatcaccaagattgacgccgaaaccaagaagccgctgtccggtgcagtctttaagctgacacgcgcgaacggtgatgtgatccgcgaggacattacaaccggcgaggacggtacagccttcgtcgagggactggatgccgcagattatatcgtgaccgagattaccgctccgggcggctatattctggataagaatccgcgcacaatttcgctggaacagggcaaaacctacacgcttaccatcgaaaacaccaagaaacccggcctgctcatcaaaaaggttgatgcacagaccagcaaaccgctggcaggcgcgtcctttaaggtaacgcgcggcgatggttcggttgttcgtgaaaatgttgtaagcgatgcggacggtattgtacatcttgctgaacttgacaccggaacctatatcatcaccgaaaccaaagcgccggacggttatgtaatcgacgaaacgccgaaaacggtgcagctccgcaaaggtcagacctatgaggtcgttttctcgaacagccgcagctacggtttgcaaatccgcaaaatcatcaaaggcacgaacaaaccgctgagcggctgcgtgttccaggttgccaaggcaaacggtgaaattatcggcaaatacaccaccaattccgccggtctggcgacagtcagcggtctggaggacggcgtttacgtcgtcacggaactttcctgtccggaaggctatcgtctggacagcacaccgcagaacgttattgtcaaatccggtgaactggcgaccgttgaatttcagaacgaaaagctggcaagtatccgcattaagaagattgacgcggtaacgaagaaaggcatttacggcgttcgtttcctcgtaaaagatgaagcaaacaacctcattggcgaatattctaccgaccaggacggctatatcgagctgcgcgacattctgacggatggaaagagcgaaatcaagctgaaagtcgaggaaattgcggcggcacagggttatgtgctggacagcacggttcgcacgctgcgtattcggcgaggagaaacgaccggactggtcgtggaaaacacgccggttctcggacaaattcaggtggtaaagaaatcctcgcaggataatccggtcacaaatcagctcaaaggcagtctgctgcaaggcgcggtgtttgaggttgaaaacgcggaaaccggacgtatcgtagatacgattaccacagattctcgaggtatagcagcctccaatccgctgccgctgggacgctactttgtgcgtgaaattaaggctccgcgattttatcagctcaacacgcagaaggttgaagtcaaactgaaggtcgagggcgatgcggttcgcatcgagatgtataacgatgccgcaagcatcaaaacaagcattaagaagacgggcaattacacggtggatgcgggcgataatatgcgttacgatatcacaaatgttgcaaatcagtccaatgtgccgctggataatttcttctggcatgaccgtattccgacagatgccgttcgtgtcggtacaataacgaccggcacctataatgcgcgtgtctggtacaaaatcacctataagacgaataaaaacggttatcgcgtgcttgcggacaacctgctttccaccaaccgctattcgttcaaggtggattccggttcgctcaaactggcaatcggtgagtatgtgaccgatattcgctatgagtttggcaccgtccccgccggattcaagatgacggaaaaggcaacggtttacgtctatgtgccgccgtatatgggaaatggctacaacattactaatcgcgtagactgcggtggttcgtatcagggcgaatgggatagctcgatgagtgcatgggtaacaaaaatccatcgggtaccgatctataccaagcccacgctgccgaagaccggatactaactacagaaacgagggaaaacgataatgaaaaagaaatggtggtggctgatgatgccacttcttgccgcactgtttatcagtgcggcaggtgcagcagaagttggtacggagcaagtattgcttgatggagatcaggctgcttttacgccggtcagtgtagagccgatcgagataaacggcattcctacgctgacgaaaacatatgaaatgccgccggactttgatccggcggcactcaaagagcagccttttgaacagaatggatattggtatcgctatgaccgtatggacaaatcgatacagtataaaaccgatacaaaggacgcggaggacacggtaacgatagacgcgccctcttccgatttagcggcggtcattgaccgatttccggtcacgaaaacctatgctgagaacgggtttgtcggtgatttaacgcttgatttacagagcatcaatgtggaagcgaccggatacaaaaccgtaacggacagtcatccgcacagcgtcacgaaaagttacacgttgccgtacaatgaccgttcgctcgtccccgaaacggttcaggcagacggtttgagcctgccgcgcaccggtttgacatggacagaggcggccaacgtgtcggattccgatgtaccgaacagctggacggccacagcggtttacagcaaaacaacttataccagtagacaggttgcgaccggctatcaggccagtgccgtttatcgcggacagattgccaaaacaagcgtggatcatgtgacgtatgccgtgacttatgtcggcagcaagatacccgtcatgccgtttttagatcccgatgtaacgctttcgcagatcgtaatcgtctgcgccgcgggcggtctcctgctggtgtttttgatcgttcgatacattctctggcacacggcgcgcgtctatgtctacaacgaggaacgccgcattcacgatgtggtaagccgccaattcgtgcgcgttcggacaccgaaaatacggctgagtgcgctgcaaggtcacgccgaaacggaatataccgttattctgcgccgcaagctggcaaaacgcctcgtagggcgcgatattgccatcgaaaccggcaaagaagcgcagcatcatgtagtagagtcgttcgttggaagcgattatgcctttggggtgagaatttgaaaagttgctactcggcgtaaaaagtcccttgaaaaagttgatacttctatcgaaaagtcgttggaaaaagttgatgctttgctggaaaagtcccttgaaaaagtttgtgcttctgtatgcagcatcttgatattttcatatggacatggcacaatagagctgaaggaggggcaatgtcatgaatatgaagacatctgagaacgaattagatatcctcaacattttccgaaaacttgatgatgcagaaaacaatattcgagaagaaaaagtttttgaagcacaaacttctttggctgttctgagagccaaatatggtatataattgcaaatttcatacacaaaaacctcgccgttcattacaagcggcgaggttttcatttaggaggaggtttccatgaaacacaaactgttatgctgcacggcgttcatgtgcggcatttttacgttcccgttcgcgtctgccctcgagtatcactactccgcagatctgtacccgaatcatttctacgcacccacatcgtccaatcgtgcgctggatattgacagcgcggacaactccggcggtgcagctatcattgttccgtccgccggtatggggacggacgcggacagcacagcgccccgcgaaggctcacccgtcattccggtcggttcgtatgttgatccgtggggtgactccgtggaacagaagatcaacacagacgaaaagctgaacggcatggaaaacgtgtcgttcaatcggctgtcaggcgcggaaagcggcagttatacggctcaaacgcagctcaccgtcacaaacggtcatttcggtgcggtatccatcggcaatcgcaagctgttcgcgtatgtctatcccggcgcaacatacgaaagtatgcggaaaggcgcaggtcatgtagacggcacttcggtctggaacggaaacgtaaccctttgcggccacaatcgcggctcgtggccgtatttcggtacgctgaacagtgtacaggtgggcgatgtaattacctaccgcacttcgcttggtgtacggacgtaccgcgttacctcggccggacggattgcggcgacaaataccgccgtcctcaaccccaccgcagacaaccgcattatcctgctgacctgcattgccaacgagccgtcttatcggctgtgcgtagtcggtcaggaaattaaataagaaacggaagctcattcagcttccgtttctttttgctccatcaaacgatgggcgcggtatatgatttcttgtcgccaattcttttgaacagattgagctgcttgcacctgccgaataatctgctgtgcttcggcttgcagcttcactgaccgttctcccttttgaaaacggtcttccagtcgctccagcgcaatgatcaatccggcaggatcaatatctgttgtccactgcatgattcacactccatcattttatcgaaaggaacattcctaattatgaacaaagtccatctttccatcaactattcgcagcttatgcggagtattttccttgtgtaccgcattgcactgattctgctgcttctggcagcacttttcctgccgcacgctttcgcggtcgaagatatgtgggtagccgcaaaccgcattatcaaagacgtttataccaaaatcgcaggtgtttccacggtactcgccggtctgatgtctgccgttgcggtcatcggcgcaaaaatgtccggcacgcagcagaaagcagatcaggcgtgggactggctcaagcgcgtctggcttgcctgggtcattatcaacggcatcggcgcatttatcgcttatgtccgcccgctgttcaacggtctggctacgctggagtgattaatagaacagcttcagatagttcgtacgaccatcaaccacgcgatagataaatactgtcgtatcgaccaatttataaataataatgtagtttccgcaaatcatcttgcgaaattgacgcattgcaagaaactcatcagaatgcaatgcacccatcagtggttgttctaacaaaagttctattttacccatcagcttattcgtgattgcctctgcagatttagggcctactgataacatgtggacatccgctatacgttcaatatcctgccatgccggagtcaaaatacggatatcatatttaggcattctgatacttctcccttagcatagctcggatatcatcaatcgaatacgtaggatcgccatttaaacgggaaaattctgcttccaagacagctgcacggtgctgcagtatcttttcacgattttcaaaggcatcaacgctcataaaaacagcatcgccctctccatttttcgtaatataaataggttcctgcgtttcatgagccaagttagatacagtattgtaatcatttcttaaagtagttgaagacttgattttcatcccaatcacctccgtttattctattagtattatacaattattctgccattattgcaagaggaggtcatcctattctcgaaaaacttatcaaagcgctgtttgaatggctggcaacgatgtggtacgagatggtggaaaagctgctccggcagcttatgacactgctgcgcgtagatacctcgtattttgcgtcccgcgtgccggtcgtcaaggatattgccaccattctgctggcggtcggctgggcgctgctcatcggcaatctggcgtatcaggcattacgctccatggcctccggtgtcggcattgaagccgaggaaccggggaggctgttcttgcgctccgcaacattcagctttctgcttgtgtgcagcaggcagatatgcgacatcgcgctcagcctttccgccgttatcatgcggatgctggaagtgccgaaagccgtgactttcacgccattcaacgaggatttcttcagcgaactgccaaacgcgggctggctggtggtcatcgtagtcaatgtgtatatccagtggcagatcatcaagctgttcttcgaggtcgcggagcgatatgtcattctatgcgtactcatttactgcgcgccgttggcgtttgcaatgggcggctcgaaaagcaccgcagagattttccgcggctggctgagaatgtttgcatctatgtgtacgctcatggtgctgaatgtgatgttcgtgaaaatgctgctgtccgccatgtccaattcgccaaccggtgtagcaatcgtgccgtggatcatgctcatcacaggcattgtccgcgtggcgaaaaagatggacagcattatcctgcgtatcggactcaatccggctatcactggcgacccgctggggcatcatcacgttccgggtatgctcagtgccatgctggtgcatcacgcggcatcgtttatcaaaaacacgatctcgaatccgccgcaccccaccaatacggctgcggctccgccgtccggcccgctggcctatggcatgggcagacaagtcggtaacggacagccttcggagctttctgcatcgtccggcagcagtacgcagaacaatacgcagcagaacagcaatttttcctatgattcgtctgcgcggcatactgcatcgtcccatatgccgcatcaatatgcagacatcagcattgacgcagacgatttcacggacggcgattttgtgaccatgagcaatccggcacattccggtgccgcacgaattactccggtcgcgccgcagatacggcccctgccgcatgattttgcgaaaacaccgccgccggtttctccgcagtccgcaagaccgccggttgtgccgcacggcgcatctgccgttcaaggaacaccgaatattgcaggtacacaaagcgtcaacaacacgcagaatacgccgcaaatgcaaattcatagtgccatgtcgcacgattttgttgaaccgcaggcggcggaacatagcgcggaaaatacttcggttcagccgcagtccatcgaacacagcatacagaccgagaaaaccggcggcacgcatggtcaacagtccggacgtatcagtccggtaacaccgccgcgtcccacaggaattcgtgaagcgaaaaccgcagagcatacggaaaatcgttcttctgcacaaaccaaggtcggcagttttggccataataccgaaaattatggttcctctgcaatcatgcagacatctgaacgtgccgtagcgccgaaggctgctcaacttggcggcactgcacagaatgtagagtctgtccgcaaaaccacacagaacgtagagtcgagccacagaacatctggtatgcggtctgtccggtcagacactgcaccgcaggcaaaatacaattctgctgccgtcaaaccggacattacaccgcagcgcaaccgcggcacttctgccgccgcaagaccggatatttctccggttgcacccgcgaaacccacagttcagccgccgaaagcacagactgcgccgaaaaatcctgtttcgtcggcaagtcagccgcgcaccttgcgccgcagtgccgaaccggtgaaatcaaacaacataacaccgcagaacggaggtgaacgccatgcaggacgaaaacacaagccgtaaacgagcagttgcggcggcacgcatcgcacacgccgcatggtccggcggactgcacggcgcagcagccgccacagcaatcgaagccggaaagcatcttgtgagacccgtgcttgcggcagttatcgtgattttcggcttaccgctgctgtttctcgcggcgataccgtgcaatctttttgacgcgccaagcgtcaaatctgccgatatacaggaaatgaccgcacaggcgcagacactgaacgcctcgtggaaacgtcagcggtcgctggaacagcaggccgtagagctgttcgtgtcgcttctgccgaaagacctcgggtttatctcggtagaaacccggctcgggaacacgaatgactactggcagattgccattacatcagtcctgcacgaacaggacgttgctctgctcgatgaggacaaaatcgtgcagaccatgaaagacaaaatgcagtacaaactggaaccaaagtacaaggacggcaagcttgtcgggtacattctggtgatttacgacatgacaccggacgagctgatggacaagctggcttttgatgaacagcagcgcgactgggcggcattgattgcggacacgattgcagacagcgattacactgcgccggtcggttcctcggacaacaccgcagacgaagatctgtccgatattgtattcaccggacgcgaaaattccaaaaatgtcgtgtatttcagccagtatgacagccgctggggaagtcagatgtacggccgcaccaacacgattgcgggcgcaggctgcggaccgagttcgcttgctatctgtatttccacgctgacgaacaagacggtcacgccgcccgaggtctgcgagtggtcggtcaagaccggccatcgctgcgagggttcgggcagttatcacagcctgattccggacggcgcggcgcactggggtgttctctgccgcggtatcgggcagagcagaaaactgctgattcaggctttgcaggacggaaaacttgtcgtggcgattatgagtcagggacatttcacgcgaggcggacatttcatcgtgctgcgaggtattacgagccaaggcaaaattctggtcgcggactgtgccagctacgaacgcagtcaaaaggagtgggacatcaatatttttctgaacgagtgcaacaagagcgccgccgccggcgggcctttctgggtactgggttaggaggaacgaatggaaatagaatatcgcagcgataaaatcctaaaacttagagtttttcgtgtaaaacaccgtatttcgctggcagaactggcacaagccagcggcgtgagtatccagcgcatcagtcagatcgagctgatggactgtccgctgacaccgcatattgaggaacagctcacgcgcgcactggaagtcgtgctgctgcgccgcagtgccaacgcagtcgccgccatcgcggactaccgcgaacagaaaggacggctgtttctggctgttccggaaaccgaggtgatagcagatggataacgaggatacttactttattccggcgaacttcaccgatgcaggccgcgtattcggtatgtttgaactgcgcaactgcatcgaagcggtcgtgctcgccgcgccgacactcggtatctgtatgctgatcgcccgtcagcttgcggtgtcgctcacgataaagctggtgatctcgctgtgcctgctggtaccggtctgcggctttgcgctgctcggtatccgggacgactcgctcagtcgctttctcagcgtgtatttccgctggcgcagacaccgcagaattatcttgaacaagggaggaatgatcaaacatgaccataaaagacgcgatttttggcgtacaaagcccgcaaaaactcgccgccgcaagcgatgacctgcaaggcagtctgccgattgcagacatagaccgcggcatcattcacacacgggacggcggactggtcggactgtttgaagtgctgccaatgaactttttcctgcaaagcaccgcagagcgtgtccgcattgtcggcgcactggccgcttggctcaaaatcgcgccgagcagcgtacagtttctctgtctgtcgcagctggtcgatgtggagcagtacacgcgccgtatgaacgaatacgccgaaagcgaaacggatgcaagctgtcgcgcctgcatcgaggacaatatcgagcaggtgcgcggcatgatccagggcggcgcgttcacgacacgttttttcgtggcgtatcgctttgagccggacatggctccggcggccaagacacccgaacagcgtgcagacgcgctttatcagattgcggataccgccaaaggctaccttgctcgatgcgggcttaccgttgcagaaccgcagtacatcgacaatcagatggtagaaaccgtcttttccatgctgtgcaagcagaccgcgcggaacatcaagctgcctgtggatttccggctgatgatggaggattatttcggtattcccacagaggatatgccggaagaaaccgatgttgaagaaaatgctgaaattgcggaacaaccgacacgcaaagagaaaaagcgcaggaagaaacgccgcaagcctaagaaaagcaagctgaaatccgaacagtcagacggtacaacacgcgtgatggatctcatctgtccgtccgcgagcgacatgacgcaccgcgactatctggtgatagacggcgtgtatcacgcctacctttacattgccggttacggatatcagagccttgtgcgcggtggctggctggcggcactggtcggcatgggcgatggtatttcgctttcgacaaccctccttcgccgtccgcgcgagaagatactgccgaaagtcgcaaactccacgatttggagccgcagtcgtatgcgcgatgtggacgacacacgcgccgattatgagcagatgggcagcgcgatttacgccgggcagtacatcaagcagcagatgaacacggcaaacgaggactattacgatatgtacacgctcattgaggtcacggccgcaaatgaagaactgctgcatactcgtctggcggaggtggaacgcctttgcgcgtcacaggatattatctgccaacgctgcgactatgtggaggagcaggcgtttcactcgttcctgccggtagtcgctcctgcaccggaaatcgctcgcaaagccagacggaacacgctgctttccggcgcggcaggttcatttccgttctattcaatggagctttgcgagcagaacggtatcctcatcggcgaggacctacgcaatcatgcggtctgtatgctcgatatttttgacggaaaccgatacagcaacgccaatatgaccgttctcggtatgtccggtgcgggcaagacatacctgctgcagctcatcgccatgcgttaccgtcagcagagcaagcaggttttcctgattgcaccgtacaaaggctatgagtaccgtgcggcgtgtgaggccatcggcggtctgtacatcaaactcgcgccgtcctctacggactgcatcaactttctggaaatccgccgccgcacactggatgtcaacgctgaattaacccgtacgcgcactcgtgaagattcactgctggccgataagatcagccgtctgcatatctatttttcgctgctgcggcgcggtctgaccgaggacgagaaaagccgtctggacgtggaactcatgcggctgtatgagtgtttcggcattacgcgcagcaatgacagcctgtatgacgaatacggcgaaccgagaccgcagcccacaccggcagatttctatgaactgctgaacgaacgcgaggaaacacggccgcttgccggtattctcagccgtttcgtgaccggttcggcggcaaatctcggcggcatgaccaacattgacatgaataacaaatatatcgtgctggatatttcggaaatcggcaaggaactgctgccgttcggcacacttctggcggcggacatctgtctggactactgccgaatgtcccgtgcggaaaacaaggtggtcattctcgatgaggtctggtcgctgatcggcgcaggctccaatgcacaagcggcggagttcgtactggaactgttcaagaccgtgcgcggctacggcgcgtccgctatcgccgcctcgcaagacttggaggacttctttgcactggaaaacggcaaattcggcaaggcactgctcaacaacagccgcatcaagtttgcgctgatgaccgaacccgaggaggctgcgctcattcagcagcactaccacctgacggacgaagaaatgcagatgcacgccaatttcacacgcggacaggctctgctgtgcgccggacggaaccggctcggtgtgcagatcattgcgtccccgcgggagcacgaacttatcaccaccgatccgcgcgacatcgcccgtatccgccagcggcagcacattgaagaagcgcgccgccgcagacacccgacaaaggagaaagttacgaatgatgaatgaattcgaaggcaaactggaaaagctgacgcggctgacgaaagcatttgagcaggcagacgatagcaacaagcgaagccatctggcgaatgaactgctctgcacgttggagaatacaacgctctcggctcggcggtattacagctcgtttctcaaaccggaaaagcatggccgtgagacgcatatcctgccgtaccatgtcgaggaacactgcgcggtggaggtcacccgtgacggctggacgcacattcgtctgaatacgctcctgcagagcaaccgccagcgcgtgaccgggtacatcgagagcacactgctccagatgctgcatgaccaccgcgcggcgggcggcacgctcccgtggtacgaccgcgcctttgttatcatcaccgaacacaccgaccgccggtatacgggccgcacatttgacccggacaacaaggaatggaagtgcgtgacgaacgcgctgaaaggcgtgctgttcgaggacgatgacagtcgaacggtcagtctgattctggacagtataccggacggaaagggcttcaccgaggtccttgcagtcccttattttgaaatgaaaaaaacgtggatcgggcggtaaaaagggcctctgcacgggcggtagtaccgcctgtgtgagaggtcaaaataaaatggcgtttttgttttggtttacttgcgttgttggaataaaacgagagaaatcaacatcaatagttctcaattttgcaaaagcacaaactcaattaccgcgacctggtaagatagggcggtaatttcagaaagaaaggtgatcatttgcgcatacaaaccatactgcccgtgatgcggctcatcgggtggtgcaagaacatagattgtgagtgtgaacacaattttcgccgcattttccggccgtctgttatgaccgcgctggtacagcaaaagtatctgcggccgtactcggcggcatacggctggcggctgacaccggccggttatgcgtggctctccgaacagggatttcccatgcaggcagaccggcacacacagcgtgtcaatcgcagatttgaaaacgccgctgtgatactgaccatgtatgccgccggcattgatccgttcgcggattcgcttgctgcactgcgggagaaaggcgggtacctctcggcatcggtgctgcgcggcagagagggacagaacccgctgggcatcaacctcgtgtccggtttcctgcggctcggcagcacgatgttttccgtgcattatccgcagacagcacagcgggttatcattcagcgtgagattgactgcgcgcagtctgccatgctgggaagcggctgctccgaacaggcgtatctgctgtgcgggagcagctacacagacatttaccgcgcacttctggaagaacagacgagctgcaccggcaagcgcgtcagctacgcccggttctatcagcagatcagtccggcgtatctgctgccgtgcaacaaggacggtgtattacagcttcggctgatgcaggcagcggactaccgtccccgtctggcgaaaatgctcggcgcaccgattaccgaaccacatttatccgactgcgatttcttcagcgcggactttcaatttccggctcgcattgccgcggacatggagctgcggcaggtattccgcgcggcgcagcaggcccgtaccgccggataccacggtctgctgcttgcggcgtttgaaagtcagaagcgctttctgacgcagatttttccgccgccgtttttccatgttgcggtgatcgacgaacaggcgctctgtattctcgaaatgggtgctgatctatgacaccgctgtctgaacggattgccaaactggaacaacgtctgaataagcgtctggagcgttggaaagccaagcacagcgcagattggcggccgtatgccgtcctcggcggtatgggctggtacttttacggcatgatcgtaaattcggtgcggctcggtatccggcagtctttcaacgcagaaagcaatatcgcaagcatttgggtggtgaacccgttccgcaatctgattgcgccgtttacgctcaccggacttggactcaccgccgcactgctcgttctggcgtgtctgctgacgaggaaaggttttaactggctgtccggctatcacccggtacgcgacaagcgcggctttgacattctgccggacggcacacacggcacttcacggtttatgaagccggaggaaatgaaagatgtactggaaacaggcagactggacgaccttaccggcacgatatacggcaagcaccgcgatgatccgctggacgacaaccgcttttcgctgtacatcgcgtcgagcagcaaaagcggtcttgccggaaatatgctggtgatcggcgcaccgggtacgggcaaaagctggggctttgtgcgtccgatgattttccagtgcgtcaagcgcagagagagcatgatactccgagctgtatgaaagcaccgccggttatctcgctgatatgggatatgaagtccgtgtgttcaacctgcttgagatggaacattccgaccactggaactgcattggcgaggccgactatgacgaacgcctgatcccgatcatcgcggctaccatcatcaacaacacctcgtccgagaaagaagccggggatttctgggcgaaagccgaactgaacctgcttaccgcactgctgtactatgtgcagaacgataaagacgtttcgggaaacgtgcttccgctgtcacagcggcggctcgggcggatacttttcgctgctgaccgaaaacggattggagaaaatcgaccgtgagattaagctgctgcccgccggacacccggccaaaggcccttacggattgtttttgcaggcaaaggagaacatacgcggcaatatcgtgatcggtctgggcaatcgtctgaatgtgtttcaggacaagctggtagacgcgctcacagcagacagcacgattgacctgacgctccccggacacaagccttgcgcttatttctgtatcctgtccgcacaggatcatacttacgcatttctgtcctcgctgtttttcacgatgatattttcgcggctggagcagtacgcgcggcgcgaaacagaggacggcaagctgccggtgccggtgaatttcgtactggacgagtttccatccatcggcaaactgggcgatttcaagcgttccatcgcgtttacacgcggtttccgcatgaactgtatcgtcatcgtgcagtccatcgcacagctcgccgatatttatccgcgccgcgaatgggaggagatcacggcctgctgtgacgcgacgatctgtcttggcgtgaacgatacgacaagcgcgcagtttatcagcgaaaaatgcggcatgaccaccattcgcgttacgaataatcagcagccgcagacaccgctgttttcgccggtggcgaacctgtcccgtccgtattcacagacgcgaagcaatacccagcgggcgctgatgcagccggacgaggttctgcggctggataatgcgaaaagcatcgtcatgctgcgcggacagcttcctatgctgctgtataaggtcacgccaccggagtttgcagacttcaaaaagctgcgaacattgtctatcgcgaagtatcatggcaaaacgaacgaggtggaagaagagccccgcaaaacgcagacaaaacagccgaaacgctctgctgagcaagcggtttatgccaatctgcttcactttgaaaaagaggaaagctgttccgctccggcactgactgcgcagcagttacaagagatacaagacgcactgaaccaaggaggaaaagacatatgaaacaggaaaataacgaaaatcgcccatctttcgggctgatgaagctgaacaacatcatatcgtattaccatatgcagatgccgcgctggctgttcagcgacagcggctattcggatatgacgctggaaagcaaggtagcgtacacgtttctgctcaaccgatttcagctttcccgacgcaacggctgggtgaaccgctacggcgaggtctatgttatttacacccgtgaagatttagcgcgggaaatgcagatttcctatcgcaaggcgattgcctgctttaaggagctgaccgaaaagcaccttgtctgggagcagaggcaggggcgcggtctgccgaaccgtatttatctggcagaagtggttttcgctgaaaaagcggcgtttgcctacgactgcgcaccgttctccgcaaacgaaaacagacctgccgaaaatacaggtctggaaaatgaagatgatatggacagcaacaaggaaaactgctccgaaatgccggatacggacgcagaaccgttatatacggctgcatcagacctgccggaattgcagtgcaagacctgcgaaaacggcacatcaagaggtgcggaaaccgcagttcaagacctgtcgaaaccgcacacaagtaagaaagagataagaaatacagaaaatagttttactgaggagagttcgttcatcggtcggacgcgcgaacgcgcagaattgcaggagatagagcgcagagcggtatttcaggattttgtagatgcggaacgtaacctgctggacgattgcctgcactggctgtattattgcagcgagcttcgcatcggcaactgcacctatccgcaggactatgtgcgcgaaaagctgtggggactgacctttgagattgccgaggcggcggtgctgcggatacaggccaatgatctggaaatccgcaggaacgccattgtgtatgccgccaaggtgctgttcagctgtctgatggagtcccgcagcgaggaaatgctttatccggtggcaaatcgcctgaaacggaggctttccacatgagattttggagcccggagcagaaatacttactggaagtgctgaaaaagaccggctgtatgcgaaaaagtcaggcactgaccttgctgcaccggcagtttggtacttcacctaacgcgataggccccatctgccgccagcttcgggacgcgggttatctgcgggaatttgacggcgtgatctcggcagtcggaccgcaatatgagccgtttatcccgaatgcgatagatctcattttggcgattttcccaagagagctgccgatttttgaacgcacagcgcgaaattcactgtacgcactgggagcgcagtctggtctgctggcgcgagtgttttttctctcgcgggaacagaaaatattcgcactgccggagcgcgatattgtcgcagagcctgcatccacgctcacggttctgctgttggaggacgcgatgcaggccgggcgcataccgtctgatctgtcctgtctgctagcgtatccggagcagaacggaaaactaacactgaaacaacataacggagggaaaaaacatgaaaattgataccagagaactgctggaacgtctttcgacttcgcgcagagagttcaatgcgactgcgtttgcagagcttgaccgcaacctgtctgacgaggaacgcgaggaatggaacgcgatttacgcttcgttttcttcacgttcgctgctgcggaatacagtgattggtctggaaaccattccgttcccgaccgatgagaacatggaacaggcactgacctgcatggtagtcatgcggcatctggtgaaggtgctgatcccgctgccgctgttctggctggagccgaccggcatcaacccgaacagcgtgattggcgcggaaatcgactacatcatcatcggcgtagaccgtgagggggaatgtgcggtcgcggcgcgttcgctcgctttggagcagcagcggtggcacgcgctgaatgtacagcatattaccgagggagatgtggtttcggcgtctgtgctggcctgtggtccgacccgcattacagtgacggcttgcggcttcgatgtgacgatgggacagcaggcaatgagctatacctatctcgcggatatgcgggaagaatatcatgcaggccagcagcttcaggcgaaagtgctcagtgtcggtgaggatatgcttgccctgtctgttcgcgatgtcggcacggacccgtatctcaatgcggaactgcggcactctgttggttccagccgcatcggcacaatttcaagcaagtacgccggcggtgtattctgccgtctgaccgacggctgtacggtggtctgccggtacgcgcagcagttcagcgatgacgagttcagagtaggggatagggtagtcgtgcagatccggtcgtttgtggacgaaaagcggtggctgagagggaaaattagagggaagctctaattcagataaagtcaactatcttttcatatagcaagtgtatacagcatatattctatctgtgtttgcgatatactgcatacccaatgcttagcaatcctgccgccgcaagcagaataacgccgatttcccttttctcgaacagctcttctctgctgaccggcgctgtcgaggtgaaatccatgcgaagaaacgaccggtcggcagcgaatgtttctatccccgctttggcggtgcagatgaccgccggggcgacatacgtcaccatctgcccgctcggggcggcgaacaatatggcgccctcctcgtccgtaagcacctcggtgtagccgtccgccgcgggctcagtcacctgcgcatacagcgtctgcccgttctgccggaacgcggcgcggatattttcgcgcagaagcgtgccgttcctgtcgtacaggctggctgtacgcacgccgttcggcagggtgacaacgcaggcgatttcgtccgccgtgccgacgtcaaatgcctcgcccgtgtagatttcgccctctgccgggatgttcagcgctgtgccgctgtccagattgcaaatctgccgcgtgttcccgttttgcagcacgcaaagtgaattgctcccgaccacgttcgttacgccgtcaaattcgggcgcaagcagcaccgtgccgtcctgccgcacgacgccccactttcctgctttggtctgcacaagcacacggtcgaaagcatccgttttctcgccgacaaagcattgtaccgccgcgtactgctcaaacgacgccgcctgaccgccttggttccagtatgtcacggtattcccgtccgtcactgcggcaaggccggacgcgagcagcatgatatcgcctgtggttttcgtgatttcccggccgtccgtatccataagcgcttctgtcccgtccgacgacgccgtaaacagctgcgtgtcgccgatatcatacggctgaatgtcatcatattgcccgctgacacaggtattatcatagtaaagcgcgttcttcccatcgcggctgccaatccacagcacgccctgcgccgtttctcggacttcaggcgacacgatattccccacttcggtctgaaacaggatattgccgtccgcgtcataaaccgtatctcccacggtaaacgagcgttcgtccggcgagacccctatcggctctccggcaccggacgatgcaatgaccttcttcgttttcaggtcgatgaggtcagcgtcccacaatgtcatatcatccggcgaaaaagtgccgactgcaacatctccatagaactccacaccattatatcggtacgcggtgagctgttcgccatcgcggctgaaaatcgcatatttcccatcgcgcgggagcaggaaatacgcatcgcgctcaagaagcgtcggctgcggctgctcaagcacgtgttcgattgtgcggaactcattcagcgttccccgctcgtccgtatacagccgaagcgtctgcgtctgcgcgtcccagtccgccgcgtattccccgagtccgaacaactgcccggcatcggtcacttctttccattccggctccgccgcgaacgccgtactcagcagcagcgcggccagcggcaggctcagcagctcgtgtatctttattttcatcgcgtcctttctttaatgtacttttatctcaatgtatttccataagatttacagcaagggaaacggtactgaagtaaaaatttgtatgtttctgagtataaatgatttcgaatactttcgtttcctattgatgagatgctgggggtcaataacgaaaaaaataaaatgggaaaatgatagtggaatcagtttacatttaaattcgaatattctccttagagagtgtatgcatatattttcgaacacaactttgaaatcatttcatccggaacagccggtatgcggttataattgattgttctcgtgtgtaaggatcgctcggcgcgaagcgattgctgccgacgccctgcatgaccatagtgccgtcctctgtctgcatggcgctgacctcggccacggccgctttcgcccatgtcgaaatacgatctgcatcattaaaaggcgtgtgttcgcggttggtgcggatgtcaagaatacccgctgcgcggaccagcatcgtggccgcttgctcgcgcgtaatatgggcatccggtgcaaatctgccgtttccgacgccgttcacaatgccaagcgacgcacatgccaagacatctgcattatccgtgtccgtaaaactgctgtccgtgccgccgcgatagacgatcagctgctgaacagtatttccggtacgtttctgcgtgattgccgcaaccagctgacagaattcctgtcgcgtgcaaggttttgtatattgccgctgaagctcctcagggaccagttccgccatgaccgctttctcgacttcgtccgccgcccacgcgctcatctgactgcggttcgccgccgtttgcggtattgctgccgttccttctcgcatatcgtaatatgcggttcagccacccttgcggacagccaagagaccggaagacgtcgaaatttcgtcaaattctcccgggagaaacacttttccgtcataggagcgcagcggtgtccatgtctgtccgttcatcgtggccgccacgacaatttccggcggcggcgcttcggtgccctcatactgtccggtcagcaggcgaaccgactgataacgacacggcacggtaagctgtcctttttctgctgaccagacgccgtataaaccattctgcacattctgcacaaccatgtatccgccatcactgataaaaccggcggcgcggagtccgctgtcggaaacgatgtttcgaccgcttgcgttccagaggaaaatctcgctgccgtttttcgcgcagtaatacggaacctgcgtgctgtgaacgcctgccatgccgtccgcgctgccgatatacgtcagttcgtacagatgatacggtgtttcgatgatatttttatccgagtacggctcgtaaagcacataatttccgctttcctgccgctgaatatcacggccgtaccacgctgcgcccgcgctcgacaaacacaggctgagtgccagagcggacgggagtgctctgtggactattagtttcatattagttctacctttctcctgtttacataagcagagttattttctcttttatagttgttcgcgaacaagctttataaaggagaaattctatagaactggttgatatcatattcatacatacatgcattcgttttggcaattaccttattggccgaaacagatgccggattaagttctgaaagcgataccttcgatgtcgaaatggcaggcgcaatagactgcgaggtgcgtctgctggtggtaaacgtatgaatatcagaataggtggtaccgccataggtataagcatacttacaatacgttttctgcgaacccgacagtatcttaagggtaccatttgccatatttagattctccttgtaaataattaatgtatgcatacattttataaggagaacattacaggccgcatgtcaacctgctgtgtaataatttttgcgcagctcaatcgtgtctacgcaatcattctccgttgagaaaaccagaaacgggtcgtcccatgtcccgtacaatatcgtaatgctctgctccgtatcgcctgctttcaagcctctcggcgtttggaaccgaggggaacaagccgtgatattgcatatctttccatccatattttccgcatcttctcctgtgagccgccgcatgacggaaatcttcagatcattcgattgataattttcgattgcgtaattcagtacatacgccttatcgtctgacggctgcaattccgcagatatatcgctcggaagctccgaaaatgccatgcctgtcgcaagcctgttttccggattcgtactgtcgatcaagcaatcgtcgttctgcaccgtggatataataaccattttatccgccgcatagcgcagcgaattgatgccgggcgcataccgatccggagcatccactccggtgaagcccagcggaaagtatatcatcccgtcatgccggacaggtgtccggtcggccgcggcattataatacatcccgctcgaatcggccggaaagcatctgacaggagcatcggcaacgacgttttcgccgtttaccgcataattgttttttccgacatggtattccgccgtatatgcggaaaattcaactttcgccgtatcgccatattcacggtacgtcccgccaagggcctcggtaacttcttgcagaggaacataaaaagtgtggtcctgaatatacggcttgcctgcgagttcgaacgcttcgccgttccggtatgccgtattttctccggctgtcaaagtcagcgttctttcgctgactgtttctggcggtgcgctgtttgccgaagcgaaatatataatcagtatcgtggccatgagcagaatgcagcgttgtatcgttttcataggcttactcctcattcacaagaaatcgcagcaaaatcagaacacaaaatttccgcaaagcgccgaggcagcacgaccggagcctgcgcaagaagccgcagctctcattgttgcggtgttgccttaagtaagagaggctccggttcaaaatccggagcctttctattattgcgctaactgattatacatccgttcaatggttacgatggcctgctcgccggtataaccgccgtccggatgaaattcgttattctcctcgcccttcatgatgccgatattctgcatggtgtagatgctgtcgcgcgaccagtttccgaactgcgcatcatcggcgtattgcttactgccctctgcggtttccgtgccgccaagcgacttgtacagccgatcgagcatggctgcggcctcttcgcgcgtgatgaacgcatacgggcggaatgttccgtcctcgtagccggtgacgatgccgagcgccgccgcgactgcaacattttcatcctcgcagtcagaaaaagcttcgtccggtatgttttccggaacagaactcatcttgctgtacagattgactgccagctcacagaaatccacgcgcgtgatgtcgagtctgggataatgaaaaccaccgagcgtcaaagagtgctgccgtgcctcttccacttcaggctttgcccacgcactgtactcacccgcattcgcagggagttcaacctcgccgcccgtaccatccagataatagagtgttttgcctcgccagccgatataacgattatcgcgccagtctatcccatcaaagtcgttttttccgatgtctttgccgtttttgtcaatcaatccgtattttccgttgccatatgcgcctttcacagagccttcccacaaagtgcttcctgtctgaatggccatcagtccgttgtgaaacacgggcgtgctgattgcaacaccgccgtcaatgtcatcgcggagcatattcatattttcgtcaaacagaaccagctttggaatatcatattggatggttgtcggctcctgataatagataacatcagttaaaggacgtttggcataaataccaacgaaaaagtagccttcatctgaaacgctcatgcaggttccttctaccggcagatccatcggcgttatatttccgttttcatcggaaagatagaaatccgaacagtgttccttacccagaatttccttcgacaacagaattttattgtcagcaagcacatctatcgtatcatattcgagcggaataaccatttctccggtttctatattgacaacgccgtccagaaaaccatattttatgtagccatctatatcgagactgatggtgtaaaggtttttcgatggcacaagcggcgatgcgtatccaccataaccatcaccatcgataaaatacatactcttatcattctcattctgccattgctgctgcacctgtgcaatactggattgcagggcctcctgcggtgtgacagttctaaccgccccggcatagaccgccatgctgccggcgatgagcgccgccgcgatcaagtaacgtaattttttcatgctctactcctccttgttctgtggtctgatatagtggtatatatagtataacatttcagacagtcaaaatgtgacatggcatctctacacaacttaattttcatgcgaatgtcacactacggcatcgttaattgttattagtataattcggtttacatttggatgtcaatacgctctggatccattgaccggtcaaaacgaatccaagaaaagagtgatatgatgtctaggttacgcagctaaacagcaggcggcagcagtgtctttgcttcaggtttgattgctgagtttcataaggttgacagccgcctttggctgcgtataattttctataagaggaaaggtggttgtcatatgaaaaaaatctgtttggtattatcagcgctggcattatgctgtactatgttgattggagccggaacagtaggcacatcttcgcaaatgtcgcttacgcagcaggcaattacgcattgtctattgcctatttgcttttgcgaacttgattatacgctatcggtagtaaacctccaccaggtttttggtaacgcggatatcaaccttttcaccaatcagattatagggcacggagtatttgtttttgccaccagaaatcaggtagtcgttcggaactgttgccatagaccagacagcggcttcaaacggtgcagtgggcagcggcagcatatacggcctgctcttcctcaagataagcgctgcggcgggtgccggggcgctgcttgaacttgcggctgttcagctcatccacttttcagcaatcgcctccttgacttcctgcaaagagaaaaacttcatatcacgcagtgcagcaataatccaggtctcagcaaaacggacagaagtctctgccgaactcttgtactttggacgacgtactcgtgcaggaacaatagctgtgttgtaatagtccgcaagttcctgataactgcgattcagtacggtttcataacgggtgttagacacagttgcggtcttgcagttatccggaatgagtagccttgccgcgccgccgcaatagttgaacgcatgaacatgacggttcagctagttctcggttttcatgtcatcacaggcttctgcatagacataacagctgcacgggagcaccgctacaaacaaataagcgctactccgctctccggtaacggaatcgtagaccgggattatatctccggcccagtcaacctggattacatctctcggtttatgctgaatgcgcatggttgccttgataatgcgagcccatctgcggtatttatcgccaaactgtgtactcatgtacggcgtgcggccgctttcgtagcacttacggcagtattcttcccataaaagcgtcagcgtaacgccgggcttggccagttcacggtgaatatacggatagtctggctcaacgtaagtgctgattttctggtacttgtccgggaaaagaatccgctccagctcgacgttggtaatgtcctcgtcgaggggccagtggatattgtgtttagccgcttctttcagaatggtacgcacagtgtgatctgagcaatgcatcgcgctgcaaatatcacgctggacatgtttcaaggctgaaagtcctaggatttcacgataattaaccgttttagtcctccgatatatgatttgtcacatactgattgtgcatgtgctaagtcattatatcgtgaatttaaaaggttgtcgctgcgttccggcgaggtgtcgctatttctccggcaagatgtcgctgaaagtccatgcagatgtcgctatatgggcggtttatgcaatatcgcgccttttattattacctgtgcagtatcctctgttctggttgatcttaaagcatattgtataaagaaatatattgaaaacgatcaagcgaataccgccgatcagcaaacaagcagcactaaataagtgctgctttctttttgcatttacgcccaattagggcgtttttttattttagagagaaaggaagtctgacgatgaacattgagaatatatccatagccttgctcctgctgggtgtgcttataaccgttctatgcgttggtatcaacctgtaccggctctgtcatggcttgccgtatctgccgcactggtggagcggtgtatgctcggctatgctcttgctggggctggtgtgcagctttttcgcgcagaataagaagaattgagggttgtctgcaatcttttgttttaatatatgatttcaataaatacacccgtcataggtagcctataacgggtgtcagtttcgtatcagtttcttttctggttgcggatatagattatgcaaactacaactaataaaatctctagaacaatgcggatgcagttagataaaaccatatatattgtgagtaaaaaactcattggtggctcctttcagaatgctaacagcatttaattgttacatgtttgccgtcaattttaatggtgatacctaccgttgctcctgatatagaatcaggatgttcgaaacgagccaatcctgttacgccaacatcaaggtttccgttgctaggataattgcgctgatacgatgtatcaagggtttcccaagaattgaagtttacatatcctccttgctgatagacacgaatactgtggacctgtgccacatttgagatttgaaaatcacaagttacatcggcccataccgtgatatatgcatatccgtatagagatgatactttgaaattagtttcgtatgtacctcttttaagcattgcgcgtattggagttgtagcggggttagatgctggtgtaagatcggttatagtgattgtactccctgcttcttgtagttcacgaacagcgttattcagcatttcttgtgtcaatttaatgttcggattataatccaaaacttcgacttcaattccgtatggttttccggcttcctgcaacgctttctcatattcgaaaatagtaataatcgaggtagaagaagcctcattgttttctgtcaaagctacattgaccgcattagcgttcatttccaacatcgaccccattatacatccaaccattgctatacttgctaatcgcttgaactttgtcatataatcacctctatattttatatgttgtaaattttattgtattattttgactgcgattattagcatcggcatttctatcgaaggtataggataaacaatagaaacgttacagaatctacgcaatataaggaatagtaaacttattgcggtctgtggtaatgtagtgtatccttaagtcgcacagatctaatacaatgaacagcagggaattgcataatatatttaattagtttatcatgggttttcgcttcatcaggtatactgcccgtgatttttattgaagtattgcactaatcttcaaaatcagctatactatatatatccacatgaatccggtacaccgttatgcggtgaggtgtccagcctttcggttttatgtggattgtttaatgtaccattggaatcaccagcctttatgcaatattttggttttagtggggaacatcaatccagtatgggtctacccaatagccgcgcgtttcgttccagcggcggtactgctgcttgccgttgtaaatacggaacttgtacacgatcacatcggcgcatggcatgatcgtgttttcgctgctgctctgcggcgtgggtgcttgcggaatatctgccgcaaatgcggtcggaacggcggttgccatgatagctgccgcgcccaacgcacagagaaatcgtttcttcatggtggttcactcctttatgattggaaaattgagttgcttataaaattcagtttcggattcggttaattctatcggctgctcattttggatacaaagccaacaccgaccggctcgatcttgcttgatataagcggtgctgttgtcaaagttgataacgcctgctttttcgctgctcggtgcttcaaatttcggctgcggcagaaccgcgtaggacgcaatgagcagcacagcgaacacgccggtaaacattgcgctggctgcgcggcggtgctggtgtgcggaataggtcattaccatgacgaaccgctctttgatctcggcttgtgcgtccgcttgaaacagcgcggttgccataaacggcaagcggtgcttgtgcctggtttgcttcatcaaggaaagtatcgtccgcaggtaggcggctcgttcctgctcgtccagcgtccgcgcaacggacaggtcgcacttgatctctaaggtctgctctaagtccttttgcagcaggtacactacgggattccaccagaatatcatgcagaacagcgtaaccagcagcttcacaagggtatcttggttgaggaaatgcgtgtactcgtgcagcagcacatagcgcagctcggtttcggtgtagtccctgtccggcaggatgattcgcttgtgcagcacgcccatgccgaacgcggattcgatattcaaagccgtgtagccatgtaccgtgatcttgcgtccggtctgccgctggacttgctccaacagggcattggttcgctcgtcccaaggtgtagtgtaatgcgccacgctgtatatcgctttgcggtactgccggatatagcgaaaaagcaactcgcagaatcccaacagccatgcggcgcacagaataagcacaagcggcttgttcgccagcatatcccgctcccgcgtcagcagattgtagatgtgcggataaataacaccgtccgctgcaatcagcgtatgcggaaattccagcggcagaaacagccgcaccgcgcagaacaggtacagcagtaccatggacagaacgccgaaatgctgcttgaaccgcgtatgccgcagcaggtagatggctacgatcaacaagctgctccacaatagcgcggacagaaatgagaaaatagtgacttgcatatttatttctctttgctcttttcctcgatctgggcttcgtattcgtctaccatcttttccagttcggcaatcagcttttcgtcctgctccggtgtgcgctgctttttgtccttcttgaacagcgtaaccgcgatacgggcgaacagcgaattgttcacgccctgttcttccagcatataggcaaggtattcgtccttggtgagtgtggggacatactgttgtgcctgatagcgtccctcctgcgcgattccgacaactttaatgaactccttatcgctcaaccagcgcaaaaccttgtgaatgtagtttttgctccaatcctgccccgtaagcaggcggctgagttgggaaacggtaagcggttcgggcgtttgccagaacacattcattacgatctcttccgagtttgacatttgatatttcttcacagtattcacctttcagtacagtaaccaaacgggtttctgttagcttgcttatataatacatactaacaaggtcactgtcaatacgatttgtgaaaattcagtgtaaaacataaaatacaaaagtaaatattgtgcgaaatgcacagagtcaaatatactcctcgagtatattcattttcttttgcgagcattgaatccagttcttcactaacaacaaatttgaatggtgaaaccgcgagatctcctgtagcactcacatagtaggaatatttccagagggaaactctgccttgatgctagtctgcacccatctgtatcatgcagccaacaatcagcgggatgtttgatggttacattcaacacatcgtttgtagcctcctagctgtatctcataaaaatatcccccaattccggcgctgcttgttgagggtttcccccaagcccccatgaacgcagaatttcattctgcggctgcgcgtccgtgggacgcttttgaccatgatcagctcaccgctggtcatggtctttttcttgttcttttttctgttcctcatccatttttagtagacgatccatattggcctttgccgccagcagctcccgcatttcctcacgggagcgccggtactcggcataggtctttttcttttcctccagcagccgagcatattcagcttgcagttctttaactttgggcagcttcttgacccccatatcatcaaaggcatttttttccgcctgatgaagcagcatttcttgctcatgttcctcgcggaatttctttgaatagccagcttttcggtaggctacataggtgtcacgagtcttggcatagttgatgatgtgggttcgcaagatagcaatctccgccatgcgtttctccgctgccttaatttttgctgatagctcattatggtgagccgtggccgccgcagccttttcctccagcacagcatactccagtaggttatgctctgtgagataattcacagtctgtgccatctgtttcagattaaagaccttggccaaccgcacatacccggcaccttttccggcctggagctttgcctggatgtcaaccagcagattgaccttcggcggatctgcctgcctgaccgctttctgacagggtgtatgctccttttgaccggcgaggacacccagcagatgctccagggtgtagccatcgcccagactctccaggcgggacactttgctccagccggggagcttcaaacggtaggatttgccgcgcttggatacttcacagccggattcccgaagcagcttcagcagttcgtccaggtcaacaggcttttgtgccagggcgttgtcaatggcagcacggagcaattcccgatgggagggcttcgcctgatcgcctagccattggtcgtaacttttgccatggggatttgggttctcgacaatggacagtccgttctcaatgcagatggtgtcgctcaatcgacggacagcttttgtgctgccccaaaaattgcggaacttccggtcacagtccaggttgaccgaactccaaatgatatgattatggacatgggccttgtcaatgtgggtacaaaggataaaggcgtgtttgcccttggtgaaccgcttggcaaattctacaccgagccggttggcttcctccggggtaatttccccagggcagaaagattggcggacatggtaggcgattacatcatctgcgccccggacccgtccggtggcggcaatatactggcgcttggccagcatgaactcggcgtcggccacacggctgtcacactcatagccggtgatgagcctgccgtggtcggtcttttgcaggttggccacatagtcgataattttgctgatggcacagctctcagttcgacccttgccgatatgcagcggcataatgcgtgtggttgccattactacgatacctcctttgaaaataaaaaagcatagcaacctaccgaagcagaccgctatgccaattattctaaattaattcaaaaataaaagatgcaaaatcaaaaaacgattagtactgctttattcaacggaaaaagcaagcactctactttgtaaatatctctaaatcttttttgctaggctttctttcaaacttaagcgtagagttgacagacacaacatcatacatgggaactatatgtgtttcccaatccaagagatagaacattctagaaggtttttgcggtatagtcacatcaatattatgaactgtagctaaatctttgtaatagtacatttctaatatgaacaatgatgcaagtgcatcaattacatgttcaagactggctaattgaaatagtttttttcctatatattgggacttatatgttttttctcctaatggctgttcttgtcctgcatattctgagataactccgttcctgttgtgtttattttgtgtatatgcccaccaccattctggggcacaatttaatttcggattgcgatgctcttgaggattacacttccaagtatccattggcattgtaaagtaatctggagcaactttcacttgaacaacttcttcaaatatggaaggcctttcctgagaaaaaacagctgcataaaacagaatgtctttatgtttatcttgtactctattttcaattttagataattcgcctaagaactcacagtacgacttacaaacaatatcaaactctgagcctatagctaataactgctttaataactctatcgaaaaagttggcttattctcatcgcagaatgcaatgtaatccgacattttaattaagtctgcttctaaattcaaatataaatcccaatatatggccgaaaactcaaaagtattcatacaactctctccatctgttatgtagtatcgaataagttaacttcattcaattatatatccttttacacatcttcttcaatatggcgccgtaaattgagaacactcaacatacaagctacaaaaatttctatatagaaagatccactttttattgagctatttgatatatcatcgatgatttttatgttcatctgtaaattgtatcttgtagtaagtaccaaaaatcctgcaccttgcctagcaacccaaaggccagcttcggtagaccaaaagggcttatgctaaacgcgattaccagcagaataaggccgttctgcggggagtatgtcatcaggacggccacgcccagcagggcaatcaccgtactgagcaaccccaacaccaagccggacacatagaccagacccacgcaaatccagatggccagagtgagcagcaggatcaccggcgcaatcacaatcttcaaaatcagcttcaatgcggtcatttcatggcctcctctcgacgatccaaatacttctggcacagacggcggacctgctcctcgtcgacctcgttttcttctcggcgtccctttgtcagctgaatggaggcaaaggattcgtactcgaccagcagatggtcaaacagttcctccggggtccggcacacatctccctcgcaatagggcgggtccgggggcgagccgttgaaggacacacagacatatccgtaccggctcttgtagacttccagctccatatcctgcgccagatagtcctcgaaaatctctaaaaccttttcaaaggtcaacattggtatctcaactcctttgtgagatgtgagaacactttgctatctgcctttattatccggcaagccccgtcaaaaggcaaggatacagacaaaaagaaaaaacagagggaggcgcggcgaaaagaacgccgttcctccctccgcagatgggatatatacccctatcacgatagattggagagctgggtcaggatttctttcacgccctttcatagctgctcctgccgttgggctatatcttccaggtcagcgtcgtagacacgcccggtctcatgcactcggcgggtgagctggttcagattgttgctgctccggcgcattagggacaccagttccttcagctccggcaggtccagctgcaccacataaccgtccagggccatctttcgcagataggcttcccgattcttcgtcccaagttgggacattttctgctcgatcagcgccagctcctccggggagacccggaaattcacctggacctcccgcttgcgcttcggggcgctcatcgctccggctcccgtttcttatgggccggagctttgggggcggcctgtttcggttcctgtttcaaatgctcccggacagaaggtcggggctggcgcagctgcttggagcggtcctcgctggccaggatggcggcataggttccaggaagtcccttcataccggtaaacgacagactgcgaaacggcaggagattcatcagccggtcatggtctttgctcccggcacggttcagaaactccggggaaatacgggccatgtaatgggtcccgtgggggctgttcggcacatccggtgcgcgcagctcccgcaaaatccgttctgcctctgtctggatgtcctctgccgtcaacggctggcggtgcagatgttcctcacgcaccagatcaataaacccgttcaagacagcgggatggctgtttaccgcatagccaacccggacggtatcggagttatagttggggatggtctttgcccattccttgttgcggggcgagtagcgcccatcccagtcctggagctggacggtgttggcaaggactagcatgacccggtccatgccgtaggtctcgatcacgcccttggcgacatcgtggctgagatacatcccgtcgaagtgttcccgcaccgccgcttcaatggcctccttgcattggagattggcgttgttggaggcccggtactgctccagctccccatgctctttcgcataggcagccgagtgaggatagatggcggccttccgcagctccgcctgagttctgcacacatcatcggccctgatttcgatacagtctcgaaccacatccatgtggtcggtctccaccttctcaaagtagtggtacacatcggccagcggtctgggcgaatccagcagcgcttgggcctgggcgtcggtcagctccagctgctccatcgccatcacgatgtcctcccgaacagtgtactcataggcatggttcaggacttctgccgggg

SEQ ID NO: 12848 - DNA, 17668 bp, Unknown
  gut microbiota DNA sequence
aactcgtgcggagatggcgaagatgatctacgtgctgcgcactggtaactctgacgcttctgcgtacaacaacgacaagaccacctttaccgacatcaagggccactgggctcgcggctacgtcaagtactgccagtccctgggcatcatcgctggtcagtctgcaaccacgtttgcaccggatcagaccgtaactgctcaggaagctgctaagatgctgctcgtaaccctcggctacgacgctcagaaggcaggtctggttggtatcaactgggcttccaggaccaacgctctggctgacgagaacggcctgctcgaggatgttaccacttccttcaccggtccgtgcccgcgtcagtacgctgctcagctgatctacaacgcaatcgacgcttccactgttgtatggcgtgacgatgcttacactaagtacaactacaacggcgccgagaacccgaccatcggcgagaagtacatgggcctcaagtatgctaccggcatcctgatggcttccggtaaggttggcctggacaacaccggcgcttctaaggctctggttgttaaggctgacgagaagcagaccgttctgaacaccgagtacaaagctaacgatctgatcaagttcaccgacatcaagaccgactactccgatctcctgggcatggctgttaaggttatgtacaaggacaaggacaaggtttacggcgtttacgcaaccgacgacaacgatgttaacatcgctgctctggcttccgatctggacaccgtttctaacgagaccaagttcaaggttgacgataccaagtactccgttaacaagaacggcatgaccatctacaccatcggcgtagatgccaagggcaatgttgcaatcaagcctactcatgttgacaacactgttaaggacattagcgataagatcaaggctatcaaggacagcgacatggaaatcaccgttatctccaacgacaacgatgagaagattgacgctatcttcgttaacgacaagacctttgctaagatcaccctcgtaaacagcacctctgtttcctacaagccggttgcactggacctgaagggcaacaccaagggtactgctgtcaagctcgacctcgaggatgacgagccggaagtttacgacggctacaagaaggacgactacgtattcgtaggcgctgatctgtacaacgacgctgttgtaatcgagaaggctgctaccatctccggcaaggctgactcttacaaggacaactccatcaagctcgatggcgagtggcacgactatgtagacaccgacggcaagtacactgctaaggctggcaagacctacaccgcttatgtttacggttcttacgtatactatctggctggcgagtccggttccagcagcgatgtagacaccctgcttgttaagtccgttggcgactacaagaagatggacgaaggcgttgagaccaaggtttacttcgctgatggtaccgagaaggtaatcaacgttaagactctggttactccgtctgataacaagttcgatctggaagtttacgacaaggacaacaacgctgaccacgctaccaaggtcgagaaggataagctgatcaagggcggcaaggctcttgtagaggctaataccctgtatgcttacgagcaggacggctctgactacaccctgtacgctctgaacccgaactttgcttccggcgacatcaagacttccaccaaggttgagtacaacgataagaccgagaccttctctggcactgaagcagaggacgcagctccgatcttcatctcctacaacaactatgacaagtacaaggttatcactggttctgcactgaagaactacgatccgatgaccggcaagaagaattctgttctgctgcacgatgacgacaacgtcgttgctgcttacatcgatctggactctcagaagaacctgagcaactccgatactctgtacggcgttgttaagaagtcctacagcggcaaggagtctgatggcaccgatactgttatctaccttgacctggtaaccgctgacggcatcaagaccgttgagaccgaggagaccggcagcgcatccaagttccacaagggcatgatcgtttcgttctccggctcttacgagaaggctaacgacgacgtcgagatcgtatctgcaactcaggcatctcagaaggcagctaccaagagcgagtctcagggctacattgcaatcagcaatgactggtctgactccagcaagctggttcgtccgtacacgaacgtatacttcaacaacggcgacaccgctttcgacattgcttccgctaaggttgtatccgactccgtagtcatcaacattgacatggacggctacaaggctgacgatgctactccgtctaaggctgaggagttcgagaacctgaagttcaatggcactaccgtagctaagggctactacgcaaacgcattcgtaatcgttaacagcgataacgagatcgaactgctcgtttacgaaacctccaaccgtatccatgacggtggcgacgacgaggttatccttgctgttaagtaaggtttaatccccgagttaaaggaacccccgctctctgagcgggggttttcttatgccctttaccgacccaaagcaaaacccccggcttacttgccgagggtttcgttattgctgaacttgaataccgtcataaacaggattttgatgtcaaacagcagcgtccagttctcgatatagtaaatatcgtgctcgatgcgtccctgtatggacgtgtcgccgcggaagccgttgacctgcgcccagccggtgatgcccgggcggacctgatgcttgaccatgtacagggggatgctctccttgaaccggttgacgaaaaaggggagctcggggcgcggcccgacgagactcatgtcgcccttgaggacgttgaagaactgcggcagctcgtcgatggagaatttgcggatgaacgagccgaatttcgtcttgcgcgggtcggagttggtgctccagccggtcgtctgccggtcgtttacgcgcatggagcggaatttgtacatgtaaaacggctttttgttcagtccgacgcgctcctgcctgaacaggatggggccgggcgaggacagcttgacgccgaccgccgcgaacagcatgagcggcgaggtgcagatgatcagtatcagcgacccgatgatgtccatggcgcgcttgaggaaggcgttgccgatgttgtcgagcggaatgtggcgcagattgacgagcgaaacgccgccgatctcgtcgatcgccgggcgcgagggcatgaatttgttgtagaacgggatgagagataccttgacgccgtttttctcgctgctcgcgatgatgccctgtaagtaggtgtattcgttcgcctcgagcgcgatgacgacttcgtcggggttctgccggtcgagaacgttcgcgatcgcgtcgtaggtgccgaggtaggatatgcccggcagacagtcgcgcggcgcgagatagtggtcgatgcagaagccgagcgtgcggtcggcctgtaccgcgcggcagtacgcctgcgcctgctcgccgcagccgacgagaagaacgtgcttgaggttgtagccgtgctcgcggaaccggcgcagcacgcgccgcagcatccatcgcttgaccgcgacggaaacggtcgcgaggaggaaaaagatgaacagcgtccaccgggacaggtgaaactgcttgcagacgaacaggaacgccagcagcacgccgaacaggatgacgttgctgcgcagcagcagactgaactcgcgcaggaaattcttcgagcggaacgagtcgtaaagccccatcagtccgtacatcagccagaacagcggcgccatgcacaatatagtcgtcatgtagtacgacagcccgacgtgcccggggatcccgtggaacagatcgaagcggataaaataggcaaacgccatgcaggggaaaagtataagcgcgtccgtcagaccgttgatctggttgagcgcgcgctgattttccttaatcaaacttgcagcctcctgaaatacttaaatttataatttattctaccataaatggcaggaaaattccatcatctccttgacaagaactatgctctggggtaaaatttttagagtaatatggaaaagtttcgcagaccgcggctggcggacagactgcggaaaacgacgttgttttttggccgcaggtgcagttgcctgcgcttttttattgatggtggtgagatagagtttgaaaaacagcagaaaggtgctgtatgttgcctcgacattcggacatctggcatcttttcacaagccatatctggcgtggctggcgcagcagggcgcagcggtgcacgcggcggcaggcggcagtacggccgagctgccgggcgtttcgcggtatatcccggtctcgttcgagaaaagcatgttctcgccgcgcaatttcgccgcagtgatacagctgcgccgcgttctgcgcgaggagaagtacgacatgatcagcgtgcatacctcgctcgcggcgttcttcacccggcttgcggtgatgacctgcggaaagcagaggccaatcgtgatgaataccgtgcacggctacctgttcgaccgcgatacaccgccgctgaagcgcgaaattctgcttgcggcggagcgcatgaccgcgccagtgaccgactggctgctgaccatgaaccgtcaggatgagcgtatcgcgcggcagtatcgcctgggacggcatatcgtgcagacggacggcatgggcatcgatcttgcgcggttcagccgcccgtccgcgcccgagcgcacctggctgcgccgtcagctttcgctgagggacgatcagctcgtgctcgtctacgcggcggagttttccggccgcaagcatcagtccatgctcatcgaggcgatggcggagctgcccgagcgcgttgtgctgctgctgcccggacggggcgcggcgctcgacaaatgcaaggcgctggcagaccggcttggagtgcgcgagcgcgtgcggtttcccggcttcgtgtcgaatatcgaggactactaccgcgcgtccgatgtctgtgtctcgtcgagccgaagcgagggcctgccgttcaacgtcatggaggcgatggcgtgcggccttccggcggtgctgacgaacgtcaaggggcatgaggatctggttcgccccggcgagaacggcgagctgtatccttatgacgaccggcaggcgttctgccgcgcggttcgggtcgcaggtgagccggcggtacgccgcatgatgagcgaaaaagcggaaaaaagcgtgcagaaatacggtctggataccgtgtttcccgcgctgaccacattatattatgatgcgctgaccggaaaaacgggacgcgcggcatctgaggaggaaaactgatgaaacaaaaaccggctcagtccaaaaacggacaggcgaagggaggcgttcaggcaaagcccgccgcgccgagcagcgcccgttggggactgtacaccatggcggcgatcgcgctgtggatcatcacctgcttcgacaataacggcagctatttcacgcagaaggtggtcggcgtgctctgtacggtcggtacgctgttcatgatgctgtttgcaggcaaggacaaggtaaagcgtctgctgacgccgccggcgtttgcgctgtttgcgtacatgctgctgtcgggcgtatccacgctgtatgcgcgctcgcgcaagttcgcgatcgcagaatttgcggtctttcttgcggcttttgcggtctatctgtgcatcgttctgttttcgaatgacggcaggaccgccttccgccgagccgcggccacgatcgctgccgcggcggctccggtcggtctgctgtccatcgacgcagcctcctgcaatctgctgatgcgcccggtgcgcgtcatcatggaggcgatcggcgcaggctacggcaacaccggcggctacttttactcccgcctgaacaccattttcggcaacccgaatacctacgccggcttgatgtcgatcgcgtgcctgttgtctatctggctcgtcatcacggcggcgagccgcagccagaagatcctgtgcaccatcctgctgatggtcaacgcagtctcctatctgctcgcgttctcgatgggttcgctcggcgtgtttgtcgtggcgtgccttgcgatgctggtactgagtccggcagaaaagcgcatggatctgttcctgctgctcgttcagacggcagtcgttgcgctgatcgtcggcgctgtttcggtcaagggcttcggtgatgatgtgaccggctcgttcctgccgatgatcatgctgatcgtcggctgcgccgcagcgtgcgtgctggagatttttgtgcgcgagaagcttgtcgcgcgccttgccgacaagggaaaactgctcatcggtctggtcgcggcggttgctgtgatcgctgttgtctacctggttgcggcgctgaatgtcaccggctcgtacacctttggcacggagggtgagttccgccgtgcgatttccctgccggcaggcgactattcgctctccatgcaggcggacggctcgacctcggtgcgcgtcacctataaaaacaccaacaatctggttcagaacaacgaaaccgaccttgccagcggctcggcagatgctccggtgaccttcaccgtgccggaggacagcaagctcgtgttcttctacttcggcggcgaacagggcgcgacgctgaacgaggcggcttacaccggcgcgaaggacggcagcgtaaagctcggctacaagctgctgcccgctttcatcgcggaccgtattcaggacctcaccgcaaacggcaacgtcgtacagcgcggcgtttaccgtcaggacgctatcaagctctggaagacctcgccggtcatcggccgcggtctcggcggctttgaaaacggtgtcgtttcggtgcaggattactattacgagactaaatacgcccataaccactatgttgagtcgctgtgcgacctcggtattctcggcctggcggccttccttgcgatgctcggcacctcgatctgggcgctcgtcaagagccgcaaggagaagccgcttatcgtcatgctgctcggcgcgtgcgtgcttcagatgttcggtcaggctatcagcgacgttacatggtcggtcggctgctgcgtaccgacgttcttcgcggtgctcgcacttgtgacgctgcactgcggcgacagcctgcggctgaatgtgccgaacaagagcaagggcggcgcggtccgctggccgatcgcggcggtttccgctgtctttatcgtgctcatcggcctcaatctgatcgcgcagagcaagttctcgagcgacgagctgacgctcgatgatctcaagcagtgcgcgtccatcgacctgttcgagactaacgactacaagctgtcgtatctgatctcgggcggcaatgaggagggcgtagccgaccgctatgcggccgatctgtcccgcgtggactccaacgccatcgccattccgcttgcgcagtattacgccggtgtgggcgactacaccaaggcgctcgatgcgctcgaccgcggcgcgaaatacacgcgtgcaaacgctgaggtatggcagaagatgttcagcctgtacgagcagatgatcgatccggtcggcggcagcatcggcgcggcgcagtggctccaggatgatacctatctgaaccgcatggtcaagggctacgagacgctgtgccaggtcaacgcggaccagcttgatgatgtgctgttgacggcggagaacaatgcgttccttaacaagctgcttgcggcagacgcgctcgacccgtatgatttcgtcgacgcgctcaccattttctcctcgctcggtctggatacggcttatctgccggatgcggacggaaacggcgtgccggactgcgcggaggtgcaggaaggcagcgtaacgtggaacggcggtgcattcactgtggactcggacagcacagtcgtgttctcgaccgtgctcaagaacgaaggcagctatgagctcgctgtcgagagcagcgaccttggcggcgttgcggaggcagacgtagacggcgcggcagtgacgctagatgcttccggcaaggctgtcatcgaggcggaccgcctcggcgacagtgatgagccggtaacgatcgcgctgcatgtcagggccggcacgacggtctcccatgtaacgtggaacaaacagtaaaaaagaaaggtcatccttgaaaaaggatgacctttttacgcttcagcgcgcacagaaataaagttttttcgacagctttaaaatcccatcggatggctgcggtgccagttccatgcggtttgcaggatggtgctgagtgcgctgtagcgcggccgccagccgagtgtgctctgcgccttctccgaggacgcaacgagccgagccgggtcgccgctgcggcgcgccttttccacggcagggattgtatgaccggtaacgcggcgcgcctcctcgatcacctcgcgtacggaaaacccctgtccgctgccgaggttgaaggcggtgctttcgccgccgcgcagcaggtattcgagcgcaagaatatgcgcctgcgccagatcgcacacatggacgtagtcgcggatacaggtgccgtcgggcgttgggtagtccgagccgaacaccgagatctcgctgcgctgtccgtttgcgacctgcaggaccagcggaatgaggtgggtttcggggaaatgcgcttcgccgagcgaaccgtccggatgcgcgccgcaggcattgaaataccgcagcgcggcgtaccgcaggccggtcgcggccgccgtccagcacatcatgcgctccatgacgcgcttggtctcgccgtagcagttagtcggatcgagagcggcagtttcctcaatgggaatctgttcgggttcgccgtagactgctgcggaggaggaaaaaacgatcgttccgacgtcatgcgcggtcatctgctcgagcagtacgcgcgtgccgctgacgttgttatcatagtagcgcagcggcagtttgccgctctcgccgacctgcgagaacgctgcaaaatgaattacgccgtcgatgttctcctgttcgaacaggcgggcgagaaaggctgcatcgcgaatgtcgccctcataaaatcggcaggccgccggtacggctgcgcggaagccggtgctgaggttgtcggccacgaccacctgatagccggcctcgagcattgctcgcactgtgtgcgagccgacatagcctgcgccgccggtcactaatatcgtcataagtacacatccttgattctactcatataattttatagtagtggcagaccgtcggtttgtcaatagaaatggtaaaaagtgcagggacaggaattacttcctgcccctgctgtgcccggtaaaacgatacttgcagaatgaaagatatggttcgcgatttaccgaatgcctgttgttaaatttacttttcgagcagcgtccagtcgcgtgcgtcgcggatcttggtccacttttcgtacttgtcggcgtcgctcttgtccgagtaatcgtggctgttggtagcctcctgcacggcgagatagtaccagacggacgcatccgcattatccggccacttgatcatgtcatcgagcagatcctcgctcttttcgggcaggcggttgagtacgcggttgacgagcgtcatcgcctcggcgcgggtgatatactggtcgggacggaaggtgctgtcgggatagccgttgatccagcccttgtttgcggcaacgccgatctcgtccttcgcccagtgagaagcgatatccgagaaattcgaggtggtgttcgtatttttgtcgtcgaaacgagctgcaatggctgcgaattccgcacgggtgatcggtgcatccgggttgaaggtgccgtcggggttgccctttacgatgcccatcgacgagagcgtggagatcgcgtggttgaaccactgaccgcgcgaaacgtcggacaggctgttggactgggtggagtttgcggtgcggacatcctcggtcagcagacggaagaagatggtcgcgacctcggcgcgggtgatgctgctgcccggctttacgttgccgtccgggtagccgacgatatacgcaaagtgatcgtcgccgttcagaccggtcggtacgtcatccgggatgtcgacagtcggcttgcggccgccgccaccgccggagctgccgccggagcggtaggaccatacgccgacgagcttgacgtcctgctggaggttctcaagcgaggttacaatatctccggtgccgttgatacgccagccgctgaacgtgtagcggctctgcgaggtggtctgcgcgggcgcgaccgtgtagctgccgcccattttgaccttggcagaagccgggcgattgcctgcgtcggacggaatatcacccgttacttcataggtgacattgcagaatttgccgtgcgcggccttgagcgcgagcgcatcggaaacggcctctgccttgacttcatactcatcggcgtaatactcagtgtctttaccatcaccgttccagcgcttttccttgccgtcgtgataccagccgacgatcgggtctttgcagtcgtccagtacccagttttcgccgacaggggaaagggtgagggagccggtgtaggttacggtgtttttgtctctgtccatgccgtcgccggtagtgttgtagatgtcatcgccagcaacgctagcgcggttgttgtataccttggcatcgggggcaatggtaatatcaccgcggttctgaataccgccgccgtacagagccttgctgccgttgtttgtgatagttgtacccttgccgatgtagagcgtaccgtcgttgttgatagcggaaacggcgttgtcgaccagatttaccgatgcaccgtcagcaaaggtgacgtttgcggcataggtattgtagtaataatatacggcgagagcgccgacggaacgatcatcggtattatccagatctttgcccgtgccggtgatagtgagtgtcgtgccgtcctgtacgtcgatattgccgccgtagaggaagataccggcagagttattgtcctccatcgtcagagaagaaccgtttttcatcgtcagcacatcggtcttgttgtagccggaaataccgtaatcgttgccgctgatttctgccgtagaatcatcaagcgtcaacgggcatctaaccagaccctgattggcgcagttcagaacacggagagtcgaaccagtgacggtcgtaataaaacgagtcatgccgttgattgcagaattttcaatcaaaagatgagagtcgttttcgatgttcagaagtgcgtaattttcagccatcattgccgtataggttgtgttccgaatggtcagcttagagccgccatatacattgatgacagcattaggagaggcataaataccgtgggtttcgatggtgcaggtgctgccttcgtctaaagtcagcacgccgtcgctgttcatggtaacagaccactggttgacattatcaatatcgttggtaaagactacgtttgccttattaaacgtcagcgaagcattgatattgagcgcatgattttcagtaccctgctcgggaatggtaatggtgttgctgttaccattgataacaacagcttttttaatcgtgccaacggtcagcgtgcaattctcaccaatctcaatcgtatcgccgtcctgtgcagcgttgattgctgcatccagcgtctcatacttcgtatcgccgattttcgcggtaaacgtttctgccggagccggggcaggcgtgttgccgttctcggaattgcctgcaccgccctgttcgccgccggtttccgccgagctgccttcgccttcattgccagaagcgccggtctgtacatcattgccgccgacagatgtgccggttttgtcaccgtcattaccggcgattgggtttgcgtcacccgtgtcgttagcggctgcatttgcgccggtatccacggtatcctggctgtctccggtatcatttactacattttcaatgccgttacccgacgctccgggaacgggtgtaccgtccgtagttgtcagcgtcgtggtttcgtctgctgcgccttcttcggccgcgagcgcggtcacgggcagcatagtgagcatcatcagaccggcgagagtgccggcgaggaaacggttatttctccttttcatgcaaaaacctcctctgcgtgcatacagacgcaaaggaggtgattttctgctgttcggcaaccggctgtcgtgcggaaaagtccgtttagaccctgtggctttgcggcaccggctttcgccggctgtgcctttttctgtacagacacgccctcggcgcataatgcacagatcaagttgtctgagctgagcgaaccggtcgttccgggcacatggaagtttgtgggttcgcccgcgcaacagtaaatcctgctgcaccctaattataccatagatgtaaggaaaagttttatattattttctcgagcatcacacaaaattcacatgaaacttttgtatcatatgcacaaaaatatcaaaaaatgacagaaaaaacctcccggcgcaggagagggcacggcaatattcgcgcgccgcagccgttttttgcgtctgcaaaaaaatgaattttcaagcgcacggaaagatgatataataaggaatataagcggcgcggcgaggcgcccgatcacttgcaaggagagaaaaacatgcctaaaaagtttctggaggccggtaagatcgtcggcacgcacggcattcgcggcgatttgaaggtgcagagctggtgcgacacgccggaggttctgtgcgattttgatacactgtatctggacgaaaagaccccggtcgaggtcaagagcgcacaggtgcacaaaaacgtcgttctgatgcacctcaagggcgttgatacggtagaggcggcggaaaagctgcgcggaaagatcctgcatctcgaccgcgatgatgtcgatctgcccgaggacctcgtgtttattcaggatattctcacgttcaaggtatacgatctgcgcgttgaccgcgtgatcggccatatccgcgacgttctgacctccaatccggcgcacgatatgtacgagatcgccggcgaggacggccgcctcatctatatcccggccatcaagcccttcctcaaggagatcgacatggacgccggcatcgtctatgtggaaagcatcgagggcctgatcgaatgaaaatcgacattatgacgctgtttcccgagatgatcaacgcagtcatgcgcgaaagcatcatcgggcgcgcacaggacaagggtcttgtcgaggtcaaggcgacgaatatccgcgattatgcgctcgacaagcaccataaggcggacgatgcgccctacggcggcggccgcggtcaggtcatgctcgcggagccgctttacctgtgccatgaggcgctgagcggcggcgaacatgttcatacggtgtttctctccgcacagggcgcgccgttcaatcagggaaaggcgcgtgagctgctcgcgaaggagcattttattctggtctgcggtcattatgagggaatcgaccagcggtttatcgacgaatgcgtggatgaggagatctccatcggtgatttcgtgctgaccggcggcgagatcccggccatggcggtcgcggatgcggtctgccgcatggtgccgggcgtgctgcccgacgaggaggctttcacggcggaaagccactgggacggactgctggagcacccgcagtacacccgcccggaaaactggcgcggccgcgaggttcccgaggtgctgctctccggccatcatgccaatatcgaggcgtggcggcgcgaaatgagcctgcgccgcacgaaaaaggaccgccccgacctgttcgtgaaattcgagccgcaggacaggcgcgaccggaagatcctcgaaaagatccgtcaggacggctgaaaacacagtatccccacgctgatagcgtggggattagtctgtcgataaagttgactttaacctaaaacagcactcgcgcggcagcgcgcattcaaaagcgtttgctttgcaaacgcaaaaaaaccgaggacatgcgcctcggtttttttactcttagagggagaaagtttccgaatgggaactttcggacgactcgtgttctgcgaagtcagaacacagattgtcggcgaaacgaagtttcgcgacagctcttttacggctccagacggttcatatcgcgcgggaacatggatgcctcgcggatgttgttcaggccgagcagctgcatggtcagacgctcgaggccgatgcccagaccgccgtgcggcggcatgccgtacttgtgcagcatggtgaaggactcgaacagctcggcgttcatcttgcgtgctgcaagcttgtccatctgctcctgataatcgtggatacgctggccgccggtggtgatctccagaccgcggaacagcaggtcgaaggacagcgcgagcttcgggtcgtccttgtcgtccatcgcgtagaacggacgctttgcggacgggaagtgggttacgaatacgaattcagagccgtactcctccttcgcccactggcacagcagaacctcctcgtccgggttgaggtcgtaacggttcttggacttgtggccgtacttctcctccatgatcttcttcgcctcgtggaagcggatggtcgggatctccttgatctccgggatgtcagccttgagcagggcgagctcctcggggcagtgctccttgacgtagttcatgacgctcttgagcatgccggtttccatagccatgacgtcgtacatcgagtcgatgtaggccatctcgaagtccagacccatgtactcgttcagatgacgggaggtattgtgacgctcggcgcggtagaccgagccgatctcatatacgcggccgaatgcgccggcgaggtactgcttgtggaactgcggagactgtgcaaggtaggccggatgaccgaagtagtccagcttgaacaggttcgcgccgccctcagcgcctgcaacgacgatcttcggggtgtggatgtgggtaaagccctggctctgcatgtactgtgcaaagccgtcagcgatcgcgccctgtacgcggaagatcgcctgcttgcgcggatgacgcagcgtgatcgggcggagcgggaggtcgacgtcgagcgacagacccatatacttcttgccgatcggcaccggcagctggtcatacggcttgccgaggaccttgaccgcgctcaggacgacctctacgccgtgctcagcgcgcggctcctcgcggactgcgccggtcacctcgaggaccatggcatcgcgcacgtcggagcgcttgatgtcgccgatcgcatcaccctggaaggtgcactggatcaggccgcgctctacgcgcatgacaacgaaggagaagtccgacatgtcgcggacacggtgtaccgtgccgcggaaggtgacctcgccgccgactgcgtcgcagacgcgctttacggtgtcaacatactgacccgcttcatgtatcatttccatattttcaacgcctctctaattgagcaatctcagatgtgttatattgtagcatgtttttgccgttatggcaaggtttttgcaccagagacagcggaaaaacagctttttttcgcggtacggcggcggagcggatgattatgcgcgtttctcgataaatatccatgaaaataattctttgcagggcggcttttctttgctataatagtataaagtacttttacgctttatcagatacaagagtaaaaggacggtaaaaatttaattttgggggaattaaagtggaattcttctctaacctgctcgcctcgcttccgggcgcggtggcacagggtctcatctggggcctcatggcaatcggcgtgtacatcaccttcaaggtgctcgaccttgccgatctgaccgttgacggcaccatggcaacgggcggcgcagtctgcctcgtgctgatgacgcacggcgtcaatctctgggtcgcgctgctgtgcgcgttcctcgccggtatgctcgcgggtctcgtcaccggcgtcctgcatacctttatgggtattccggccattctcgccggtatcctgacgcagctcgcgctgttctccgtcaacctgcgcatcatgggcagcaaggcgaacgtcgcgatcaatccggataactacacgctgctcgtttcgctgcgaaatgtcaagaaactcgttccgcagaacccgatccttgtcgttgcggtgtttaccgtggtggttatcgcgctgctgtactggttcttcggcaccgagctcggcagctccatccgtgcgaccggcgcgaacgccaacatgagccgcgcgcagggcatcaacgtcgatttcaacaaggtgctcggtctgatgatctcgaacggtctggtcgcgctcgcgagcgcgctgtactgccagtatcagggcttcgcagacgtcaacgccggccgcggcgcgatcgtcatcggtctggcagcggtcatcatcggcgaggtcgtgttcagccgcattttccgcaatttcgcgctcaagctgctgagcgttgcgctcggcgcggtcatctattacatcgttattcagtttgtcctcaccgcaggtcttaataccaacgatctcaaactgatcaccgcacttgtcgttgcgatcttccttgctatcccgtactggaagggcaagtatttccgcgcggcagtcaagaccaagaaggagggccgctgacatgctcgaactcaagggtatttacaagacgttcaacgccggaacggtcaatgagaagcgtgcgattgacaacctcaatctgacgctggaaaacggcgattttgtcacgatcatcggcggcaacggcgccggcaagtccaccacgctcaacctgatcgcgggcgttttcccggtggatgccggcacgatcaacctcaacggcttcaacctgacgcatctgcccgagcacaagcgcgcgaaatatctcggccgtgtgttccaggacccgatgatgggtacggccgcgaccatgggcatcgaggagaatctcgcgctcgcgtaccgccgcggtcagcggcgcggtctgcatgccggcatcacgaacgaggagcgcaagctctaccgtgagaagctcgcgacgctcggtctgggtctggaggaccgcatgacgagcaaggtcggcctgctctccggcggtcagcgtcaggcgctgacgctgctgatggcgacgctgcgcaagccggatctgctgctgctcgacgagcacacggcggcgctcgacccgaagaccgcagacaaggtgcttcagatcaccgaggagatcgttgcgcgcgataacctcaccaccatgatggtcacgcataacatgaagcacgccatccagtacggcaaccgtctgatcatgatggattcgggccgcgtcgtcgtcgacatcaggggcgaggagaaaaagcacctcaccgtgcgcgatctgctcgagaagttcaatattgagaacgacagaatgcttttgagcgagtaacctcgctcttctaagggggacgctgtcccccttagattctccaaaagttccgaagaaacttttggagataaccccctcgcccctgcacagcaggggcggctcgggacacaaggtgaattgccccgaaggggcaagagaaggtgccctggggtacgtgtccc

SEQ ID NO: 12849 - DNA, 1064 bp, Unknown
  gut microbiota DNA sequence
ggtcttgccattactgctccctctccttctccacaaattccctgacgaacgccagacagtcgcctacgaaattccggctcgactcggtcacgcgctcgccctttgtctgcgacttgccctcgacgtagtcgaacacgttctcctgcgccgcctgcgcctccttgatgatgacgttgctgcggatggtcgtgcggtagacgtccgcgcccatgtactccgcgatcttgccggtcagctcctgaatggtctttgtgacccgggtgcgctcggtgcgcgtgagcagcacgccgtcgattttgagcgccgggttggtgtattttttgaccgaacggtaggtgtcgtacagctgcgtgatgcccgaggccgcgaacgtctcggccatggtcgggatgagcagataatcggccgccgtcagcgcgttgacggtcagcagaccgagcgagggcggacagtcgatcagaatgtagtcataatcgtccgcgacgccgctctcctcgtcgcgcagcttctcccggagcgtcatttccttgccgacgctgtgcagctcctgctcgatgcctgcgaggatcgtgttcgccggaataatgtcgcaggcggcggtgtgctgaatggcctcgcgcgccgtgaccgtgcccttcatgacctcgtacatggtcgcgccgctctggttgtcggccgccatcgacatggacaggttgccctgcgggtcgcagtcgatcgtcagtacgctgaagccctgcttgtgcagaccggccgccagaatgcccgttgtcgtggtctttgccacgccgcccttctggttggccagcgcaaaaattgcagacatagtcgtccctctctttcttcgcggttttcgctgctctgattatatacccgtaaagttataacgtcaagacgttctgacgctgaaaagctgtaacgttttaactgcataacttcataacgttataacttctgcctgcgaaatcatcagaaaaatcatttcttttcccgctctttcgtccctttcgcccgaggttttagacgagaggtttgattaacgaagaataggtaggtaaggattt

SEQ ID NO: 12850 - DNA, 1005 bp, Unknown
  gut microbiota DNA sequence
gtattagccatgatatcagaacgccgatgaatgccattattggatttacaaacattgcgcttcaccagaacacggtttcagatattcatgatagcttggagaaagttcaaaaaagttcgaatcatcttctctctttgttgaatgacgttctggattttactcgcattgaaagtggaaaagttactatttcgcccgagccagtggacattactcaattgacagataacgtccaggcgattatgaatggacttctttataatcgagatcttaagtttgaagtacatcgagaaatcccaatgaacccatatgtccttgcggatgttgtgcgtatccgagaagttttggtgaatcttcttggcaatgctgtgaaattcacaaaggacggcggaaagattactttggatatcagcagttacccaggagcggatgagaaacatatcataactcgttatgttgttcgagataacggtattggtatgagtgaagagttccagaaaaaattattcgatccgttttcacaagaagatgatgctaatgccagaactcaatataagggaaccggtcttggtatggctatcacaaaaaaatatgtggatatgatgggcggttcgattgctgttgagagcaaaaaaggtgtaggttctacattcacagtggagatcccactggagttgcaagaacaggttattcaatcagaacaaaaacaacatctaaatagagatttgacgggtattcatgttcttatggctgaggataatgatctaaatgctgaacttgctacgataatactggaagatgctggtatgaccgtaacacgcgcatcagacggaaaagaagttgtggatttgtttaaaaatcatccacgaggcacatacgatcttattttgatggatattatgatgccaaacatggatggacaccaagcagcaaaagccattcgagccttgggtatagagcggtccgatgcagttacgattccaattatagctttgtctgcaaatgctt

SEQ ID NO: 12851 - DNA, 38403 bp, Unknown
  gut microbiota DNA sequence
cagtagttaagctcatttacggtgacaatacttggctggcgacggcccgggaagataactcaacgcgcacacggaacaccgatcctttgggatcggtgttttgtttttgttaagaaaacgccctaatgatttacgctgtattgatctctgtgtataatagatataatggtatatctctgaaatatggaggttgagaatgaacaaaattctgcgagaaaaagttcaggaagctctatcttccgtgcttccgatcacgctgatcgttcttgtactcagcatgacgatcacgccgatgccggtcggcacgcttgtcctgttcctggcaggtgccgtgctgctgatcgtcggcatggcgttcttttcgcttggcacggatgtttctatgacgccgatgggcgagggtatcggcgcacagctgccgaagacaaaaaatcttgctgtggtcatcgcgatcacactgctgatcggcattctgattacgatcgccgaaccggatcttcaggtgctcgccggacaggtcccgtccatcccgaacagcatgctgatctggacggtcgcagtcggtgtcggcctgttcttcgtgctcgcactgctgcgtacaatcttcaaaatacggctttctcttctgcttattctgttctatattgcagtttttatcttttccgcctttgtgccgaacgaattcgtttcggtcgcattcgattcgggcggtgttacgaccggcccgatcacggttccgtttatcatggcgctcggcgttggtctcgcctcgatacgaggcgacagcggcgcacaggatgacagcttcggcctggtcgcactgtgcagcatcggccccgtgcttgcggtcctgctgctcggcattttttattcgggcggcgacgctggctatacgcagatcgcagttccggagctcgaggacactcgccaggtcgcagcggaatttgttcatgcgctgccggattacatacgcgaggtcgtttccgccctgctgccggtcattgcattctgtgcgatatttcagctgatttttaagcgctttcacaagattcagctccagaaaatcggcatcggttttctgtatacctttgtcggtctggcgctgtttctgaccggcgtcaatgtcggattcatgccggccggtcattatctcggacagcagtttgcattgagcggcaaaagctggatcttaattccgctcggtatgctcatcggttacttcctcgtcactgccgagccggcggtgcatgtgctcaaccgacaggtcgaaacgattacaaacggcggtatctcgcagcgcgcgatgatgctcagcctgtcgatcggtgtggcgtgctcggtgggactggcgatgctgcgcgtgctcacgggcatctctatttactgcatcttgattccgggctacttgatcgcgctcacgctgacgttttttgtgccgaagatattcaccggcattgcgttcgactcgggcggcgtcgcgtccggcccgatgacaacgaccttcctgctgcccttctcgatgggcgcctgcgaagcgctcggagggaacgtgctgaccgatgccttcggcatcgtggcgatggttgccatgacgccgctgctgacgatacagatgctcggtctgctctaccgcttcaaacagaaagatatgccgcaggatacgctcgctgcggacgatgaggacagcattatcgtgctggagggggatacttgatatgatggagcatacaccgcagatgaccgcgcagagcggccttgcgttcgccgtagcggtcgttgacgtcggcaagggcgaaaagatactcagcctgttccgcgaggagcacgcgctgctcgactatgtgtgcatggcgcacggtacggcgcgcacggaaatgctcgacctgctcggcatcggcgagacggccaaggcagtcgttttctgcctcgcggcgagcggacaggcgcagcgtatcctgaaccggctcggaaaagagcttcagatgcgctacccgggacgcggtatcgcgttcaccattccggtcagcggcattggacgccgctggcacagcctgctgacgcaggcggacgaacaggaggagatccagatgaacaaaagcgaacagacaggcttcgatgtggtcgccgtcgtgatggagcgcggctacacgaacgtcgcgatggatgcagcacgcaaggccggcgcacgcggcggtacggtgatttcggcgcgcggcatcgcggaaaacgaggtcaagcgctttttcggcatcgagatacaggcggaaaaggaaattgttttccttgttgttaaaagtgctgaaaagaagcagatcatgaccgagctgatgcgagcggtgggaacccggacgcgcagtcacggactgatcctgtccatgccggtctccgacgcgatcggcctcgccgactgaagaagaaacacccgggggaggggcagaaatgcctctccctttcgcttttccacagccttgtgcacagcgtccccctttcccttcacaggttatccccaaagaaaaaaataaaagttcagaagatagtacaataaaaaaaatccttttcttacaaaagtaccaaagattttttcgccccttgacagacgcggactcacggtttacaatagtatttgcaagcaccgaatgagcacaatatatggtgtacaaaacggggcaacaccacgaaatttagtaatcgccgcaaggcggtttttgtatgagagagggatttttggttatgatagagcagattatcaagcgagacggccgaacagccccgtttgagctggataaaatcgcgaacgcgatctttggcgcggcgcagtcggtcggcggccaggattacgagatggcgcatgagctggcggagcaggtcgaaaaggagcttgaaaagactgtcagcgagaaaatcccgacggtagaacagattcaggacacggtcgagaccgtgcttatcgagagcggccacgcccgcaccgcgaagaaatacatcctgtaccgcgacgagcgcacccgcgtgcgtgagatgaacacccgcctgatgaaggtctacgaggatctgaccttcaagtcctccatcgagaacgacatcaagcgcgagaacgccaacatcgacggtgataccgcgatgggcaccatgctcaagtacggctcggagggcgcaaagcaattctacgagatgttcatccttgactcggcgcatgcagcagcgcaccgcgacggcgacatccacattcacgatctggattttctcacgctgaccaccacctgctgccagatcgatctgctgaagctgttccgcgacggcttttcgaccggtcacggcttcctgcgtgagccgaacgacatccgctcctatgcggctctggcgtgcatcgcgatccagtccaaccagaacgatcagcacggcggtcagtcggttccgaacttcgattactccatggcgccgggtgtgcgcaagaccttccgcaagctgttccgcagcaacctcgccaaggcgctcgaggtgttcggcgaggacgacaacaatgaggtggatgcaagagaactgaccgagcgcgtcgagcaggagaccggcaaatgggcctgcctcgccggcgacaacggctatgacgaggcgatggcaaaggcgctttccgagagaatggacgaaaaggcggtcgcgaagtgcatgaaattcgcgcgcaagtacgccgacaaggagacgcgcaagggcacctatcaggcgatggaggctctggtgcacaacctcaacaccatgcactcccgtgcgggcgcgcagatcccgttctcctcgctcaactacggtacggatacctcgcccgagggccgtctggtcatggagcagctgctgctcgcgaccgaggccggcctcggcaacggcgagacgccgatcttcccgatccacatcttcaaggtcaaggaaggcgtcaactataacgacggcgacccgaactacgatctgttcaagctcgcctgccgcgtttccgccaagcgcatgttcccgaacttctcgttcctcgacgcgccgttcaatctgaaatattacaagcccggtcatccggagaccgaggtcggctacatgggctgccgcacgcgcgtcatgtccaatatcgttgacccgtcccgcgagatcacctacggccgcggcaacctgtcgttcacgtcggtcaacctgccgcgcatcgcgatccgcagccacggcgatctggactggttcttcgaggatcttgaccgcaagattgaccttgtcatcgaccagctgctcgaccgcttccgcattcagtgcgccaagcgcgtgcgcaactacccgttcctcatgggcgagggcgtgtggatcgactccgagaagctcggcccggacgatgaggtaggcgaggtgctgaaacacggcacgctgacgctcggcttcatcggccttgcggaatgcctcaaggcgctcatcggcagtcatcacggcgagagcgaggaggcgcagaacctcggccttgagatcgtcggccatatgcgcaagcgcatggatgaggcgagtgagaagtaccatctgaatttctcgctgatcgcgactccggcagagggcctgtccggccgcttcgtccggatcgaccgcgagaaatacggtgttatcccgggcgttaccgaccgcgattactacaccaactcgttccatgtgccggtttactatccgatctccgcattcgagaagatcgcgcgcgaggcgccttatcatgaactgaccaacggcggccacatcagctacatcgagctggacggtgacccgacgcagaatctggaggcgttcgaggcggtcgtccgcgcgatgaaggaagccggcatcggctacggcgcgatcaaccatccgatcgaccgcgacccggtctgcggctataccggcatcatcggcgaggtatgtccgcgctgcggacgccgagagggcgagggcgtgccgctttccaagctgcagaagctcggcctttacaagaattacaacagcacgacgatcggctatcacggcgacccgaacgaggaagctgaccgtcagccaaatactctgaaaatcgtgagaaagtgatcggcagcggcggtgcaagtccgctgtccccggaatagaaaggatgtctgtcatggagaacaatcaggttatgcaggagcagcttatcggtgagggtgtcggcttcgagcgcatccgccgcatcacgggctatctcgtcggcacgctcgaccgcttcaacaatggcaagcgcgcggaggagcacgaccgtgtcaagcactcggtcaccacctgctgcccgatggagaaggagcatactgcgtaaatggaaggcaccattcgcatcgcgggaacggtcggggagtctattgtagacggccccggcttccgctatacgctgttcgtgcagggctgtccgcacggttgtcccggctgccacaatccgcagacgcacgactttgacggcggacaggacatcgcgctcgacacgctgctgaaggatatgtgcaaaaatccgttcgtaaagggcgtcaccttttcgggcggcgagccgttctgcaaggcggagccgctgtaccgtctggcggtcgagctgaagagcagaggcaagcacctcatggcctactcgggttacacctttgaggagctgatgcagctttccgacccctatgttaaaaagctgctcggcgagctggatctgctcgtggacggccgcttcctcatggaggagaagaacatcgatcttcgcttccgcggcagcgccaatcagcgcgtgctcgatgtgccgaagtcgctcgaggcgggcgcgccggtctgggcggagcagtacagataagctgtcacgaagctgatgtttcacataagcactgaattgacgaaaaaagctgtctttccgagaggaaatctccggagggacagcttttttgtgcagtattcagtttatgccgcccggtgcggcgagcggattgcgcatctcgagaacggcgtgagggacggcctgaccggcatggacgcgctcgcagcggccgatcggcttcatgccgaacgcggcagcggtctggagcgcaccgacgttgtcgagccggatgaaggaaacgacgcggtcaagctcgagccgcgcgaacgcacagctgagcatggcggacaggcattctctgccgaaaccgtgaaagcgcttttcgctgcgcacgatgcagccgagactgacggccggacggccgtcaagctgctccgcgagcaggccgcagagcgccaccagctcgtccgtctgcttttcgaaggctgcgacatagccgatgccgtccgtgcggtagcggcgcagcatatccgcgataaaatctagcgtatcactgcggtcatacggccggtcccatgccgccatggtctccgcgttctgaagaacgcaggaggcaagctcgagatcggtcgcgcgcaggcgacggaagtacagacgctgcgactgaacctcgagtaattcaatcttctccatatctactccgtatgcagagacaaaacggtgcggctttcctgccgcaccgctgaatgcctgtaattttacttggtgccgaagatacggtcgccggcatcgcccagacccggaacgatgtagccgtgatcgttcagcttttcgtcgatcgcgccgacgaagatctcaacgtccggatgagccttctgaaccgcagcaacaccttccggcgcaccgatgaggttcatcagcttgatgtgcttgacgccgcggcgcttgaggccgtcgatcgcagcgatagcggagccgccggtcgccagcatcgggtcgagcagcagaacgtcgcggtcctcgatgtcactcggcagcttgcagtaatactcgatcggctggagggtctccgggttgcgatacaggccgatgtggccgaccttggctgccgggatcatctccagaataccctctaccatgccgagacctgcgcgcaggatcggaacgagagcgatcttcttgccggagatgacctgtacgcgagcctcggaaaccggggtctcgatggtgatctccttgagcggcagatcacgggtcgcctcgtagcacatcagcatggcgatctcggaagcggcctcgcggaattccttgacgccggtggtcttgtcgcgcatcaggctcagcttgtgcttgatcagcgggtggtccatttcatgtacggttgccataatcgtagtctccttttattgaagtctgaatttgttatttgttctccgcgagacgcttcatgcgttcgcgttcggcctgcggacggcgcagatagaaggcgtcgagctcctgcggggtgcaggttctgccctcacgaatgagcggcagagcggcggccgcgacaccgaagccggtggcgtagcgcagctcgggcggcgcaagacgcagaccggtacagctgtctttaatggtattataacacaagttcgcgccgtctccaaccagaaaatacggagcttcgccgatttcttcggaaagctcggtcattttgagcgcgcggtcatcgcacagacggcgcggcattaggccgtcgacctcgaagagcgcattgtatacctgaccggcgcgggcgtccatgacgcagcacaggctgccgccgagagagcgcgcgccccaggccatggcctcgagcgtcgatacgccgacgcacggcctgtctgtgccgagcgcgagacccttgactgtcgcaacgccgatgcgcacgccggtaaacgagcccgggccgtgtgcgaccgcgaaagcatcgacctcggagagcgaaacgccgcagtttgcgagcagcgcctccgccatcggcagcagggtgcgcgagtgcgtcagaccgcagttctgaaaggactgtgcgatgagcttgtcgtcctcagtcagagcgaccgaagcgctcaccgcagaggactccagagcgagaattttcattgttccttcacctcgccaatcgtgaccactcggtcattttcggaatttccgtactgaatatgcacggttttgtagctgcccggcaggatatcggcagcattttcgctccattcgatcagcacgatcttcgagccgtcaaggtattcatcaaagccgatctcgaacagtgcctcgctgtcgaggatgcggtagagatcgaaatgcgccacatctgcacggtctgtgtggtattcgttcgcgatggcgaacgtcgggctggtgacgcggcccgtatagccgagaccgcgcagcacgccgcgcgtgaaggcggtttttcctgcgccgaggtcgccggagaacgccacgacatcgccggggtgcaggctgagagcgaatttcgcgccgagcgcctctgtctcctcgggcgaatgtgtgatatattccatggaaacaccttttctttgtatcatttcaatactatcatatcatgcggacatgaaaatagcaagaagcctttcattttgtcaaaaaactatcgtttttccgacaacctgtgttttgactccgcagaacacgagtcgcccgaaagtttccatgcggaaactttctccctctgggagaaaaggaaaggcacgccaagcgtgcctttcgcgcccgaagggcgcagtctcctgccgcattttgccttcggcaaaacaggcaggacaggcgcaccgcagtgcgccgcataaaattctctgtaaaagtccagctttgccggacttttacacctctgcccgcgacgtgccccagggcaccttctcttgccccgaaggggcaattcaccttgcggcggcgcggcctcgtccgctgtgcggacgagagggggttatcgctcccggtttctccggaaccgggagcgtatctaagggggacagcgtcccccttagacccctttagaagagcccggtgatcgtaccggcattgtccacgtcgatcttttctgccgccggaaccttcggcagacccggcatggtcatgaccgcgccggtctctacgacaacaaagcctgcgccggctgccagacgcgccgagcggacgcttacaacgaactggctcggacggccgagcaacgaagcgtcgtcggacagcgaatactgcgtcttggcgatgcagaccggcagacggccgtagcccatgtcggtgatgttcgcaagctccttgtgcgctgcgggcgcgaaggtcacgccgtctgcgccgtagatttccttggcgatcttgcggatcttctcctcgagcggcagctcgtcctcatacagcatatggaagtctgccttgccctcgtcgagcacggtcagtacctcgcgcgcaagctcctcgccgccttcgccgcccttggcgaatacctcggacagggcaacgcggacgccgcgctctgcgcagtgcttgcggatgaactccatctcctcggcggtatcggtcgggaaggcgttgatggcgacaacgaccggcacgccgaacttcttcatgttgtccagatgtgcgtcgaggttgcagatgccgcgctcgagcgcgctcatgtcgggggtgttcagctcggtcttgggtacgccgccgttgtacttgagtgcgcggacggtcgcgacgagcacgatgcagtccggagagatgccggccttgcggcacttgatgtccatgaacttctctgcgccgaggtccgcgccgaagccggcctcggtgatggcgatatcagcgagcttcatggcgagacgggtcgcctgaacgctgttgcagccgtgtgcgatgttcgcgaacgggccgccgtgcatgagcgccggggtgccctcgagcgtctgaacgaggttcggcttgatggcgtcgcgcatgagcgcggtcatcgcgccctcagcgtgcaggtcgcgcgcatagaccggcttgccggcaaaggtgtacgcgacgagaatatcgccgaagcgcttcttgaggtcgtcgagatccttcgccagacacaggatggccatgacctcggacgcgaccgtgatcatgaagtgatcctcgcgcggcacgccgtttaccttgccgccgagaccgatcgtgatgttgcgcagcgcgcggtcgttcatatccatgacgcgggtgaaaacgacgcggcgcggatcgatgccgagcacgttgccctgctgcatgtggttgtcgagcatggcgcagagcaggttgttcgccgcggtgatcgcgtgcatgtcgccggtgaagtgcagattgatgtcctccatcggaacgacctgcgcgtagccgccgcctgccgcgccgcccttgatgccgaataccgggccgagagacggctcgcgcagcgcgatcatggcctttttgcccatttttgcgagcgcctcgcccagaccgacggtcgtggtggtcttgccctcgccggcaggagtcgggttgatggcggtgacgagaacgagcttgccgtccggcttgtctgcggtctttttccatacgtctgcggacagcttggccttgtacctgccgtacagctcaagatcctcagtgtccagaccggccgccgccgctacctcggtgatcgggcgcatctggcagccctgtgcgatttcgatgtcggataacataacattcctcctgataactggagcgcggcgaacggatgtcgcccggccgcacacacttaaatgttaaaaccattataacaatgttctgcacagttttccagtgaggggcgcgaaaaatttgacgaaattcaatctcgaaaaatgtgcggcattgtggtatgatataatttgatattataatttccgtatggaatgacaagaacacggaaaaggagggtctgcatggaccttttcaaatcggtggcgcattatctgaaaaacaccgatctgtatctggcggtcatcgcctttatctgctccggctatggcatggcgctcatctactccgccacgctcaacccggtctcgatcaaggatgacggttcgacgaaaaatctgtatgtgcagggcgcggccatcctgatcggcttcggcgccttcgtgctgatgagcctcatcgacctggaggggctgcggaacaggtggaaaaacttcgttatcgtgaacatctgccttcagctgctgctgttcacgcctctcggcatggaggtcaacggtcagcgcgcgtggctcaatctgggcgtgaccagccttcagccgggcgagctcggcaagctgatcttcatcttcacgatggcggcgcatatctccgaggtcggggagtatatcagcgagctgcgaggtcttgcggtcatcgcgctgcatacgcttatcatgatggcggcggtcgtcgtctcctcgggcgactcgggcatggcgatccagtatttcatgatcgcggtcattatgctgttcgcagccggtctgtcgctcaaatggatcgcgctcggcgcgggcgtcgcggtggcgagcgtgccggtgctgtggaattttgtgctgaagaaatatcagatcacgcgaatactcgtgctgttcgacccgtcgatcgacccgcaggctgcgcttcagacgacctacggcaagatcgcgatcggctcgggacagctcaccggacagggcctgacgcacggcaccatgacacagctccagaacgtcccggagaaccagaccgactatatcttttcggtcgccggtgaggagctcggctttctcggctgcatagcgatcatcctgctgctgagcctgctcatcgcgcgcctgttttatgtatcctatcgcgcgtccacaccgttctcctcgctgctcgcggtcggcgttgccggcatgttcctgtttcagacgttcatgaacatcttcatgaatgtcggtctgctgccggtcatgggcctgacgctgccgtttttttcatacggcggcacctcggtgctcacgatgtacgccgcgctcggcatcgccgcgggcgtgcgcatgagggaaaagccgagctggcttcagcactgagcgcttttaccaaagtaaagcggtgaaaacataccggaattgtgtaatatgattatttttgcgagattttgcaatttttgcggcggcatcttgcaaaattatcggatttcctgtataattaacagtataaatggagggtaaaaaaatgatgacaaaccgcatagtaaccatagccgcattctgcgtctatttgatttttatgctctgtatcggcatgtattttgtcggcaagaataagaccacgaccgaatacttcctcggcggacgaaagctcggctcctgggtcacttcgatgagtgcgcaggcgtccgatatgtccggctggctgctgatgggtctgccgggcgcggcatatctgtccggcatttccgccggctggatcggcatcggccttgcgatcggcacctatctcaactggctgctcgtagccaagccgctgcgccagtacaccaaggtggcaggcgacgcgatcacgctgccggagtatttcaagaaccgcttccatgacgaatccggctggatctcggtcgtttcggcggtattcattctggtattcttcctgttctacaccgcgtccggcttcgtttcctgtgcaaagctgttctcgtccgttttcggcatcccgtatctggtatcgctcacggtcggcgcagtcgtcgttatctcgtatacgttcgcaggcggcttcttcgccgtgtgctggaccgacttcttccagggtctcatgatgttcttctgcgtggttgcggttccgctgatcgcggttttccgcatgggcggcccggcggagttcatttcgagcgtcgaggcgttcaacccgaacttcctgagcatgtttgttgacggcgcgaccaatacgccgtacaccgcgatgggtatcgtctcgctcgttgcatggggtctcggctacttcggtcagccgcacatcctcgtgcgctttatgggcatttcctctccggcggcgatcaaaaaatcccgccgcatcgcgacggtatgggttgttatctcgctgaccgccgcagtcatgatcggcgtttccggccgcatggttctcggcgacggtctgctcgacggcaacggccagcaggagatcatctacatcaccatggtctccaagttcttcccgctctttatcgcaggcatcttcctgtctgctatcctcgcagccatcatgtccactgcggactcgcagctgctcgttaccgcgtctgcactgaccaaggacttttatcacaacaagatccgtccgcaggcgaccgagaaggagctgatgtgggtttcccgcggctgcgttatgggcgttgcggtcatcgccgttctcatcgcgaccaaccagaacagcacggttctcggtctggtctcctacgcatggggcggcttcggctcggccttcggtccgctcgttctgtgctcgctgttctggaagcgcaccaacaagcagggcgcttatgcgggcatcctggtcggcggcatcgtcgatctggtctgggcgcagctttccggcggcatcttcgacctgtatgagatcgttccgggctttgtctgcggtctgatcgcgattttcgtcgtcagcctgctgactgcggctccttcgaaggagatcaccgacgagtttgactcgtaccgttcctgcgaggaataaaaatgaaagcgcgtgtgcggcggctcctgcttgtgctcgcagcggcggcgctcctgctcgacgggggactgctgcttgccgaacggctcggcgccgcgtccctccccggggaggacaccgcgtattttcttgatgtaggcgagggagactgcacgctgctcgtttcgggcggcagcacggtccttgtggatgccggtacaccggagggcgcaccggcgctcgtgcgcgagctgaaaagtctcggcgtgcgcaggctcgacgccgtcattgcgacgcatccccacgccgatcatatcggcggcatggaggcggtgctccgcgcgtttcccgtgcgcagcttttacatgggtgcggaaacgcagagcgacgcgttggatgcggcgctccgccggcgcagactcacgcccctcgtcccgtatgacggtgagaggctcacgctgaagggcggcgcttcgctcacgttcctcggtccggcggaggatatcccggctgaccggatcaatgaccgctctctgatcactctgtttcaaaccggcagcgcttccgttctgctgatgggagatgcggaggagccggccgagcagtcgctcatgcggcaccatcccgggcttcggtgcgatattctgaaggtcggccatcatggctcggatacctcgtcctctcctgcatttctctctgcgctcggagcgcagaccgccatcatatcctgcggcacggacaacgactacggtcatccggccgaacaaacgctaaccaatctgacacttgcgggtgtacgcgatatccgcatgaccgcggaaagcggcacggtcgcgctcccgctcatcgcttacaaggagaatgctgtatgaaaaagaccggcatcatcgatcactttgaaggtgactatatttatgtagaaatcggtgaaaatacggtaaagattccgcgtgaaggcgctcctgcaatgttagcagagggcactgtcgttatcgtggaggacggccgcatcgtcgacgtggatgagatcgagacgcagcgcatggaaaacgatatgcgccgccgattcgagcgcatcctcggcgcaaaatccgacgtataaaccttaggcagcaccgcacagtcagagcatatgcaattatgcggtattgcttaatctgcaccaccaaatttcccaagaaggcaaggcgaaacacatggaaaagaaaccttttttgacactccagcaggcgcaggagatcagcaagacctatccgaccccgtttcatatctatgatgaaaaggcgatccgtgagaacgcgcgcaaggtaaaggccgcgtttgcatggaacccgggctataaggaatatttcgcggtcaaggcgacccccaatccgcgtctcgttcagatcctgcacgaggaaggcttcggctgcgactgctcgagctataccgagcttcagctcagccgcgcctgcggcatcaccggccacgacatcatgttctcctcgaacgtcacgccgaacgaggacttcaagctcgcaagcgacctcgatgcgatcgtgaatttcgacgacatcacccacctcgactactacgacaaggtaggcgagtggaaggagaccatgtcctgccgcttcaatccgggcggcgacttcgtcctcgaaaacgagatcatggacaccccccaggaggccaagtacggcatgacccgcgagcagctgatcgaggcgttcaagtacatgaagcagaagggcgtcaagcacttcggcatccatgcgttccttgcctcgaacacggttgcaaacgaatattatccggcactcgcccgtatcctgttcaagctggccgtcgaggttcagaaggaaaccggcgtgcatatcgcgttcatcaatctgtcgggcggcgtaggcatcccctacaagccgtggcaggagccgaacgacatcatggcgatcggtgagggcgtacaccgcgcctttgacgaggtgcttgtcccggccggcatggacgacgtttccatctacaccgagatgggccgctttatcctcggcccctacggcgcgctcgttgcaaagtgcatccaccacaagcacacctacaaggagtatgccggtctggatgcctgcgcggcaaacctcatgcgtccggcgatgtacggcgcataccaccacatcacggtcctcggcaaggagaatgcgctgcatgaccgcacctacgatgtaaccggcggcctgtgcgagaacaacgacaagtttgcgattgaccgcaacctgccgcgcatcgacatcggcgattatgtctatatccatgacaccggcgcgcatggcttctcgatgggctataactacaacggcaagctgcgctccgcagagctgctgctccgcgaggacggctcggtcgagatgatccgccgtgcggagaccccgaaggactacttcgcaaccttcgatttcaccggcctgttcgacgacatcaagtaaaagcgaaaatcgcaaacgaaaagggtacgccgtaaaaagcgtacccttaaatttttattcaaacagcagagaataggaagtataaaactatcgcgcggcagcgcgcataaaaaagcggttgcttcgcaaacgcagcccgtaggcctctatccttaaaatatttaatgagagcaaaaaccggggacatgcgcctcggttttttttactctgagagagccgaaagtttctgcataggaacttttggccgtccgtgttctgcggcgggaaccgctgtcagaacacagcttgtcggcaaaacgcagttttgcgacagctctcaaggtgtgtctccgtcaatgatgccctgcgcgatgtcgcgcttggggcagcggcggttcatggcctgctgttctatgtagctgtgcgcctccggctcggacattccgcagcactcgatgagcaggcatttcgcccggtcgacgaggcggatatcctcgatgcgcttctggaggcggcggttttcgttttgcagtccgctcagacggctgcgcgcggcgcgtgtcatgcgaagcgcctgcatgaacagcacgcgcgagagcggcttgggtacgacgaatacgccgtcgtcctccaccttttccgcgacgctgtccgcgatctccgccttcgcgagcaggataacgcctgcggtggtctcgcctgcggcgagctgcgccagctcgtgaccgaattcgtcgggcagcggcgtgttgaccaggacaaggtcaaattcgccgtcaacgagtgcgcggcgcgcttcgctgccggccatcgcacggcacagctgcgactgcacaccgcaggaggacaggaactgcgcgagcatcgcatgtgatttatcggtcgaagaaacgacgagaatacgttccatagagcgcgtttcccctcctttcggttgtctcagtagcgttcgaagtaaagctgacgctcggcagcggtgcggtcgtcggccagcgcgatgcggtcatgctcggcctgcttggcggcgaaaaaggctgcgcgcatcttttcgggcaggtattttgcgataaagtcgctgttctgtgcggtgcgaatggcctcgcacagcgactcgggcagcgcatcatatctggcgcggaccgcctcgctcgaggtgaacaggttttcctcgcacgcaggcgcaagctcgagcctgtcctcgatgccgtccagacctgcgtggatgagcagggcgaacacgatgtagggattgatgcagccgtcgaacgagcgcagcttgaagcagttgggcttgccgccggtcgcgagcgggacggtgatgagcggcgcgcggttctggtgcgaccaggtgatatacttgggcgcttcgaactcgccgagacgctggaaggaattggtgagcggattgccgaagatggtcatttcagcggcgcggcgcagcacgcccgcaatgaactgacggccctcctcggactcctcgatggacggatgaaacaggttctggccgtttttggtgatcgagaccgcgagatgcaggccgctgcccggggtgttctggagcggcttgggcaggaaggacgcatacaggccgctcgaggaggccatggacttgacgacccacttgaaggtcacgaaattgtccgcggcctcgagcgcctccgcggcgcggaaatcgacctcgttctggccggggccctgctcatgatgcgaggactccggctgaatgttcatctcctcgagcgtcaggcagatctgacggcgcacgttttccgccttgtcgagcggcgcgacgtcgaaatattcgccgtggtcgtgggggatggtggtcgggtggccgttctcgtcgagctcgaacaggtagaactcgctcgcggtgcacatggtcagcgagtagccggccttgcgcgcgcggcggctcgcctgccgcagcagatagcggccgtcgccctcgaacggcgtgccgtccgggtagcggatgtcgcagtaaaagcgaacgacgcggccctgtgccgggcgccacggcagcacggaaagcgtggccgggtcggggaacagcagcaggtcggatgcgtcaacgttgaggaagccgcgcagagcggacgcgttgaaatgaatgccgtattcaaaggcgcgcgtcagctcggtcggctggatggcaatattcttctggtttccgaaaatgtcgcagaacgccagacggatgaattttacgtcgttttcctgaataaactgtacgacttcgctcatggtggtatccatacggagagcctccttttcttttatccggacaggcgaaaaagctccgactgcaaaggggagcttttccgtaccggtctgagtatggtcttacgcctcgaaggtgtaaagctgcttgtagcctgccgccgggttcggtgtcaggacgaaatacttctgctccagcaggtcggcagcatttgcaccgaaatgacgggcgtattccttgatataaggcgcgatgtgcgtcatgtccgcctcagtcgcctcgtttacgaggacctgagggggaaggccggtcggcgctttatcacatcttagcacaattttgccgccgtgcatacccgttccgcagaaattgttgaccggatacgcgccgttctgaccgatgccgagcacgaggataaggccgcccgcctgatattcgccgaggaaggagccggccttgccgccgatgacgacgacggggaagtgctcctgataggccttcatgtggatgccgccgcggtagccgcagtcgccctcgatgaagatgcggccgccgcgcatgccgtagccgcaggcgtcgccgacgttgccgtggatgatgatgtcgccctcgttcatcgtgtcgccgaccgcctcctgcgcgttgccgaacacctcgagcgtcgagccgttgaggtactggccgaggccgttgcccggggtgccgtgtaccgtgatatttttgcccgaggagccgcagccgatgtagcgctggccgatcacgttttcgatcgtgatgctgtcgtccttttccgctgcctcgcggaccttttcatttacctgcttgtaataggtaagacctgcctgaattgtcgtcatcagtgtgcgcctcctaacttctttgcgcgttctgcgtgcgaaaatgccatgagctgcggcttttcgcgaatcagctcaaagtcgatggtgtcgagcggggtctgctcgcggatgagcgaggtgtaaatgcctgcgcgatcgacgtcgccgatcagaatgaagccgacgagccggttgccgcgcgtcacgagcagcttgtagtgctcgtcgtcctgctcgagataggcctcgccgtcataggagccggcggtgatcatgtgcagacccatgaagcccgaagcgttcatcgggatggccttggtgaacgagcagatatggtctgccatatttttgcctgcggtctcgccctgcatataggcgttcggcaggatggcgaggatgcggtctacgccggccgcgatgtcgtgggagaccgtgcagtcgcctgcggcatagatgttcggcacgcaggtggcggagtgctcgtcgatgaggatgccgcggttgacctcgcagcctgcctcggcggcaagctcggtgttcgggcggacgccgaccgctacgacgagaatatcgaaatcgatcgtgccgccgttcttgaggtgcgcctttgccggctcgaactgcgccaccgagtcgccgagcaggaattttacgcccttgctctcgatgtgcttctggatgatggccgccgggacctcggtcaggacgttcggcaggatgcgcggcgcgaggtcgatgacggtcagctcggaaacacgctggcagatgccctcggcgcacttcaggccgatgaggcccgcgccgacgatgagcacacgcttgtcgttcgtctcgccgagcatttcgttcagatgcttcgcgtcgtcgagcgtcatgaagctcgttttgttctcgaccttgtccagaccctccatcgggggaacgaacggacgcgagccggtgcagatgcacagtctgtcataggggacggactcgccgctcgcgagcgagacggtctgctttttcgggtcaatgtgctgcaccgtcttgccgagcatggtggtgacgtggttcttctcgtagaagtcgtccgggcggtaccggagcattttctcctcggtcgtcttgccgagcagcatataggagatcagcggacggccgtaaacgtgatacggttcggtggagatgactgtgatggggccgaccttgtctgcggagcggatgccctcgatggcgccgaccgctgcggtgccgttgccgatgattacatatttcattctgctcacctctcctcgtaaacgatcgccttgttcggacagccctgtacgcacatgggctggccgaacgcattcttcgcgcacagctcgcatttctggatcgcgccttcactggacgtggaaagcgcgccgtaggggcaggacagaatgcaggtgtagcagccgacgcacttaccggagtcgatctgcaccgcgccgtccacgatggtcagcgcacccgagatacagcccttgacgcacagcggatcggtgcagtggcggcaggataccgcgaaggagatgttgttgcgctcctcgatgcggatgcggggcgcgatcttgtgatccttgagcgccttgaccatggaggacttgcccgagtttgcgaacgcacagtagtattcgcagagatggcagccaagacaccatttttcgttgacatatactcgtttcatctatgtaagaccctttcttgtcccggtcaggagttagaagttaggagttctggcacgcgcaaagcgcgtattcattcaaagtcattcgcctgcgtgcttgatgccgaggatgttcagctcgcggtcgttcagaccgatgccgcgaagcatcagacggttgccgcgcagggcctcgatggagttgatgcccatgccgcccatcatttccttcagctcgtgatcccacgcggtgacgaggttgatcaggcgctgcgagccgatatccgggttgaggcgcttgaccagatcgggacgctgggtcgcgataccccagttgcacttgccggtctggcaggtgcggcacaggtggcagcccatggcgagcagagcgctggtcgcgatgtagcaggcgtccgcgccgagcgcgatggctttcagcagatctgcggagttgcggatggaaccgccgacaacgaccgagacctgatcgcggatgccctcgtcgcgcagacgctgatcgaccgccgcgagcgcaagctcgatcgggatgccgacgttgtcgcggatacgggtcggagccgcgccggtaccgccgcggtagccgtcgatgcagatgacgtccgcgcccgagcgggcaacacccgaagcgatcgccgctacattatgtacggctgcgatcttgaccatgaccggctttttgtattcggtcgcttccttgagcgagaatacgagctggcgcaggtcctcgatggagtagatatcgtggtggggagccggggagatggcgtccgtgccctccgggatcatacgggtcttggagatgtccgggccgaccttgaggccgggcagatggccgccgatgccgggctttgcgccctgacccatcttgatctcgatggcggcgccggcttcgaggtaatccttgtgcacgccgaagcggccggatgcgacctgaacgatggtgtgggggccgtactgatagaagtccttgtgcaggccgccctcgccggtattataataggtaccgagcgcgcaggctgcacgggcgagggaagcgtgggcgttgtaggagatcgaaccgtagctcatcgcggagaacatgatcggcacgttcagctcgagctgcggcgtcatgttcgggacgagcctgccgtccttgtcgcgctcgatcttgcccggctttttgccgaggaaggtcttggtctccatcggctcgcgcagcggatcgatggacgggttggtgacctgcgaagcgttgatgaggatcttgtcccagtagatcgggtacggctccgggttgcccatcgaggagagcagcacgccgcccgagcctgcctgacggtagacctcggagatggccttgccggtccagtttgcgttctccttaaaggtatggtcggtctttacgatcttgagcgcgcgggtcgggcagagcgatacgcagcggtggcaggcgacgcacttggactcatcgacctgcatcttctgaaattccgggtcgtaaaaatgtacttcgttcgcgcactgacgctcgcaggcgcggcagcagatgcagcggtcgtaattgcggacgacctcatactgcggatataagaaatcaatagccattacttgtttcctccgtcattcaggtttacaatgacagcctcgccgccgcggggcgcccagatcttatccagctcgggggcaatgacgcggatcgcgcattcctcggaagcgatgtacacggtctcgtccttctcgccgacgaccatgctgcggagcttgagccggtcgttcagcgccatcaggccgccggtgtagccgacgaggatggagaacgggccggtgaccatgagagacgcgaaggcgttgcgcagataggtcagacgctcgcgctcacgcggctcctgcttttcgatggtggaccagaagggagctgcgatgacgttggagatctcgggataggtaagaccgagcttgcggccgagataatcgatgatataggtgatgacctcggtgtcggtcagaaggtcgcaggaatagccgaacatttcgatgaagcggcggtttgcgtcgtaggacgagatctcgccgttgtggacgaccgtggtatcgagcagcgcgaacggatgcgcgccgccccaccagcccggagtgttggtcgggtagcggccgtggcaggtccacgagtacgcctcatagttttcgagcatatagtattcgccgacgtcctcggggaagccgttggccttgaatacgcccatgttcttgccggaggagaagatgtacgcgccgtcgagcgtgtggttgatgcggatgacgaagcgtgcgacgaactcgcgctcgtcgagctggctcgcggcgagcttggtcggcaggggagcgacgaagtagcgccagatcatcggctcatccgtgatgcgcggatgctgacgggtcgggatcttggacaggtttacgatgtcgaaatgcttctcgatctcgcgctcgcactcgtcctttgccgcctgcgtgtcgaaaaatacatgaaacgcatagtagtcggcatattccggatagatgccgtagcctgcgaagccaccgcccaggccgttggaacgatcgtgcatggtgcggatggagtcgatgattcgggtgccgttctcgcgtgcgccgtccttatggaagatgccggagatcgcgcagccggcggggatgcggacttgcccttctttttgtaacatggtgcttcctccttgtttatgcgtatgtctgccctttctcgggaacgatccggcgcgtttcgcccggtggggatcgtatcgaaaaggggactgccgtcagtcaagtttatttatgcttgtatttgccggcgaaaacttaacaaaataaaaaggtgctcgccgcagctgaggatcggaatgccgaaatcctcagttatggcgaacacctttgttcgctttatattttatagcagcgcgcccggcttcgtcaagcggaaagcgcataaaaaacacatttttcacaacttgcataaaaacacggcggtgtcataggataatttaagtatgtcgcactaaatcttcaaaaaacgaaaaaagcatccccatttctcttgacaaagcaaggcgggacggctataatgcaaagtgtaaacagcaaaggcgctgtgggcacgaagtccgcagcgcctgttttgttttattcagtttgtttgctattaaaattaacatatgtaaggagcgaaccattcatgagcataacgaatgttcccgagctgttcggcagcatggtgtttaacgacgccgtgatgaaagagcgtcttcccaaggacgtctacaagaagctgaaaaagaccatgcgcgagggcactgcgatcgacgccgatgttgctgctgttgttgcaacggcaatgaaggactgggcgatcagcaagggcgcgacccactacacgcactggttccagccgatgaccggcatcaccgccgagaagcatgactccttcatctctccgaccgacgacggtcacgtgatgatggagttctccggcaaagagctgatcaagggcgagccggatgcatcttccttcccgtccggcggcctgcgcgctacgttcgaggcgcgcggctacaccgcatgggacccgaccagctacgctttcgtaaaggatggttccctttacattccgaccgcgttctgctcctacaccggtcagatcctcgataagaagaccccgctgctgcgttcgatggacgcgatcagcacgcaggcctgccgcgtactcaagctgttcggcaaggacgtaaagcgcgttaccaccaccgtaggccccgagcaggagtacttcctgatcgaccgcgaggactacgcaaagcgcaaggacctcatcttcaccggccgcaccctgttcggcgcgatgccgccgaagggccaggagatggatgatcactacttcggcgcactccgtccgcgcgttgcagcgttcatgcaggatctcgacgaggagctgtggaagctcggcatcctctccaagaccaagcacaacgaggtagcaccgtgccagcacgagatggctccgatcttctccaccaccaatatcgcgaccgaccataaccagctgaccatggaggtcatgcgcacggtcgctcagaagcacggctttacctgcctgctgcacgagaagccgttcgagggcgtcaatggctccggcaagcacaataactggtctatttccaccgatgcaggcgagaacctgctcgagccgggcaagaacccgggcaagaacgcacagttcctgctgttcctgaccgcagtcgtcaaggctgtcgacgagtatcaggatctgctccgcatctcggtcgcctccgcaggcaacgatcaccgtctgggcgcgaacgaggctcctccggcgatcatctccatgttcatcggcgacgagcttcagggcattctggacgctatcgagtccgacgcggattataccgacgtagacaagaccaagatgaacctcggcgcgtctgttctgccggcgatcccgaaggataccaccgaccgcaaccgcacctctccgttcgccttcaccggcaacaagtttgagttccgctcgctcggctcctcggtcaacattgcctgcgcgaacgtcatgctgaacaccgcagtcgcagaagagctgcgtcagttcgcagatgagctcgagggcgcagaggacttcgaagcagcgctcagggcgctcatcaagcgcgagatcacggcgcacaagcgcatcatcttcaacggcaacggctatgacgaatcctgggtcgtcgaggcagagaagcgcggactgctcaacctcaagagcgcggcagacgcattcccgcactatgtcgaccagaagaacctcgacctgttcgcaaagcacaacgtttacacggccgctgagatcaactcccgtatggagacccagctcgaggagtacaacaagatcctgcacatcgaggctctgaccatgagcgacatggtacgcgaggagatcactccggcgtgcatcgccttcgagggcgagcttgcagccaccgtcaacagcaagaaggctgccggcgtatccggcggcatggaggccggcctgctgagcaaggtttccgagctgaccgaggaactgtacgcaaagagcgcggctctggacgaggcagttgcagcagcgccgtccggcgacaacatcgcgaccgcgcactactatcacgataccgttatcgccgctatggacgctgtccgtgtaccggctgataagctcgagggtcttgtcggcaagaagttctggccgttcccgacctactctgacatcctgttctacgtataagagcagcagttacattcgttagaaaatatttttctatacacaatggcgtgtatttccccttgttccttcgggagcagggggagatacacgccatatttttttagggggttgtattaaatggacatcttagatctcgctacgtcggtagacgtaggctggacgctcgtcgcagcggcgctggtattcttcatgcaggccggctttgcgatggttgagaccggcttcacccgtgcgaagaacgccggcaacatcatcatgaagaacctgatggatttctcgctcggcaccccgatcttctggatcctcggcttcggcatcatgttcggcgcggcaagtccgttcttcggcggctttgatttcttcgctgacggcgtagtcggcgagggctacaactggacgacgctgatcttccagaccgtgttctgcgcgacggccgccaccatcgtttccggttcgatggcagagcgcaccaagttctctgcatactgcatttactcgatggttatttctgcggtcatctacccggtttccggtcactggatctggggcggcggctggctcgcagagcttggcttccatgatttcgcaggctccacggcggtacatatggtcggcggcgtcgcagctcttgtcggcgcggctatcctcggtccccgtatcggcaagtacaccaaggacggcaaggcccgcgcgatcccgggccactccctgacactcggcgcactcggctgctttatcctgtggttctgctggttcggcttcaacggcggttctaccgttgctctgtccggcggcggcgcagaggtcgcatcccgtgtattcgtaaccaccaacatggcggcagctgtcgctaccgtaaccgttatgtgcatcacctggatccgctacaagaagcctgacgtttcgatgacgctgaacggctctctggcaggtctggtagcgattaccgcaggctgtgacgtcgttacgccggtcggctccgcgatcatcggcatctgcgcaggcttcgcggttgtattcggcatcgagtttgtcgatcagaagctcaaggtagatgatccggtcggcgctgtcggcgtacactgcatcaacggcgctctgggcaccatcctcaccggcctgttcgcatactataatggcactgaggttgagcctctcggcgtattctacggcggcggcttccacttcctcggcatccagatcctcggcgttgtcgcagtcattgcatgggttgcgatcaccatgaccatcgtattcaacatcatcaagcataccatcggccttcgtgtttccgaggctgaggagatcatgggcctcgacaagccggagcacggcctgtcctccgcatatgctgactttatgccggtcgttccgactgtccttggcaccaaggcaggcgaggccgtggcaaagctcaaggataccgctccggtagcggtcgagaaggctgttccggtcaccaaggtcaccaccgaaggtgcggcagcggccgatggtcacaagctgagcaaggtcgtcatcatcaccaagcagtccaagtttgaggtgctcaaggaagcgctggcaggcatcggcgtatccggcatgacggtaacgaacgttatcggctgcggcgtacagaagggcgctgccgagtattaccgcggcgctgaggtcgatgtaaccctgctcccgaagctcaagatggaggtcgttgtctccaaggttccggtcgagacagtcgttgaggtcgtcaagaaggttctgtataccggccacatcggcgacggcaagatcttcgtctacgacgtagagaacgtcattaaggttcgtaccggcgcagaaggctttgacgccctgcaggacgacgaataagcatcagataacgagaaagaaccccgaggctgcggcctcggggttcttttgcatacagcagatacagcataaaaccgccgctccgtgcctttcggcatagagcggcggctgttttgatttttacttgctgagcgtctttgcgaagctgtccttgagagttacgatacggttaaagcggccggtctcgcggtccttgcagtagtagcccatgcggacgaactggaagcgctcgccttccttagcatcagccagcgacggctcgagcttgcagccggtcagcttcttgagggagtccggattgaggtaatccagataatccgtgccctccggtacgtcgtttacgttctcgagggtgaacaggttgtcgtacagatacaggtctgcgtcgatggcgtgctcggcagatacccagtggatggtgcccttgaccttgcggccgtcgaccggcatgccgttgcgggtctcgaggtctgcggtgcagcggatctcgatgatctcgccgttgtcatccttgacgatctcgttgcacttgacgatatacgcgcccatcagacggacctcgccgtccggcttgagacgctggaacttcgggggcggaacctcagcgaagtcgctcttttcgatatacagctcgcgggtgaacggtaccttgcgggtgccggcttcctcattgcgcggattgttcggaacctcgaactcctcgcactgtccctccggatagttggtgatgacgagcttgaccggctcggtgacagccatgcggcgcagcgcggtgtcgttcagctcctcgcggatgcagtgctcgagcagtttgatgtcgacgagcgaatttgccttcgcgatgccggcgcgctgtacaaagtcaaggatagcgctcggcgtgtagccgcggcggcgcagtgcgcacagggtaggcatgcgcggatcgtcccagccctcgacgtgcttttcgaacacgagctggcgcagatagcgcttgctcatgaccgtgtgggtcacgttcagacgggcgaactcgcgctgcttcggatgatgcggcagcgggcagttgtcaacgacccactcgtacagcggacggtggttctcgaactcgatcgagcacatggagtgcgtgatgccctcgagcgcgtcctgaatcgggtgcgcgaagtcgtacagcggatagatgcaccacttgtcgccctgacggtgatgatgtgcgcggacgatgcggtaaatcgccgggtcgcgcaggttcatgttcgggcttgccatgtcgatcttggcgcggagcgtcttggagccgtccgcgaacttgccgtcgcgcatatcctggaacagctgcaggttttcctcgaccgaacggtcgcggtacgggctcggcttgcccggctcggtcagagagccgcggtacgcgcgcatttcctcctgcgtcagatcgtctacatacgccttgccctccttgatgagctgcacggcgcactcaaagcaggtctcgaagtagtccgagccgtagtagacaccgccgctcggctcctcgccggtcagccacttgatgtcctcccagatggagtccacgtactcggtgtcctccttgaccgggttagtatcgtcgtagcgcaggttgaacaggccgttgtatttcttcgcgatcgaccagttgatgaagatcgcctttgccgagccgatgtgcagatagccgttcggctcgggcggaaaacgggtatgaatgcgctcggacaggccgtttgcgatgtcctcgtcaatgatttccgtcagaaagttgtttacattttccatcatagcttatatttccccctgcattaaagcgccgcagagcacttttcgagtcggtcgagcaccttttctcttcccagaatacccattacggtctggagatcgggcgcgttctggcggcctgcgaccgcgacgcggacgaccatggaaacgtcgcctaccgcgcccttgaaggcggacgggtcagccttgtaggccttggtgtcggcagcgtagccgtgcgcagatgcgatctgcttcatcttgtcgaagaagccgtccggcgtatcgttctcgtcgaacatgccggcgaagtcggcgaggatcgcctttgcgtcctcggcggaaacgcgctccggcatggtgtaatccggctggaacagctcgtcgaacatgaagtccatgtagcccttcgcgtccgaccagagagcgaggtccttgcgcggctttttgccgccgcggccgatggcgaggtatgccttggagaaggccgggtcgcgggtcagcagagcgttgaactcactgtcgttgaccgcgctccactccgcaacgaaatcgtaaacctgctcggcggtcatgcgcgaaatgacgttcttggaaacgtcgcgcagcttttcgatgtcaaacagcgcgcccgaaccgctcatcttcttggtggtgaacgggaaatcgttcatcggcagatccggatttgcgcggcgccattcctcgaagttggagttcaggagcgtcatcagatactcgagtacggccgggaccgggtagccctcctgcgcgtagaacgtcagagcgagctccgggtccttgcgcttggacagcttgcgcttgccgccggtctcggggtcgatcttcatcagctgcgcggtgtgcgcgtacttcggcgccttccagcccatcgcgcggaacagctggagatgtaccggcagggtcgcgagccattcctcgccgcgtacaacgatggtcgtgcccatcagatgatcgtccacaacatgtgcaaagtgataggtcgggatgccgtccgacttgaggataacgacgtcctgatcgttctcagtgacctccatcttgccctttacgaggtcctcgtggcggatcttgtgttcgatgctgccctcggaacggaagcggacgacatacggcgtgcccttggcgagctctgcctcgatgtcctccatcggacggtcgcgccatacggcgtatttgccgtagtagccgaagttttccttgttctcctcctgctgtctgtgcgcctcggcaagctcctcctcggtgcagaagcagggatacgccatgccgcgctcgacgagcgacttgacgaaggtctggtagatctcagcgcgctgactctggcggtagggaccgtagatgccggtctcgccgtcggtggtcgcgccctcgtcgaacggcaggccgaacgactggaaggcgtcgatgatcatctgcacgccgccctcgacctcacgcttgcggtcggtgtcctcgatgcgcagatagaaaacgcccttggactgatgtgcgagacgctcgtctacgagtgcgccgtacaggttgccgaggtgcatgaagcccgtggggctcgggcccatacgggtgaccttcgcgccttcgggcaggtcgcgcttcggatagcgtgcctcgatgtcctcgggcgtggtattgatatgcggaaacagtctgtccgccaaaagcttgtgatccatttacttcactccaagttgcgatattacacagttcgggcactgttccggccctgcggctcggatatgcgcctatgatatgaatattttaacacagcacgccatcagacgcaaggcatttcacggttttccgcgcgaaagacgcacaatatcttgcctgatcgcgtggtatgtattataatgatatactgagactgtcgaaaaaactgataatctatgcggaagtaaaatgtttttaggagattgctatgaaacgaattcttgcggcgtcccttctgctgctcacgctttccggctgcggcggcaaaagcgagccgtattccaccgatttttttgctatggatactttcatgtcggtcaaggtgctcggctctgacggcgaaagcctcgcacagcagtgcgaaagcgagatcaatgcgctcgaaagcgtgctgtcgcgcacgcgcgaggacaccgacatcgcgaagctgaacgcggcggacggcgcgccggtcacgctgtcggacgagggcgcgaagctgctgagcacggcactcgacctcagcgccgcgacaaacggcgcgtatgacccgacggtcgcgccgctgaccgacctctggggcatcggcaccgagcatcagcaggtaccggcgcagagcgacattgatgctgcgcttcagaccgtcggcacgcagcacgttcatgtcagcggcgacagcgtgcagctggacggcggctcgaggatcgacctcggcggcatcgcgaagggctatgcggccgacctgtgcgcggacattctgaaaagtgcggacgcggacggactgctcgtgctgggcggcaatatttacgccgtcggcacgaacgaggggaaggactggaacatcggcattgccgacccggatgactccgcagacaccatcgccgccgttgcggtgcatgacctctcggtcgtcacctcgggcgactacgagcgctatttcgagcaggacggcgtgcgctatcatcatatcttcgacccgaaaaccggctatccggcggcgtccggcctgcggagcgtcacggtcatcgacgagaattccacccgtgcggacgcgctgaccaccgcgctctttgtcatgggtgcggacaagggccgcgcgtactgcgaggagaacggcatcgccgccgtgttcgtcactgcggataagcaggttttcaccacctcgcgtgtcgcggacgtctgcacctttacgttcacgggcgaggacaaggggtacacctatgcgcagtagaatgaaatggggcgatttcgtcattatcggcgcggttctggcgcttgcaggcgcgatgcttgcgtttttcgccctgcgtgcctccggcgacacgctgtacgccgaggtctggcaggatgacagactggtcgagcgggtcgagctgaccgacacgaccgaccgtaccatcgacctcgacggacataacgtgatcgtgctctcgggcaaaacggccgtgatgcagtcggcggactgcccggaccaggtctgcgtgcgaaccggacgacttacccgtgccggacaggtcgcggtctgcctgccgcaccgcgttattctcaagctgacgggcacctcgaccgacggcatcgacgccattgtatcctgagaggggggagccgtatgaaacgttcgaaggagcttgcggtttgcggcatgctgaccgctctcgccattattctttccatcgttgagcgtatgtttccgctcgacgccattattcccatcccgggcgtcaagctcggcctcgcgaatgttgtaacgctgttcgcgctgacgcgactcggtctgcgcgattcacttgcggtcgtcgtcgttcgcgtgacgctcgcatccctgctcatgggcagcgtgacggcgtttctgttttcgctgttcggcggactgctcgcgctgtttgccatgtgggcgctgctgcacgtggaaggaaagttctgctcgctgctcggcgtgagcgtcgcgggcgccgccgcgcacaatatcggtcagatcgctgctgcggtgctgtggatgaaaacgactgccgtacttgcttatctgccttatctgctgctcatgagcgttccgcttggccttgtgaccggcctcgtgtgcgcggtcgtgctgacgcacatgaaaaaaattgatcttcatgcataaaattttgtttttcctcccacactatcataaaaaccgaggaggaaaacgatatgaaaatgctattgacactgctcatcgcgctgctgtgcgccttcagcctttccgcctgcggcagcaacgcagcggacacgccgaacaaggacacgcagcagaatcagaccgacaacaatgccggcaccaactctgctgacacggacacgaacgttccgcctgagggaaacgtgaactcgcaggggccggacggcacggcaggtgacggcggtacggtcggaggcgacattaaaaatgccgtggacgatgcaggaaatgccgtcggcggcgcgatggatgatgtcggagacgcagcaaaaaatgcaggaaaggcagtttctgacgcagtaaagccgaaataagtacaatttgatatgatctgcggaagaggtccacgagagtgggcctcttttttgttttgctctgcaccggttgactggggtgctcgaactgcgtcagcgtgttcgtcccctaacgggcgtgcgtttttcgcttacgtccgtgaactggttcagtccggcgcactcggcaagattatgcgcttcaccggcacccacgatcaggaccagctgctcgacgagtccctcccgatcacctggcgccacatcaacaagctcgccggctgcggtgctctgggtgacctcggttcccacctgctgtccatctcccagttcatcatgggcgacatcaccaagataagcgcagtcgctgccaccgtattccccaagcgtccgaagtccgcaggctccgacgagatggttgacgtcgagaacgaggacatcatgacctttatggcagagtacgcaaacggcgctatcggccagatcgcctgctcccgtgttgtgaccggccgcaagaactacctgacctacgaaatccagggcaccaagggctctgtccgctacgacctcgagcgcatgggcgctgcctggacgaaatgaaggttgtcggctacgagggctgcgagatcggtccgtggggctatatgccgaacgacgatcccaaggttctcaagaacgctatggacgcgcgcggcctgactctggtaggcgcgaccgagggcggcaacttcctcgacgacgctgctgttgagggcatgctccgcgatatcgacgacatttttgcactgctgaaggctttcccgtccgctaagtatatcgttctgctgcctccgatgtacaccaacctcgctgccggtgagccgatttccttctacaagaagtgggcaaagcgcatcccgtacatccatttcaaggactgcgaccttgccgtaaaggccaagatggacgaaaacaagtggtcgttcgccaaggccgttaccgaggacatcatggtcgagccgggcaagggcagcatcgactttgccgagatgcacaaggcgctcgacggcgaaaaggtcgaaggggtagttgactccggttcggacgttgtaacgccggataacgcggagaaacgcctcgcaacgttggacaagcagctgaacggataaaaactactctctctccgattggtaagaaaaagagctgaaatcaaaagatttcagctctttcacttggtgcggatggggggacttgaacccccacgtccttgcgaacactagcacctgaagctagcgcgtctgccattccgccacatccgcatgcggtatttacttctgcactgaaaggaaatggtgcgagtgacgggacttgaacccgtacgtcgttcgacacacgcccctcaaacgtgcctgtctaccagttccagcacactcgcattttcctcttgtcgagtcgcctcactgtcagcgacaagaattattatacatacggaagccgattttgtcaacgattttttgaaagtttttttgaaaaaatcaaagaaaatttaagatgctgaaaaacaatacgaaaaccgctccggtttcgaaaaaacagagcggttttgccgggaaaaagttaaaatcgtttaaaaaacagtccgtggtggttgcagtaccagtaaagaataccgcggccgcggcggaaaaagcgcgcttccgcgtttccttcgggatagaagcgcacgagctcgaagcggtcgtccgtacagcaggcggcgaacgaaagataatgcgatttgctcatcggatgcgcggaggagatataaagctcgtgctcgatatcctcaatgcggacgtcgtgcgcctcgtcgggctgctcggcttcgagcgggggcagggtgacgccgcagcacgagatcatcgcgctgccggccgcgtgcagcacattgccgcacaccggacacacatacagcctggagcggcgcatattggccgcgcggttgacattgatgacctgctcgccggaaagcagctcgggcacggaaacgcgcagcgcggctgcgagcggctcgagaagcgaaatgtccggaaagccgcgcccggtttcccatttggaaactgttttgtcgctgacattgatctgctcggcgagctgcgcctgcgtcagatgctgtttttcacgcagcgtgcggatcgccgtgccggtaacataattgtccatgttcatactccttttcgtgttgatttttctccttgatcacagcataacaggaacacgcgaaaagggcaacctccgctgcggagagtcgctgcaccgagagaggaacagctgtcgggaaagtgcgcttttcacgctttacaatatgaaagcatcgtgttataatgaaaacaacacatgaggtttgaacgcatatgcggaggaaaaccgccacggggaacaaccccgtttttcgtaaataaatcgtaaaaggagggaaaaacttgaaccggaagttaaaggatgaagatatggatatcctgtttcgcggcattctcaagctttcgaccgtggaggaatgctacgactttttcgaggatctctgcacgatttccgagcttcgcgccatggtgcagcgttttcaggtagcccgcatgctcgacgagggccgcatttacagcgacatcgtacaggagaccggtgcatccactgcgacgatcagccgcgtcaacaaatgccttgtttacggctcggacggctaccgcagaatgctcgaccggctgaaggaggacaatgaatagctatcagacactttcggcctactatgatcgttttaccgacgacgtcggctacgggcagtgggcggattttttcgagcagctttttgcgcgggaggacatccggccgcagctggtgctcgatctggcctgcggcacgggcagtctgacgcgcctgctcgcgcaacgcggctacgacatgatcggcgcggatgcttcgcccgaaatgctcatgcaggccatgcagaatacgatggactgctctccgagaccgctgctcatcaatcagcgcatggaggagcttgacctttacggcaatgtggacgcctgcctgtgctgcctggacagcgtgaactatgtcaccgagccggacgacctcgccgaggcgttccgccgcgtgcacctgttcctcaatccggacggcctgttcgtctttgacatcaatacgcccgcgaaattctcccgtatcgacggggaaagctatgtccgcgaggacgacggcgtgttctgcgtctggcaggcggcggtcgaggacggcttgtgtgcctatcagttcgatatttttgaacagaatggggacagctggtcgcgcgcgcaggaaacgcacgaggagcgcgtttacgagccgcagcagcttgtccgcatgctggaagaggcagggtttaccgaaatcaaaacctatggcgatcagagcttcgcgcccgtaaagggcggagaggatcgcatctatttcaccgcacgaaagagagactaacattatatgagcgataaaattcttcgcgcgatcgcccgcaacgcgggcatccagatcagtgccgcatcgacgaccggaattgtcgagcgcgcacgcgaaattcacaacaccacgccgcttgcgaccgcagcactcggccgcacgctgaccatcacctccatcatgggcagccaactcaaggtcgaggacggctctgtcaccgttcagatcaagggcaacggcccgctcggcgccattgtgtgcgtgggcgagtcggacggctgcgtgcgcggctatcttcaggacccggccgctgacctgccgctgcgcccggacggcaagctcaacgtgggcggcggcgtaggccgcggctatctgatggtcatcaaggacatcggcctcaaggaccccgtgaccggcacggtcgcgctcgtggacggcgagattgcagaggatctcacgcgctactttgcggagagcgagcagatcccgtctgcctgtgcgctcggcgtgctcgtcgacaccgactgcacggtcaagtgcgccggcggctggctcgtgcagctgatgccgggcgtcaaggacgcagacatcgaccgcctcgaagccaatctcgcaaagctcgagccgatgacggccatgctcgacaagggcatgagcctcgaggagatcatctccgccgtgctcgacggcttcgaagtggacttcctccagaccgaggagatcggctaccgctgcgcatgcagcagggaaaaggtcgagcgcgcgctgatcagcctcggaaagaccgagctttgcaaaatgatcgaagaacaggagaaaagtgaagtaacctgccagttctgcgacaaaatctatagtttttcgcgcgatcagctgcaggagctgctgacgcacgcgaccgagaaaaaataaaaataaaaaaatatcgaaaaaggtgttgacatttggcgcctgttccgatataataaacatcgtcgctgagagacacaaacaaaacagcgacgaggtctggcccggtagctcagttggttagagcgctagcctgtcacgctagaggccgtgggttcaagtcccatccgggtcgccagaaacgacgactgcgaagccgtcgtttttcttttgctgatatagctcagtaggtagagtgcatccttggtaaggatgaggtcaccagttcgaatctggttatcag

SEQ ID NO: 12852 - DNA, 82769 bp, Unknown
  gut microbiota DNA sequence
cccttctcatccgggcaaagcagagtggaacgatagccgggttcggacgcgcggtgcagctgctccacatctgcgacagaaagatcgttcggtgcgccccagcgcagccactgatcaaacgaggagccatgttctctgtcgatgataaactgctgcatgcggtgaggctgcggtacaaggctgtttagctgtatacggacatccattacgttgctggtccggaatacgcggtatgcctcttccggatattccagttttcgatagcgatgacggtacagactgtcatagtcgcaatagtgaaacagcaaaatttgcagctgccttgcacttcgggtcacgagataccagtcgccactgtataagacctgatcgcctgtactgtgcagcaagttcagagcctgccatcctgcctttgggattccattgaaggtgaacagcccgtatccaccgtggaaaaggcggttgaagggaccgcgttcctcgatgaaatccgtcagaagccagtatccgaatgcttccacagagtcgtaattctctgcgatgctgtggcacagccatgcggccttgtagcaggtatcaccggacaggtcgcgctgccatatggtcgagttgcattcctccagccagataggagtgtgttcacggtcgacagcgcgcatcagctgacacagccgagtgcacaggttgcgcgtgaagtgacggtcgccgctcagcgttgtcggcaagaaatcctgtgaaatggaagtgttcatgaattccatgtcatcttccacattctgatgcggataatcctgcgttgtgataaaatccggaaagcagccgtggtcttcggcaaagcgaaagaaatccggcagaatatccgccgcccagacgatgcttgcaaaaccgccgggaccgccgaactgaagaaggggatcgaccgatttcaccgcctgccaggttgactgataatgtgtgtagaattcgtcgaaggttacttcggtgaacaccggcacatggatgcccatcgttgtgaatttccatgtccgcacggtatcaaggccgtagcgcgtgatccagtgctgaatactgccggagacgagctgctgccatttctcctgctgcgccgcaacggaatagttgctgctgcggctgagaacaaaaatatcgtatttttttaaggctgacggcataaggccaagctcgatatacagtttgaagccctgcgaaatcagaaagtcggtcagcagatcggcatacagaaaattgagtaccggctgtccttcgctgttttcctgataaatctgtatgttgtcatcgaaaataccgtgaaaacgaatatactcaaagccaatctcctgctgtgcgcgcatgatctgctgctgtaccgaagcgagcagtccctcgcgggcgtatccgaaatttaagagcttctgccagattgggcgtatgggtctgccctcagcggacgcgttgatctggaggggatacagcgttttctctgtggcagagatgcggtcatcgtccagcggaagatacttgaacagtgcggcaaaatcaccggcttcggtttgcatgttggggagcaggacatccggctgctgatttttacgctgctcttccagatcctttgcatactgcttcggcgtaacgccaaactgctgcttgaacttgcggataaaagcggacgagttaggaaagcctgcctgcagagccacatccgtgacggaacagtggtcctcgcgaagcatcgtaagcgcgtggtgaatacgaatgctgccgatatagtcggtgatcgtcatatggatgtgtctgctgaaaaatcgggacaggtaattcggactgacatggacctgctctgccagctcgggcacggaaatatcctcgttccagcggctgtggataagcttcaatacctgcgtgatacgatccatcgaggtgctgggcagatgttctccagcgtcacttttttcagcgtggaaattctgctccagaaactgaaaaaactgcatgacagcagcgtttagtacctgctttggcgctcggttgaagtacagcgagacgatcttggcaaacagacggcgcagctcatcgcagattgtctgcggtgaggcctgcgcatcgaccgccagacaatcccatgcgctgttcgtaaagccggacagccggatataatcctgcggaatgtacaccatcagcgccttactatctgcaaagcaggaaatttgacacagttcgagcggatggatgagacaaaagccagccggtgacagcgtgtgcgtctgaccgtgcagaagggcgctgaccgttccgcgcatgacgaaaacgaagcgcacgccgctgctccacagcagatacggctgatcttcgtgcagtatgctgagtgttatctcatggttgtcattaaagtccagcgtcacgtcattcacatcctcttatcatctggtatgttaagagtattatagccttatttgcactgaaagacaatatatctcacaggcgctttccgttaagcagtgaaaacagcacagccgaagctgtgctgtttgtctgtataggctttacttacccatctcgcagaagcgcataagaattgcagcaacctcagcgcgggttgcgttattcttcgggttgagcttgccattggagccgtttacgatgccattctcgacagcccccactgcatcgcgctgacagcatagctgctgacggtgcttgcgtccgtgaagctgtccaatgaaccgtttgcggccggagaaccagcgtagcgatacagcatggtgacaagctgctcgcgggtaatgttgatggtcgggttggtgccgtcggaaacgccattcgccttggcccaatccatgccagcctggtaccacggaatgctgttcgtggtgtcctgaccagcataacgcgccagtacagtcatcagcataccacgagtggtcgagctactcggcgagaacttgttatcgccggtgccactcatcaggcccttatcggtgacgtactgaattgcgtcgttgtaccatgcggaagacgcaacgtcaacgtagccgatagtggacggcttctcatcagcaaccttggtgaaagttgggggaaccgttaccttgccgtccggcatggtgaaggtgtacttgccgttgcccttgctgtcggttacggtcagcttgccgagttcgtaaccagcgtccggagttaccgtgatggctaccgtgtcacccttcttcgcggtagacttatccgccgagaccgaaccattatccgacttaccggatgtagaaaccgcattcgcagacgagctacccgcggacgaaccgccgccagaggacgaacgtgcggagaccgtcaacaaaattgccaacatcatcggtccagtaacctctggagttgatcttgaactcatctgcatgtccacccttaaagttgatacttccgatgcaggaacttgcattgtcgccaacgaagccgaacgagccatttcccaccgtcagtgaaccgctttcaacgacaagtttctcgagacggccgtcagtgccactgtccttgacggtcaaattgcctttatcgccgtctgccttgcctaccgtgaccgttaccgagtcctcactaacgctgctcatatcgcacccgtttaggtcaaggatatacggtccgccagtgacatagatggtgtgaccgttcgtgacatctttcatcagcgtgacggtaccgtcttggttttcgtcagtgaaggcgtcatcaatggccttataatagcgtgtttggccatcggcctcgaccttgacaacagcatcttcttcggtcacttcaccgtccccagacgctgcatcacctgcttcaaggtcaaaagacgcatgatcactggattcggtgtcctattcttcaacgttattgtcgatgtctccatctccctcggtatcattaccgatagaggtttcaattctttcgccgtctaacgtgtccggctcctctgccagcgccgatgtcggcagcagggtcagacagaacgccagcacaagaaacagacttgtaatgcgtttcctcatgtgtttccttctttacataatggtcagatttttccacacctgcctgaccatagcgggcaaagcctacagttttgtagaaaggtatcataccgtgggtaccacggtatgaggggtgcacccctcgccataagcctttcgatatttttctgcataaactaccaagataagtataacaaccttttcggtatgtgtaaatcatcccaaagtatgagagtgccagtttcttgcagtcgtttacgcaccctttcaagctacatatagcaattcaaaggggcacctatacttagccggaaaagtgtatgcaggcggactaaaaagtactcgatacgcatacgacttctcccgcaactgattgtgagaaaggcactcaccagactatcaaacctcataaaacagcagtaagggcatgcgtgtgcatgccctttgtttgttctcttctatcctattcggagtgacacagaaattcacttcattaattgtattgctgttttattacgctatttattctttacttttggaagcatgaactgcaaaacagccatatcccacaatttcgttcgcgccttatcaagaatacaatcctgccagacattttcaagtatcaatgtctttaactctccgctgtatttcctcatccgtcgttctcgaataccctcatctcgagcagcttgtatcgggaaaaatccatcccatatgcatatatcgttgggaatttcccagtctttgaaataccttatcctatattggacgaattttattctttcctctctggttgtttccggattgatccacaacttctgatattcgtctacacgtgtttttttcatttctttcgcaatcaaatccttatattgacctgagtatagagatttatactttgatactgtctctgcttctacaaagaacacattatcatatgccaaattacacgtgctttccggcaacgaggtatacaacagatcggataagtacattcctaattcaagcggtgggaaaacgcgtatatattctcttaatttaggttgcttcttcatagctgacaccaatgtttcccaacatttacgactagaacatatcttatctttcatccatccgttccagatcatatgcagcgcatccatgcaaggtatttcaggcaaaattgcttcaaatagatggtagatttctcctgttagatatatttcctctatcagtctattggccttatcactcgcttttgaccgttgggctttatcgacgattgtatacatgacaaacagagctttttcttcgctcataatcagtttctctgcacatttatcgatattgcgaatcgtccattgaggatatatactattaaatttttcaagaattatttttgcactttcttgactaatcgacgcaaattttttctgttcatccgatagctcataccactctatcgccttcttacgcaacctatcgaattcgctcgcctgctcattaatctcatcgaaaaacctgcaatgcgcttcagatatttccgttcgaaaatgcttaccacctgtctttatccaaaaataccaatcccaacttgcaaggaaatcattgttaattgctttctgaagccattcgctctccgctttagttagtccctctgttggaggcgttagtttttttaattgctcccttgttaatttcctctccttagcaattcttgtatattgctcaaaacacttccgtatattagatgacatttccgaatgttgtttcacaaatacggcctctgcatactgtagcggaaagtcataatctgttgcactttttcgatagaaccttccattcgttactctgtcttcaaaagaagcattcatatctattaatgtatcaaattcctgcgtaaaaataagtcccctgtccagcaaaaccatgcgcagctcatcctcgccaaatcgagtcctctgcagaataaatccagctttggagaacaactccttcgatatactccagtccgtgccgccaggtgcgcactttaccgcaaatgtctgccgccatctttctacctccaaggcatccgcttgtgagcctttcaaaggcaaacccgacttgacagttcgtgccaatagtctggctccgtccggttcctgttttgccttccctttttgattttgcatagctttttccatgacatcaatcttcctattccttcattttttggaaccatttattcatatcagtgtgtaaaatccagaaagttcaaccaatccgacaacttattatccacaaaacgcaactttctcatcgtcattcacatctgtagtcgaacacggttcggtctgctatatttctatcatcagccgaacacaatcgcaatgtgaaaggagttttattatgaaaagaaccgcaaaatcaatatcccccgcaaatttcctcgcaaaatccgtcgtcgccggacagaccaacacggttgttcacctcgggagtattgactttgccaagcactctatgcgccagctgattcagcgtctcaccgtcgatgagcatctgcagtgggcagacgaatgcacaaccgttccgtacggcatcactgttcccgggttcgcttgctgggctgacaccctaggaacaattgtcaatggctacacttatcgacatcgcctgctgtgcctatgccgtcctagcgactgccgcctgtacgccattccgatgtccatggtagaatgcaagttcatactaccggacatcgagctagcagatggcgagctagaggcttacaagtacatcgccgaccgtatctcgcccaagccagacgaaatcactatcaaggtaacccatccgtccaaggcggcgatcaaggccaagcgtgacaactggaagaatgagtccctcgatctggacggtttcagtgacacgctgaaggcgaacgccgagtggctctatccgatccttatcgctgcgctcgatacgcagctccgcagctttgacggctgtgacgacattcccgtcttctgctacaattttacactcaaaaaggtaagcctgcaagcagattccaatttcatccgtgtgctgacggcaatgaatttcaccgtgcaggacggctcgtgcagtgttgctcctcgtgaaatcattatccaagacagcggagatctcaaaaactggagtggctgtcatgaccgtcttattatacttcgcactgtgaagggcagcggtctcacaccaatctttgataagctcgatacatatgaccgctcccgtgcgtacaaggatgttcttcctccccggctttcgtcggttccgatcatccgcagtaagacgttcttcgatcgtcccgatacgttggactgcgagctgccggatgtcatcccttcgctgaccaccgcccagctgagcgggctccgtactgcgttctcgcgtgcgctgaccagaaaaaatgccactgacgcaagcacacgctggcacgagcgtatgtgcagtccatacagttttcttcgcaatccgttcgaagaatggcgcaacgcccttctcgatgttttccttgattccatatttccgaatcaaagtcaagccaaggaagctgcggaaaccgactttcaaaccgcacaaaaacggcagaaagaagcagaagaggaacgccagaaaattctccagaatgcgcttgatctggtaaccgatcagagccgttacgaggatgagatcatcgacacgcctacaacacccgatgaaggcaggaagctgctgaacatcgagcaaagtgctgttgctttccgatatgttcgtaaacacaaaaacggtgacgtcaaccactacattgttttcacagatttctctcttctccgcttgctgaaacgcgttgatctgaccgaagaattgtatggtccgtttaaggaacacgcactcaagacaggagttatggtcatgaaatctgcctgtgcaagacttcacagccagtcactcagcggccactactggatccgctacgcagatgatccatctgacctcagccatgcttctctgatgcaggagatgagcaaggcggtaaagaccgtcagcgacaacaattaaacgaaataggaccaaacagggccgtcggattgctcatgtatatccggcggttttatctgttaaaatacactgttttttcttcttcctttgctaaaaatctggggtatctggggttttcacccagataccccagatttttattatagtccttacgccttaccactatctattttttatctgtgctacctccatatctatacgcttggtttcagtctcaaatcttatagtgcactgtcgcaacatgcaatggcgcagcaacgcaatagcataatgaccgatgacatccagagaactcgcaagtattagcttataaattttattccacggtttttttgtatagcccatgtatgattgcagaccttcatcggatattgccgttccggtatacggtgttagctgttccttcatctccttttcattttctgttatgctatcatcatatgcctttatgaaatcgactgcacgctgtatcgtcatatttttcagcagataaccttttacttcttctggcatatccggatttttataagcgccttttttcttctttttctttgctttatacgcaggcaatccatattctttttcattatgcttgcggtatttcgacatcaaataattaaaatattcttccgcaaatttctcgtttcctatcaggggacatgaaaacgtatgcgttagtacactaaaattaatgttttctacatgaaaatatctgtcaaaaattctttttcctcttttttgtatctgattttttgcgttcgtctcattatcaaacagttttttaatgttctctccgtatttcttgtttccggtcgcgtcgtcaatctccatatcgagcagttcataccatttgggttcctctactcctgttttcccatagtaatattgtgcagagcccattttctgaaacacctgtatcacacttaaaaccgtgcgtccaatgtcgttgcctagttctttctcgattagtggagctagttgcgatattggcatccacatgtacattgctatattctgatacaaccatatcatctgctctagagagaaatcataacagttggcaatctgtctgcccaagtcaataggtttgcaccgaattacctcaaacattttcgcctttaattctacccatattgtttgctcttgatccgtttccgccgatgtattcatctcatccccattattgaagtcaataacatcagtatctatttcatcttcatccggccgtttatccttaggactgccaaacaccaactggtatacttcgttagcagaaactgagatcttgcatggcgtgtatattttacaaagttcccccgctagcgtctcctcgatttctttatacaatgctattgctgatttataaagatgtcgcgtatccaatacagatctgtcccatgatggaagatctaaatccggctctgctatcttttccaaggcacaacttctacttctattcacttgccgaacagcatcatacgccaatgccccgggaagtaccggatacatctcacgccctttcttaatcacattctcccaacggtatgtacaggggctgttctcaagccatgaaatatcttttacctcattatggaactgctcgtacagtcgcttcataacatcttctaagtcattccaaaatgaagtatcgttatctatatccgtttttttattcttattagactgcgtaaatactttctttctcatctgttctaggaaacagtgcttccataattcatcttcctggcattctcgaagctttttcaatgtctttcgaggactgcaggatgcgatattcaggctatacgttaacagcagtaccaaggtttcctgcatctgctgcagctcgtcatctgctatgccgtttttattcgcgtactcaataaccttgataagtagcgcaatcgttccttctcctggtgcttctccaaatttttcgaggaatttttcaactctccggatgcgatcgttatataattttatcacaatatctgatgataatacattcagttctaacccattttcgacaacaaaatcggtcatttcacaaattcgtttatccatcgctattttcgcctcaattcgtatttttacaaatttccgtatattttcgctgaattctgccgattatctgtaattcattttatacctatctctatgctataataatatcgttgaaaaagcaataaccttttcgaattctattactttttcacacgcaaaccggtttgccgacgttggggacgcccaatgtcaaaaatccaaattacgaaggaggcacggctcatggagatccgtcgtccggagcacccgctcgtctatatgaagagcgtcaagccccgcggccgcaaacatggccgcaagcgcagcaggcgcgctcccgaggctgcgccgcagctgacggtcaacgttctgctgctcccaccccgtcatcagccctccgccccggttctgaccgaggcagacggcgccaccattatcgacattacccattctgaggaggattaacccatggcaaaccacatcaaccgttctaaaaaccccgaagcaaccgttaagaccaccattcagtcccgtgacacggagccgattcaggtctgcgtcatgcgcattccggttcccggctcgtccggcgaaggcgaaccgatgatcgcagagcgtcatacgctctccgacgaggaaattgctggctttaagcatctgcacgatcagattgcctctttggagacgcagatgtacgacccgggaaccggctgcgtttacgagaaccgtgaggagttccccattggcgcagatccgttttatgatctcgccgtccatctttcccgtatcttttcggaaagcatcgaggagggctgcgatcatgagtaagaacaacgctccctctgtatacgctgaaatcagcaggatctatcacgatcctgctgccagctccctcgtaccgccgctcgcgaagattgatttcctgttcgataacggcagcatggcgacggcatttctgccgtccgatcagctgacaacatccggattgaagaaggctgttcctcgtctgcgcggtctgcccgatatccgtccgcttgtctgcgaactgaccacgcagtttgcggatatcatggatggcactgtttccaattttgaaactttctctggtctgctgctgccccgtacggggctgcagcgtctgccggacggtcattccttgtatgtgctgggcgatcagctaatcggaccgattactacgccggtccttccacgtccgccggtaagctatcacatgatgctgtctcccatccagcatccgctcgcggcgctgttctccgagctggtttactgctcttctgttgtggtagcaccgatcatctttctgtttgctacgctcttgcgttcctggatcaatgagattacaccgtcctggcaggccgtgctggctatcacaggcggtcagggtctgggcaagactactcttgcgcgtaagattaccgactggatttgcgactcgcagaataaacctgccctgctgtacagcgccggcagcacaccggctgctattcacgacaccatggtcaccgcacgtgatctgcctcttgtgatagatgacctgtgcctgtcggcgagccccaagctccagcagaaatatcgtgatttaggtgcacagttcgttcgcgagggcaccaatgcgtccggtatctctaaaaaagctggcaatcagactatgtcattctcctgcaacgccggaattattctgaccgccgagtttgctctcgagaacccttcggacattacgcgatgcatttttatccccctcacacagcctcctgttgtggcgtcttctctgacgccggagctgatcggcgctgcctgccgtcgttttatcgaatggttcctacagcatgagtccgaggcggctgagaatttccggaaaatcaattctgaggagaagccggacgacatgcatcctcgcgtattccacaactttctcattctgcgtactgtgttctctctggcacttcgcgcagcccgtgaagacggactgtctgcttcgtcggccgagccgattacagcacggtatgagaccgggattgagcaatcacagcagtaccagaaaaagctgctcgatgacctcgaccgcagcaagaaaaagggcaatcttgcctttgttcttctggaatgttatggtgatcccaaagtatttaacctgacgaagaacataaaaaaactggacaagcgagacggaatagagtggaaaaacgatctgtgtctgcggcctgccgcgctggaacgtgcggtccgcttacaggatggataccagaactatactctttccaaaatcgcgcgcgagctgaaggatatgggcgcgctcgttattcaggaggaaggcacattgcaggtacgcctcaagaaggatacgccgcgcgtgtatcgcattcggtttgatgctcttgaggaatacgaagaacgcttctgattacagagagctgcggtctatatattataaaagtgagagctgtatccttacgttaaaaatacttgctgaaggagaggaactaacatgtctcatcctgcaattacattagtaccgccgcgccgttactacgacacggcaaccgtcgctgaaacccatcgccgtctgctcgccgaggggcacaatatttcggagaatgctctgcacggtctggtcgactctaagaaatgcctgtggcgtgtcatcgagaagtatttcggtgagaaaccgcagaaaaagtgccgtaaatgctgccgctgcaagtcgaaaaccgactgacgcgcacaccggcgtatatattataactgcagaggagcactctgcacccacccccccccgcagataaatcggctggaccggtttcatcaaaatctataccatttcaatattcattaggaggaaattatcatgaacatgtttgcacatctgaagtcgaagcccgaaatgctttccgccaacgacctgctggagatcttcccgatctctcgcagcggcatctacgacctgctccgtgagcccggctttccctgcatccaccttggacgccgcatcatcgtgccgcgcgacgcgatgatcgactggctcgagaaccgtctgcaggaggagctgaacagcgccgcgaagagcagagagtctaacgaagtatctgtcatgccggagactgagtctgaagcagacacggacctgccggagacccaggtccgcgaggacggcgtttacatcaaggttctcccccgcgacatgaagaagccgcaggcgatctgagcacatataaatgacagcgagggtacacaccgccatggtatgtaccctcgtcttttactctaaaactgcccgtctctgccgttccacgacatccaacagtgcctcaagccgccctttcggcagctcaatcgtcgggtgcggtgcaaagcggaacccatccagatttttcagctcctgccggatttcatccgtcagcatgccctttgccgtcttgataaagtccacgccgatgcgcggacggcacttaccgatataccagtccggccttgccagctgatcttcgtcgagatcaaacagcagactgcggttgtggtcgaacatcggagcaggagccttgacttccatcgtctgattatcgaacaggaaaccgaaattgccgaggtggcgatcggtattcaaaatcagcgcatcgagcacgaacatccgccgaagcacatcctcagctccgaatttttcatacaatttcagcagtcccgatacactattcgggtgatcggaaaaatcactgattttcgcaaggccgtgttcctcatccgtgaacaggcggcacttggagatcagtttttgatgatagaaccccagatcgtaatgcacagcctgtggacaaatctgctccgcaagctgacacgcaagaaactcggacagcggctcaatctcataggtatcgctgccgcttttgtacagatagatgccgtcactctcgcgcacccagcatttcgcgtaatagccgtctgtgccgaactccggcgaagtagaggacagcgcttcttcactgatgataccgctgaatgccgcctgtgcgatcagcgcatcaaactcgttccggtacagtgaaacctcatcccagcagagcgtttctgactcctctttcacccagaacgtgtcattgagcgacagcgcatgcgttacacgcagaaagccctccagaccgacgcagccgtactgctcgagaagctgctcgatgtgcttacgatgcttgggtgccttgcgcttttcaagccatgccgtcagcgattgcaagccgattggccgcaggtcggtataccactcacgaagaatagcactctcctcgccaaattcgtcctgctcgcaggagaacagcgcacagggcacgtctttattcattaaaatgtagtccatatcgcctctcctttcacctctgcaccttctcaaacacccgtttcgctaccgtctcgcactcctcaggcgtgcaccgaaacgagcgggtgccgaaggacgcgaggaacgtctcgtaaagcatgctgccgagcactgccgcatccgtatgcggctcgagccgttttccaatcgactggatttcctccatgtactcgttgcagtccccgaacttcatcgggtcccacacgcggatttcatcaataagcgcccccgcaagctgtaaaagatattccttgcctgcctttcgccgtgcctcgtccgcgatggccgccacgccttcgaccgcctgcgtgtgcgtctggtcgagcagatgcgtgtatatcttctgcgtggtggccggtgtggaatggccaagcgccttgccgatattatacgccggaatgcccgcctgattggacagcgacgcgaatgtgtgccgcagctcatgcagtacgatcttcggcagatcgttatccgcaaggaacttgccgaacaactcagacagataattcggccgaaacggcttgccgtcctccatcacaatcacatagtcgttatcgtcataggcgttcttgtacgttgccctgcacgcctgctgattctccttcgccgccttcagcatatcgcacagcgtatccggcaggtacagcgtgcgcgtcgaggacgccgttttggtgcccttttcaatctctttctttcctgcctgtgttcgcgtattctcaatcgtgatagtctggtgctcaagatcaatatcgctccaccgcagaccgcacagctcgccgcgccgcagaccgaggtaggcacagatatacaccggcagctcgagccgcgttccgacagccttgtcgagcagagtgccaagctgttctggcgtgtagaacttcgcctcgcgctgacgctttttcggcggcgacaccgcacgcatcggatttttcgtgatgtactcctgccgctccgcagcattcagcgtgttcgtcagcagattatgatgcttgatgaccgtattcggcgacagctccttctcgcccatcagccaagtgtaatactgctgaatatcgcgtgctgtcagcttttgcagccggatttcgccgagctgcggcttgagataattctcgatcatgccgcggtagccgtatgcggtcgtctcctcgatctgcggcaggatgatgtccttgtaccagtagtcaagccactgcgcgaatgtgtactcgctcggcaggacctgcgtccctttgtccatcttgaccttgtgctcgttgaacgcacgggtcgcatcccgtttcgtgtcgaacgtccggtacttgcgaatacgcttgccgctgcggtccacgccgtagtcaaagcacacgcggtacttgtcgccgcgctgcgtaatgctgccgtatgccatgctcctcacctctgtggcttaacgataccacggaattttgcggctgtcaatggctacaaatggctacaacgtaaaattgcattctcagaaaagttgtaatttatcatatataaaagcaaaaccgacggtctaaaccgtcggttttgtgttggttttggtggagccgaggggagttgaacccctgtccgaaagcgcatccacaaggacttctccgggcgcagtttgtcgattaagattcccgccgcggtacgccggcaaacaggcttaccgttttggtagagtcatgttacatgacggaggcaactcttaccccgtacacgttcaccactgatcgacgccgggtctctgggccgtggtcctccctgagccgacgggctaagcctaattaggcagcctgaagagtataattgttgttgtttaatttataaacagttggagcttttatcgcagatccccgctgcggcccgctatcccggcttcaacgcccccgtcgaacccgttacggccccatgaaaatgggtagatttaacgattacgctctttcatcgcgcggtcgatctcgcgttttgcatcgcgtgccgcgatgctgtcgcgcttgtcgtgcagctttttgcccttgcacagaccaatctccagctttacacgagagcttttgaagtagaccgcaagcggaatgaccgagtagccgtcctgcttggtcttgctgaacagctgaatgatctccttcttgtgcatgagcagctttcgcacgcgaagcgggtccttgttgaagatattgcccttttcgtagggagaaatgtgcatgccgcgcacgaaaatctcgccgtccttaaaggtgcagtagctgtccttcaggttgatgtgtccctgacggatggactttacctcggtgcctgcaagttcaatgcctgcctcgtatttttcctcgacaaagtagtcatgccatgcttttttgttcgcagcgacctgctttgtgccttttttatcaacagccatggcaaaacctcccttaccgtggtacagtttatgataccacgtttcgggaggtttgtaaagttacttctgtgttacagttttcgcggttatattacagacaagttacgtctcgcgctctccgagcgcctttccgatgccgatatcggcgcagacgagcgcgccgcagagcggtttcgaggctttcgcaaagtgcagcggcttggtgcagtcgaacgttaccgtcgcgtcagcctgcaccgcgccctccgcgacctcgccgctgtcggcactgacgccgctcggcaggtcaagcgcgagcacaaacgcgccgcgttccctttccctgcccatcagcgcacacgccgctgcgccgtccgggcgcagttctccgtgaaaccccgtgccgtacagcgcgtcaacgaccgcatccgcgccgaacgccgcctgttccgtgtcgcgcacgatctccgccgccgtctctgcgagccgcgcgagattggttttcgcgtccgccgttttcggctcgccctccgcgagcagcacgcgcacctgcacgccctccttcgccgcgacgcgcgccatcacaaagccgtcgccgccgttattgccctttcctgcaacgatcagcagacgccggagcgccggaacacgcgctttcagctctttccacgccgcgcgtcccgcgttctccatcatctgtatgtacagcaggccagcctcattcgccgcccgctcgcgctccttcatttctgccgccgttaccgttttcgccatgttcctcgctccttacagcggcagatttttgccgttgacgcaggcttcctcgtcatcctcgatcggaacgagcagacactttctgccctcgacgatgcccgtgcggatggaagccgcgcgctcctccggcacatgaagctcgatgttgatgctgccgcccgtcacccacggcacgtcgtcctcgtcggtttcgttcgcggcgtgctgcgcaagctcctgctggagcaccgcaaccttctgctcgagcgcggcggtgtgcgcgcggacagtcccttcctcgaccagacggctgtccagcacgttatgcgccgccggaggctgctcgccgaaggtatgcgcgtaggacttttcaatctgctcgcgcaccttttcgggtacttccgcctctgcggcaaggccggagaccgcctccgacgtcagctcgaccggcggcagactctcgtcctcctcacgctccgcgaccatcgcgctgatggtgcgctgcatcttgaaaaacgcctcgtctgcctgctcctcatcctcgccgaatgcgtcaataacaacattcctgaacgcgagcttgtcctcggcggcagtgcgctgcgaaatgcagccgagcacgttttcgatgaactccgcgtgcgacggacggcctgtgcgcacatagtacatcaccgcgttcacatcgctgccgcggtcggagaacgccggatagacaaagccgaggtcaggcaggccgaccacccagtcgcggtcgcgcgcgccgatgcggttttcgtcctccttgtagccgagcgcaggcttggccagatcgaccgggcagaccgcgcacagcaggtactcgtagatctcctcagactcctcctgctcctcgcccgaggtcgccttggacggcacatcatagatgtcgtggtagaccagaataaggtagttgccgggatagctgtactcctcgatgaccttttcgtacaggcggtcgagcagctcctcattcgcgagcctgctgtcgcgcagggtcagcagataggtgcggcgctcgtcggacgcctcgttccggtcgaactcaagctcgagcagattgctgccgagcgtgccggaaatcgtctttttcgcgatttcaaggtacttgaaatactcgtcctcctccagctcggagaacatatcggtaaatttgagcacgatctgcttgccgctgttgacgtagcagccgcacatgcggtcaaacgtgcactctttctttttcagccggcggcgcagctcctgcacatcgcccttggtaatattcataagagcagtctctccttattatatatagaacacaggctgccggaaaaacgcccgttccccggcagtctattatatagtatactattttccccggtgcaaacgcaagcaaaaatctctccgagcccttttcccgttattttcttttgctgttccgcattttccgtcgttttgacgttgaaaagcgcattggttctgtgctatacttactctatctgagaatatctgcatcaaacatggagtgtatgaaaatatggcatatgaaaagaaccgccgccgccctccgcaggaggatgacggcacgctgatcgagggccgcaacgctgtcctcgagactctgcgctcgggacgcgcggtagacaagatcttcctcgctgagggcgcgcatctcgcagacgtcgccgccgaggcgaaaaagcacggcgtaccgaccgtgacctgcgaccgccgcaagctcgatcacatgagcgtcaccggcacgcatcagggcgttatcgcgcagaccgccgcgcaggaatatgtctcgctcgacgacatcttccgcgtcgcggaggagcgcggcgaaacgccgctcatcgtcgtctgcgacggcatcgaggacccgcacaacctcggcgcgatcatccgttccgcggagaccgccggtgcgcacggcgtcatcatccccaagcgccgcgccgtcggtctgacggcggcagtcgcccgctcggcagccggtgcgctcgcctacgtcggcgtacacaaggcaaacaacctcgcctccaccctcgacgagcttaaggagcgcggcgtctggctgttcggcgcggaagccgacggcacggtagacctgtacgaagcgccgttcgaccgcgcgaccgcgatcgtcatcggctcggagggtcagggcctcagccgcctgacgcgcgacaagtgcgactatatcgtcagcattcccatgcgcggccgcgtcaactcactcaacgcctccaatgccgcagcggtcctgctgttcgaagcgctccgccgccgtctgggacactaaacagataaaagaggtcacatcatggataagaaagatgaatttaatctggacgagttcaaggatctgctgaacgacgttccggatgccggtgatttcgaccttgagtcgatcatcgccgaggtagagggccgtgcccctgccgaacccaaggccgagccggtgcacagcgagccggtacacagcgagcctgcccctgccgccgcagagccggtgcgcgagcagcctccggtaaagaccgcgccgaaaaccagggacaaggctgtgccggccgagcctgacgccgctcccgaggcagagcccgaggacccgcgtgccgcacgcattgccgcgcgcgaggccaaagccgcagagcacgagcagaaggctgcggaaaaacgtgccgaaaaacgtgctaaacgcgaggaaaagctcgcagaacgcgaagaaaagcaggcagaaaaggccgcaaaggccgctgccgctccccagaaggaaaaggcggagcgcgtctcgcgcaagcaggcccgcgccgcacgcatcgccgccgagcaggaggaggagaacgaggacatcgaggtgctcgaccctgaccagtccttccgtgtgttccgccgccgcagccgcggtctgaacgcgcgctccatccttgtgctgatcctcgccgcagcagccgcctacctgtcgctcgcgccgagcttcacgcagctccccctgccctcgctcgtcgacattgtcgcaaacccgacgctcggcatcggctcgctgctcgtcctgcagatcctcgccatccttatcggcgtcgacattttcagtctcggcttttccgagctgttccacggccgtccgtgccgcgagacgctggtctcggtcgcgatcgtcgcggccatcctgcacagcgtttccctgctcgtattccccgagcagaacggtgtcaccacgccctacatcgccgcgtccatcctcatgctctacgccatgatgcgcgaggaccgcggccgctacgccgcccgtgcgcgctcgtacaaggcagtcgcgcaggccgaccagctgcttgcagtctacagccattacgatgacgttgacgacgcctgccgcgccgcaaagggcccgcttttcaacaaaaacgactttttgaccgagctggaacgtccggacaccgtagaccgtttttccatgatctacgcgcccctcgcgctcgcgctcagcatcattttcgcgctcgtctcctctctcggcagaggtgagccggtccgcttcttctgggcgttctcgtccatcaccatcgtcgccgctccgatcggtctgctctgcgctttcggcgcaggctacaagaacatcgcgcgccgcctgctggcctccggcgctgcgctcgccggtgcgcgtcaggcaaatctgctgcgcggcacggaggaggtcgtgctcgcggagaacgacctgttcccgaccggctcgatcgagctcgagagcatcaaggcggtcggtcagctcgacgaaacgcgcattctctcctgcgctgcggcactcgcagatgcggcaggtcttgagcttggccgcgcgctgagcgaagccgcccgggcgcattcggcgctccccctcaccgcccacgacctccgcgtcgttgacggcggtctgaccggccacgtcggcagcagctacatggtgctcggcacgggcgcgctcatggtcaacatgggcgtcaccatcccggctgaacgcgacagtcaggtcgcgatgtatctgctcgcggataatcagcttgccggtgtgatcacgctgcgctacctgcccaccaagcacacctacaaggcaatgcgtctgatgcgccgcatgcacatgaacgccgttatcgccgcacgcgatttcaacgtttccccggcgatggtcgaggaggaattcgatctgcgccgcggcttcgccgaccagcccgatccggcaggcgttgcccgcctgctcgacccgcgctacgccaagggcgacgctccggccgctgtcctgacccgcgagggcgcaggcccgttcatgcaggtgcttcgctgcgccgacaagctcgccggtgcggtacgctctgcgctgacgctcagcacattcgccggtctgttcggcatgctgatcgtgttctatctcgtgttccagaaccaggcagccgcgctgcccgtgcagcatctgctgctgtacctgctcatctggtacattccggtatttgtcatcaatcagcagacgcactgaatacagcaaggcttcgaactccggttcggagcctttttctttaccctcagcagagggtgagcagcttgccgccgcaggcgatgagtggccgccgtccggcggccggaatgcaccgtgtccacggcggaggaatgccgggctctcccggcggagacaagaggggacagggcaccgatggttccctttcccctcttgacaccccagaccctcctttgcgccgcgacttccttcggtcgcgcggcgaaatgggggttgcgggggctcggttccgtgcgtcggacaggttatgggatgctttactgccctgaatttttcttgcgtaaaccgccgcgcataacagtgcgcggccatccggtgcagagcgcttgatttgcgctgcgaaaaactccgcttccatcaagagcgttctcttggagcaccagacgcccctgtgggcccccgctttttagacgcgcgaccgcagggagtcgcgtcctaaggaaagtttggggagttaagaggggaaagaaaaccttggttgtctttcccctcttgcccccgccgtggggacggcattccctggccgccgaaggcggccaatgtccacaccctccgagggcgtaaactcgcctccagcggtgcaccgctgtatcggcggaaggtctgccgtcagcaggcggtaaagaattcaagagggcgatgccccttggcaacatatcttaaattccgactgtcgcgtacacgattttataaaactatacaaaaatctcgctcccggccccgcgccgcgcacggattgcaaatgaacgcttgtgagaagcgcgcgaacgtgttataataatggcatattcaatcagataaggagctttcgacgtgaaaaatcgtgagcaaattcgcaatttctctattattgcacatattgaccacggcaaatccacccttgccgaccgtctgctcgagcagtgcaaggcggtctccgtccgcgagatggaggagcagctgctcgacaacatggacctcgagcgcgagcgcggcatcaccatcaaggcgcgcgccgtccgcatggaatatcaggccgatgacggcaggacctacgagatgaacctcatcgacaccccgggtcatgtcgacttcaactacgaggtctcccgctctctcgcggcctgcgagggcgcgctgctcgtcgtcgatgcggcgcagggcatcgaggcacagaccctcggcaacacctacctcgccatcgacgccggacttgaagtcgtgccggtcatcaacaagattgacctgccggccgccgacgcgccgcgcgtcaagaaggagatcgaggacatcatcggcatcccggccgaggactcccccgagatctccgcgaaaatgaacatcaacatccacgaggtcctcgagcgcatcgtttccgacgttccggcgcctgtcggcgaccccgatgcgccgctccgcgcgctcatcttcgacagccagtacgacccctacaagggcgttatcgtttatatgcgcctgctcgacggtaccatccgcccgggcatgaaggtcaaaatgatggcgaccggcgccgagtttcaggtgctcgaatgcggctatatgctgccgctcggcctgtctccgcagcaggagctgtgcgcgggtgaggtcggctacttcaccgcctccatcaaaaaggtctcggacacccgtgtcggcgataccgtcaccgagtccgaccgccccacacctgaggcgctccccggctaccgtccggcgcgccccatggttttctgcggcatctatactgaggacggctccaagtatcccgatctgcgcgatgcacttgaaaagctccagctgaacgacgccgcgctgtccttcgagccggagagttcggtcgcgctcggcttcggcttccgctgcggcttcctcggcatgctccacatggagatcattcaggagcgcctcgagcgcgaattcgacctcgaccttgtcacgacgctcccctccgtcacctatgagatcgtcaagaccgacggcacggtcgttcagtgccacaatccgcacgattaccccgacccggcagtcatcgaggaggcgcgcgagccctacgtcaaggcctccatcatgacgccgcaggagttcgtcggcaacatcatgccgatgtgccaggaccgccgcggcatcttcaaggatatgcagtacctcgacgcaaatctcgtcgagctgcactacgaaatgccgaccggcgagatcatctacgactttttcgacgcgctcaaggcacgcaccaagggctatgcgtcgctcgactacgaatttctcgactatcgaaagagcgacctcgtcaaggtcgatatgctgctcaacggcgatcaggtcgacgcgctctcgttcatcgtccaccgcgacaaggcctacggccgcgcacgccgcatctgcgaaaagctcaaggagaacatcccgcgtcagctgttcgaggtgcccattcaggcggccatcggcggcaaggtcatcgcacgcgagaccgtaaaggcgatgcgcaaggacgttctcgccaagtgctacggcggcgacatcacccgaaagaaaaagctgctcgaaaagcagaaggaaggcaaaaagaagatgcgtgcgctcggcacggttcagatgccgaccgaggccttcatggccgtgctcaagctggacgaggagtcatgatcacgccccacccgctcggcctgtatctgcacatcccgttctgcatgaaaaagtgcgcctactgcgacttttattcgatcacggacgcttcgcgcatggacgcctacacggacgccctcatccgctccatccgcgagtacggcgaaaaaagtgcaggccgcacgaccgacacggtctacctcggcggcggcacgccgtcgtatctgggcggcgcgcgtctcgaacgcatccttcacgcggtccgcgggagctttgctctggcagaggacacggaaataacggtcgaatgcaacccggagagcacggacgcagcgctccttgacgcgctacggcgcggcggtgcaaaccggctttccttcggcgtgcaggccgcgcatgataacgagctgcgccgcatcgggcgcatccacgacttcgcgagggcaagaagtgccgttctgctcgcacacgagcacggcttttccaacatcagcctggatctgatgtacggtctgcccggtcagacgcaggatatgtttctcgactcgctttcgcaatgtcttgcgctcgagccgacccacctttcctgctacggcctcaagctcgagcccatgacggaaatggggcgcgaggctcccgtcctcccggacgatgatgcgcaggcggacacctatctcgccctgtgccgcgtcctgagtcagcacggctttgaacactacgagatttcgaattttgccctgcccggcttccgctcgcggcacaacagcaaatactgggatctttccgaatacatcggtctcggcccgggcgcccactcgctttttgacgggcgcaggtttgcgttcccgcgcgacatcgccgcctttacagacggcacggccgccgtgcggaacgaggaggaagtccccgacttcgagcggcagaacgagtaccttatgcttcgtctgcgcacctcggacggcgtggagctccgcgacctcgaggaacgctaccatgtcgaccccgccccttatgaggccgtgttccgcgcgctggcaaagcccggtctgaccgagctgaacggcacgcgctggcatctgaccgaagctggctttctcgtctcaaacagcatcatcaacatgataacggacgccgcgacttgactttccaattcgtcagcaaaaaattcacatatacgcaaaatggaggaactattatgcgcgcagtaatcacagtaaccggcaaggaccgcaccggcatcatcgccaagatctcggcaacgctttatgagcatcaggtcaacatcgtcgacatctcccagaacgtcatggaggatatgttcgccatggtcatgctcgtgaacatcgacaagtgcaccgttgacttcaacaccctgatcgacctgctcgacaaggacggcgaggagctcggcatgaagatccacaccatgcacgaggacatcttcgacgcaatgcacaaaatctgagccgtttcgggcaagcgaggttaactgaattatgtctatgatcaacacgaaagatattctggaaaccatcaagatgatcgaggaggagcaccttgacatccgcaccatcacgatgggcatttcgctgcgcgatctcgcggcggacgacatcaatgtgctcgcggacaagatttacgacaaggtaacgcgccgtgcagaaaagctcgtcgcgaccggcgagcagatcgagcgcgaactgggcattccgatcatcaacaagcgcatttccgtcaccccgatcgccatggtcggcgcgacctcctcggcaaacagctatgttccgctcgcaaaggcgctcgaccgcgcggccgacaccaccggcgtaaacttcgtcggcggcttctctgcgctcgtgcagaagggcttcgccaagggcgacgagatcctcatcaactccattccggaggctatggcggagaccaatctggtctgctcctcggtcaacgtcgcgtccaccaaggccggtgtcaacctcgacgccatcggtctgatgggccgcatcatcaagcagaccgcagagctgacaaaggacaacgactccatgggctgctccaagctggtcgttttcgccaacgccgtagacgacaacccgttcatggcgggcgcgttccacggcatcggtgagccggagaccgtcatcaacgtcggcgtttccggtccgggcgttgttcagtcggccatccgccgcgcaggtgactgctcgatcggcgaggtcgcggacgttatcaagaaaactgcgttcaagatcacccgcatgggtcagctcgtcggcgcgctggcgagccagcgtctcggcgtgccgttcggcatcgtcgacctgtccctcgcgccgaccccggccatcggcgactcggtcgcgcgcatcctggaagaggtcggtctcgaggtctgcggcggctgcggcacgaccgcgatcctcgccatgctgaacgacgcggtcaagaagggcggcgtcatggcgtcctcgagtgtcggcggtctgtccggcgctttcatcccggtatccgaggacgaaggcatgatcgcggccgcacaggcaggcgcgctcacgctcgaaaagctcgaggccatgaccgctgtctgctcggtcggcatcgacatggtagctgttccgggcgacaccaccgcggaggtcatctccggcctcatcgcggacgagattgccatcggcgttgtcaacaccaagaccaccgccgtccgcgtcatcccggccatcggcaagaaggtcggcgacatggtcgaattcggcggcctgctcggcgccgctccgatcatgcccatcaagaccggctccccggcgaagttcattggtcgcggcggccgcatcccggccccgatccagagcctcaagaactgattttacagtcagatcaaaactgcctcatccgcgcagcgcgaacacagagtttgcgctgcgcggatattttttgcagtcagcgaaaaaagttcttgcattttgcctcgtgcggcgttatactgtacccagagtaagcggcgagccgctcctccccatcgcaaaaccgaataccatgttcttcagggcagggtgaaattccctaccggcggtaaagcccgcgagcgagtgtcgattttcggcatgagcatgatctggtgaaactccagggccgacagtaaagtctggataaaagaagaatgcacggaaagcgttttccgtttatttactgttctgaaatgtcgcttgatgtttcagattttttgtatttacgacaaatccactgcattttctacgtcccgaggaattttccccgggacgtttttatttttcaccgaggtgattttgatgccggatcaaaaagaatactatatgcgccgtgctctggcgctcgccgcacgcggcgcgggtcatgtagaccccaaccccatggtcggctgcgtcattgtcaaggacggccgcatcatcgccgagggctggcacgagcacatcggcggccttcacgccgagcgcaacgccttcgcgcactgcaccgaggatgcagccggagccgatctttacgtcacgctggagccgtgctgccactggggccgcacccctccctgcacggacgcggtcatcgagcaccgcatccgccgcgtgttcgtcggctgtctcgaccccaatcctctcgtcgccggaaagggtgcgcagatcttgcgcgatgccggcatcgaggtcgaaaccggcgtgtgcgaagccgagtgccgcgagatcaacgaggtgtttttccactatatcacccacaagaccccgttcgtcgtactcaagtacgcgatgacgctcgacggcaagatcgccgctcacaccggcgacagccgctgggtcacgggcgaagccgcgcggcgtcacgttcacgaaacgcgaaaccgcctgtccggcatcatggtcggcgtcggcaccgtgctcgcggacgatccgctcctcacctgccgcatcgacggcggccgcaatcccgtccgcatcgtctgcgacagccacgcacgcacgccgctcggcagccagctcgtgcagacggcgaatgaaattccgacttacgtcgcggtcacggcgcgcagcgagcgcacggcggcgctcgaagaaaagggcgtgcgcattctggtctgcggcgagacggacggtcacgttgacctcaccgacctgatgcagcagctcggcagcgccggcatcaacggcatcctgctcgagggcggctcgtctctcgccttctcggcgctgaaggccggtatcgtccgccgcgtgcaggcgtacattgcccccaagctgatcggcggcgcggacgcgaagagcccggtcggcggcgaaggtctcgcaaaaatggcggacgcgctcgcgctgaaaaacgtccggagcacgccgctcggcgaagatttcctgatcgaagggagattatgatttgtttacaggcattattgaagaaatcggcacggttcgccgcatcgagcacggcgcgaaaggcgcgcggctaacgatacaggcgaaaaccgtgctcgaggataccagaataggcgacagcatcgcgacgaacggcgtgtgtctgaccgtggtctccatgacgggcgacagcttttccgccgatgtcatggcggagagcctgcggcgctcgtcgctcggcacgcttcagggcggctcgccggtcaatcttgagcgcgcgatggcggcaaacggccgcttcggcggtcacatcgtctccggccacatcgacggcacgggcacgatcgcctcgcagaagcgcgaggacaacgcggtctgggtcaaggtcaagacccccgctcccctgctccgctacatcgtcgaaaaaggctcgattgccattgacggtgtcagcctgacggtcgcggcggtgacggacacagacttctcggtctccatcattccgcacaccggcgcacagaccatcctgctcggcaaaaagccgggcgacccggtgaacctcgaatgcgacgtcatcggaaaatatgttgaaaagctcactgcgccgcacaaaaccggcggaatcagcacgaattttcttgcagaaaacggatttctgtaatcaacggaggaattaacatggcagcaaactacagcacgatcgagcaggctcttgaggagctgcgcgccggtcatctcatcatggtcatcgacgaccccgaccgcgagaacgagggcgacctcatctgcgcggcgcagttcgcgaccacccagaacgtcaacttcatggcggcgaaggccaagggcctcatctgcacgccgatgagcgagcaggtcgcaaagcacctcggcctcgagcagatggtcaaggtcaacaccgacaaccaccacaccgccttcacagtctccatcgaccatgtcgacaccacgaccggcatttccgcagaggagcgcggcctcacctgccgcaagtgcgtcgacccgaacaccaagccggaggatctgcgccgtccgggtcacgtattcccgctcatcgcgcgccgcggcggcgtgctgacgcgcaacggccacacggaggcgaccgttgatctgtgccgtctggccggtctggagcagtgcggtctgtgctgcgagatcatgcgcgacgacggcacgatgatgcgcaccgccgagctgctcgacaaggccgaggagtggggtctcgccgtcatcaccatcaaggatcttcaggactactgccgccgccatgacaagcacgtcgtgcgcgaggcgaacgccaagatgcccacccgcttcggtgagttccgcatcatgggctacgtcaacgacctgaccggcgagcatcatgtcgcgctcgtcaagggcgacatcggcgacggccgcgacctgctctgccgcgtgcactccgagtgcctgaccggcgacgtattcggctcgcgccgctgcgactgcggccagcagcttgccgctgcgatgcagcagatcgagaaggaaggccgcggcgtactgctctatatgcgccaggagggccgcggtatcggcctgatcaacaagctcaaggcctacgagcttcaggagcagggcttcgacacggtcgaggcaaacgtcaagctcggcttcgcgcccgacctgcgcgaatactggatcggcgcgcagatcctgcaggacctcggcgcgaaggagctgcgtctgctgaccaacaatccggaaaagatctacggtctggacggcttcggcgtcgagatcaaggagcgcgtcccgatcgagatcgcgccgcaggaggacgatgcgttctatctgcgcacgaaaaagatcaaaatgggccatctgttcagcgaaaagctgtgattttcaataactgactgaaattatctgaaaggacgaacaaaaaatgaaggtactcgaaggaaaactggtagcaggcaagggcaaatttgcgatcgttggcgcacgcttcaacgaattcatcgtctccaagctgatctccggtgcggaggacacgctggtccgccacggcgtagacacggacgacatcacgcttgtctgggttccgggcgcgtttgagattccgctggcagcacagaagctcgcgcagagcggcaagtatgacgcagtcatctgcctcggcgcggtcatccgcggctcgacgagccactacgagctggtatgcagcgagacggccaagggcatcgcgcaggtcggcctccagaccggcgtaccggtaacgttcggcgttatcacgaccgagaacatcgagcaggcgatcgagcgtgccggcacgaaggcaggcaacaagggcgcagacgcggcgatggcggcgctcgaactctctaacctgctgccgcagctttgagtctaagggggacgctgtcccccttagatacgcccccggtttctccggaaccgggggcgataaccccctcgcccctgcacagcaggggcggctcgggacacaaggtgaattgccccgaaggggcaagagaaggtgccctggggtacgcgtcccgaggcagcggagtaaaagtcaggtacacgccccgacttttacggggaattttacgcggcctgctgcggcaggcctgtccgccctccctgccgaaggcaggattgggcggaaatagcgccccttcggggcgctttccttttacccgtagggcgggatgacttcatcccgccgtccgacaaatctgcaaacactctccggaacaggaaaaggcacgccaacggcgtgcctttctttaccttatataaatgtatgagcgcaaacgtttgcgacagcttattcgatattcagagcttcgcgcagaacatgcaggcttgcaaggtggccgtcgagcatggaaagcgtcagatcctccatttcgagcgaaacctcctcgtcatagcccgacatacggacgaccgagaagaactccttccaccacttcgcatcatggcccgcgccgacggcgacatagttccacgcgcggcgtgcaaaggcgtcgatcggcttggtatccagcatgccgttcggctgccagtaccggcgctccgggcgcgaatccttgccgtggatatgatagatcgcgccgtgctcgccgagcacacgcgccgcctcgatcgggtcgccgcccatccagaacagatggctcgggtcgaggttcatgccgaccatcgggccgaccgcctcgcgcaggcggagcagcgtctccggattatacacaagctgcataccgtgattttcgagcgcgatccgctcgatgccgcagtcctccgccatctttacgatgtccttccataccgggatcgcgacctcattccactgataatcgaggatttcctgtgtctcaggcggccacgaggtcgtgatccagaccggagtcttatcgcccctgcatccggccggcaggccgctcatcatgacgattttcttgacgccgagcatctgcgcgagctcgaacgtctttttcgtgacgtccatttccttttcataggcgagcggattgcccgagcagttgagcgcacacagctcgaggcccttcgcgcgcatcgcgtcataccatttttcccgcgcggtcctgtcgctcacgagcaggtcgaggtcgcagtgcggcgcgcccgaccagttgcccgtgccaatctcgatcgcggctatcttctgagatacgcagaaatcaagcatctcctcatacggcatatctaatgtgcaggtcttaatggccagtttcattttgactttccttctctcgttctttgctgtttggatcttcagagggagatgcgcgtttttcgcaggacttttctcacaaaaaagcgcagactcccccctgtttcatcaaggcaattttaccatactgtaacctgaatatgcaagagataatctcataatatgcccaaattcttccctctcatacctcaaaaaactgcgaattatgtccagaaaagcatcaatttgcacaatgcacagatggcggtttttatatcctcgacaccttattgtcaacctgcacaaagcatcaggggcattcctcgccattaccgacaaaattgtcaacaaccccttgtcaaacagtattctttgcattaaaatattaccagaacgttggagcgttcgttataccgcatcaggcggtgaaaccgaatgacagactgaccggcccttttcggtgtggacagactgtacgaaaaaggagagaggtttttattatgaagaagagattacttgctatgctgatgaccggcgctatggttgcaagcctcgcagcttgcggtggcggttccactggcggcgacaccaagaccggcggcgacaccaagaccggcggcgataccgcttctggctgctctgttgacgtcatcctgaagaccaccgcttccgagtactggagctacgttaaggccggcgcagaggcttacagcaaggataacccggacgtacaggtcgaggttaagggcgctacctccgagaccgcttacgacgagcagcagaacatgatcgagaccgacctgaactccggcgcttacgacgcattcgtaatcgctccgctgcaggctgatctggttaagaccctgatctccggcaagaccgacccgatcatcgctgttgacaccaacatcgacgctcccgaagtactttccttcgtaggtaccggtaacgaggacgcagctgcaatgggcggcaaggctgctgtagaggctgctaaggctgcaggctgggataaggttcaggctatcgcaatttccggcgtacagggcgacggcaccgctatggctcgtctgaacggttacgagaagggcatcaccgaggctggcggcgagttcctgaagggcgagatccagtacgctgacgctgttgctgataaggctgcaacctccatggaagctatcatgcagaaccatccggacggcgttgcaatcatcgtctgcaacaacgacgatatggcaatggcagctgcacgtgcagcaaagggcaacgctgcttacgagaagaccatcttcgttggcttcgacggcatccagtccgcttgcaacgctatcctcgctggcgaggagaccatgtccgttgcacaggaagcttacgacatgggctacaaggctgttgaggctgctgtaaaggctgttaacggcgagaccctggataagttcatcgactccggctgtgacgttatcaacaaggataacgctcagaagcgcctggataccctgaagggctacatcggctaatcaacaggcgttttttagtacgcgagtggttttccatttgttcttagcatttaagtgaacgagaagaaacccctgcaagatttgaacaggatctgatgcaggggttctcttttcgaagagtaagttttcgatttttcgaaaaagtcattctcccgcgagacgagatcggcaggagctattgttgcggcaaacctcctccttttgcaactgaaccgagaacagtttactttgtcccgcacttcatctcggagaagaaaaggtgatatgcaaatgagtgaatacgtagtagaactgaaaaacgcgaccaagcgttttccgggcgtagtggctctgcgaaacatgcagctggcagtcaagccgggcgagatcctcggcctgatcggtgagaacggcgccggcaaatcgacgctgatcaaggtgctgactggtgtacatcaggcagacgagggtcagatcttcgtagacggcgtagagcagcacttcaaggacccgaacgagtccgctgctgcgggcatcgcctgcgtttatcaggagctgaatattgaaaagctgctgagcattacggacaacatttttatcaacaagtggctcaagaagggcaatctgctcgactacccggccatgcacaagaaggcaaaggaagttatggcgtcgctcggtcaggacgtagacccgaccaagccggccggcaacttcggcatgggcgttcagcagatgatcgagatcgccaaggcggttctcatcaacgcaaaaatgatcattatggacgagccgacctcctctctgggcgagaaggaagtcgagcagctgatgaagacctgccgtgaactcaaggcacgcggcatcggcatcgtctttgtatcccataagctcgaagagctgttcgagctctgcgaccgcgttacggttatccgtgacggcgagtacatcgagacccgcgacatcagcggctgggacaacgactccctgatcaccgcgatggtaggccgttcgctcgacaaccagttcccgaaggaaatcggcgtaaagagcgctgagccgatgctcaaggtcgagcatctgaaggagaccggcgtgctgaatgatgtgtccttcgaagcatacggcggacagatcctcggctttgcaggtctggtcggcgcaggccgtaccgagaccatgcgtgcgatcttcggcgcggacccgatcgacggcggcacgatcaccatcaagggcaagcaggtacacatcaagaccccgcgtcaggcgatccagcacggcatcgcgttcctgaccgaggaccgtaagggtcagggtctggttcttgcacagtccatccgcaccaacctcatcctcgccaatatgaagggcttctcgaccggcttgttcctcaacgagaagaagatcgaggacgcaggtcagaagaacatcgcgtctctgcgcatcaagaccccgtcgatcgacgagatcgtcggtcagctgtccggcggcaaccagcagaaggttgttatcggcaagtgggtcaacacggacgcagacatctttatcttcgacgagccgacccgtggtatcgacgtcggcgcaaaggtcgaggtttacaacgtaatgaacagccttgtcaagcagggcaagtgcgttatcatggtctcctcggaaatgcctgagattctcggtatgtccgaccgcgtaatcgtaatgcgcggcggcgaagtaatggccgaagtagaccgtgacagcgaacatttcaatcaggaagaccttatgaaggcagcttggggaggtaaattagatgactaaatcgaagaaatccagcaatttgatgacttatgctggtacgtttggcgcactggtaatcctttgtgtagttctggcaatcgcatcgccgaacttctttaagtattcgaacatgatgtccattctcaagcagacgtcctttaatgcactggtttccaccggcatgctgctctgcctgatcaccgccggcatcgacctttccgttggtgctaacgcaacgttcgcagcctgccttgcaggtatgctgatgaacaagggcatgtccaatccggtcgttctcctgctcgtcgctatcgtcggcggcaccctgatcggctgggtcaacggtatgctcctcacccgtctgcacctcccccatccgttcgtatctaccctcggtatgaagaacgtactctggggcggcgcgctgatcgttaccaactctcagatggtatccttctccggcaatgacgctgttatgtggctcggctccgctaccgtaggcggcttcccgatctccttcatcgttgttatcgctatctacatcgtaatgcacatcctgctgaccaagaccgctcttggccgctcgatctactgcgtaggcggcaacccggaagcagctcgtctgtccggtatcaactccgctaacgtgctgaccttctgctacaccctgtccggcttcatggcagctctggctggtatcgtttccatcggtcgttccggtatctgcaacggcgttaacgctattcagccgtacgataccgacgcaatcgcagcctgcatcatcggcggcgcatccttcatgggcggcaagggcaccatggttggtaccatgctcggcgctctgatcatcgcagttctgcgtaacggcttctcgctgctgtccgtttcgtccgcagttcagaacctcgttctcggcctcgttatcatcggcgccgtactgctcgacgttacccgtgagcgcatggaagctaaggctcgccgtctggctaccaagtaaaacgcaagaaaaaaaatcgctgcttcggcagcgattttttcttgcttgtatccaagggggacgctgtcccccctggatacgtttccggttccgaagaaaccggaaacgatacccccctctcgtccgcacagcggacgaggccgcgccgccgcaaggtgaattgccccgaaggggcaagagaaggtgccctggggtacggcgcgggcagaggtaagaaagtcaggtacacgccccgactttcttggggaattttacgcggcgcactgcggtgcgcctgtccgtcctccttgccgaaggcaagatcgggcggaaatagcgttccatgcaacgcatggaacgcgaaaaggcacgccaacggcgtgccttttctttcgggaagatttcgctttttctcagagcatttccttgcagaccagtgtcaggtcggtataataggcggtttcctttggggtgatattgcgggcaaggagctgatacatggcgataacggcgcgaaaggactcctgccagaaggactggccgataacgaaatccaccgtgccctccttgaggtagcgcttcgcggccggggtaaggtcgttgcaaacgacatgcacgcccgaaccgacgcccgcgcggcgcagtcctgcgatgcagccagaaaccggctgcgtggacatatataccgcgcggatctgacggtcctctgagatcgcccgcgcgacaagctcctcggtcagcgaatgcatctcgttggtctcgatgatatggtaagcgtccgaggggaagccaagctcacacagatggctgcaaaagccgtccacacggcccttgtgcacctccatacgcatattgccggtcacgacaagcacgtgctcggagtagcgtatcagccgcgccatgaccccggcggcgatcgcgccggccttcatgagatcctgtccgacaaagcacacgcggccgctgtccggaatatcgccgtcataggtaatgacgcggatgcccttatcaagcgcctggcggatggccagatagacctcgggcgtgttctccgcgcggacgatcagcccgtccacaccgttctctacctgctgcccgatcgcgccgacaagctcctgactcgtcatcgtgcgcagcggcacctcgagcagctcgaacgaatcgtccgcgatatagcgcagcgctcggcggatgccgctgatgacctgccggttgaaataggtatccgtccactgcggaatcagaatggcggcgcggtgccgcggcgcggacgcggcctttttgcagcggtatcccagcttttccgctgcacggagcactttttcgcgcacgactgcattgacattcggcctgccgtgcaggacacggtccaccgtgccgcgcgatacacccgcaagctccgccacctgctgcattgttactgccatctgctgactctccttccgtctatccggcggcaaaaccgccttgagctgtcatctctccgccgctgcaaatccctgctgcggctgaacagaaatcattatacccgcaaatgctttttccgtcaagaatttccgtgcacagcgcacaatcatgcgttcgcatccgtcccctctgttccctctcattctgcgcaaaaccaaagccattttttaggcaggataacaatgttgcgcagcggatattgaccttgcggccacggcagagtatgattaactcataacaggaaacaggctgcggacaccgcttcgcagttcataatacgatccaaaaggagaatacgctatgctgaacattggtgtgatcggctgcggcgccatcggccgcgaccatatccgtcgtctgaccgacatcgttccgggctgccaggtcgttgcctgcgcagactacttcgaagaatccgcaaacaaggttgctgcacagtacgagggcataaaggcctataagaccggcgaggagctcatccacgcccccgaggttcaggctgtcgtcatcacctcgtccgacccgagccacgcaggctacgttctcgaggcgctgaaggcaggcaaattcattttctgcgaaaagccgctcgcacagaacgcaggcgactgcgagaaaatcatcgcagccgagactgctcatggcaagcgtctgcttcaggtcggcttcatgcgccgctatgaccgcggctacgcggagatgaagcgcatcatcgactccggcgagcttggcgcgccgctcatgatccatgcctgccaccgcaacgtttcccagccggatggcttccagaccgaaatgggtgtttccaatgttgctatccacgagctcgacatctgccgctggctgctcggtgacgagtacgagagcgctcaggtgctcaagatccgtcagtccgcctgctcgaccaagggctatgacaatccgcagatcgttctgctcgagaccaagtccggcgcacgcatcgacgtcgaggtacaggtcgctgacgcctacggctacgacatccagtgccaggtcgtctgcgaaaagggcacggtcaacctgcccgatccctatgccgttgtcaagcgcgcgaacgcaagctgttccttccccatcctcaccgactggaaggaccgctttatcgaggcatatgacatcgagctgacccactgggtcaagacccttgaggaaaagggcgagccggacggcccgtccgcatgggacggctacgcagcctgcgttgccgccgacgccctcaatcgctcccgcggcacgggcagattcctgccggtcgagaccatggagaagccggagctgtacagataaaccggtctctcgctaacccttgtcctctcttttttttcatagaatgtccctgacatgcgagtcgaggggaacccccatatcgcagttctcccattttgcggtatggaaagcaaagtcctccgcacaccgtgtttctcccagatcacggtgtgcggagggcttttttatgttactctcggaatcgaagcggcgtatattcctcgtgctcacgcacgcagcggtatgccggacggatgatcttgtccgtattgaccagctcctccagacggtgtgcactccagccgacgatacgcgcgatagcgaacaccggcgtatatagctcgggcggcaggccaagcatggaatacacgaagcccgaatagaaatccacattgaccgagacgcccttgtagatgcggcgctcctcggcgatcgcggccggtgcgaggcgctcgaccatctgatagagcgcgaaatccgcgtctctgcccttttcgtgcgccagctgaccgacaaacgacttgaacacctgtgcgcgcggatcggagaccgagtagaccgcatggccgacgccgtagatcagacccttgcggtcgaaggcctctctgcgcagcagctttttgaggtattccgtgacctccgcctcatcggtcgggtcgctgacctcgcgcttcatatcctcgaacatctgcacgaccttgtagttcgcgccgccatgctttgggcccttgagcgagccgagcgctgccgagatgaccgaataggtatccgtgcccgaggaggtcacgacgtgcgtcgtaaacgaggaattgttgccgccgccgtgctccatgtgcagcacgagcgccagatcgagcacactcgcctcgagcggcgtatactgcatatctgggcgcagcatccgcagcagattggaggcggtagacaggctgtccgaggggtaatggatgtacatgctcgcgccgcactcatagtggttgtaggcatggtaggagtagaccgcgagcatggggaacaccgcaatgagcatgaggcactgccgcagcacgttcggcaggctgatgtcgtccgcgttctcgtcataggaggcgagcgtcagcacgctgcgggacaggctgttcatcatgtcgcgcgtcggcgccttcatgataacgtcgcgcgtgaaattggtcggcagcatgcgcccctgcgcgagcaggctcttgaagctgccgagctcctttgcgtcgggcagtctgccgaacagcagcagatatgcaacttcctcgtagcccttgcgtccctcgcgcacaaagccctgcacgagctcctcaatgcgtatgccgcggtagtacagctcgcccgggcacggctgcaaaatgccgtccacctcgcgctgtgcgatgatgtccgagatgttggtcagtccggccagcacgcccttgccgtttacgtcgcgcaggccgcgctttacatcatattcccgataaagtcccgcctcgatgagggaattgctgcggcagagcgatgcaagctcctccatgcgcggcgtgacgatcaaaatgttgttttcctgcgtcatcctctcgccttccttcctttgatttagatattttattataccagatcggaacgagctattctgcataaattcggaaacattttgtgaatttttcatgaacaaaaaagagcctgtacgctgtgtacagactcttttcatgattgactttactgagcggactgctcggtcgcagactgatccgcgtcgctctgctgtgcgtcagactgctcgctctcctcacccggacgggttatgagggtctgaacgtcctgcggcagataatcgtagacattttcataggtgatgctgctgtacagatcggtggtctcgacctgcgcctcatctatccactgcttgagcagctcgtccatcgagccggagatcgcggagacgatgtcgctcttgaagttgtcgagctggctgtcgtccagcttgacgcgcttgatgatatggtagccgtagctgctcttgacgagctcggaaacctcgtcctcagccagagccttcgcgccgtcgtagaactcggtgaccatctgaccctcggtgaaggtgtagccgttcgggttgttggacaggccggtatcctcgctgtactggttcatcagcgtgtcgaagtcctcgcctgcgttgatgcggtcgaggatggactgcgcttccttcttcgcttcctcatcggtgcgcttggtctcgccggaagccgggtcaacggtcgtaatgaggatgtgctttgcggtgatgtagttatcctcgtagtacttctgaatgtcctcatcagacggggtgttgacgccgttctcgccaaaatagtaatcgttcagcgcctgatagcactggctgatatacatgaagttctggtaggtctggtcagaaaaaccgaactgcgcgatctggttcagataagcgtccttgccggtgttcgcgatgctgttgcggcgaacggacgccatctccttctgctcgttgtagctgagcttgagaccgagctcgttgaacttctgcatgacgacgcgcgcatagatcgcctgctgctccgctgcctccggcatggaagcgccgagcgacttggccatgtcctcgttcgaccacaggtcggtcagacccatctgcgcatacatgctcgcgtaatactgcatattgtagagcatgtagcccgagtattcgtcggcagctactgcatcgccgtttacggtcagcacggtctccgcgccttcgttcagcggcttatagtggatcatcatgctcgacacgccgccgatggtcgcgcccagtacaacggcggtcatggcaaccattgcagcaagacgctgtactaatttgctcatgttactcctatctccttacatttaacagactttaatcagtataacaccatttgccctcggtgacaagaaaaatcacagaatcgacacaaaaacagcggtacggtctgcatgtgcgtcagcttttcgaggaagccgcgacggaatttgccagcgcgatgccgccgctgacgagcaggagcgacagcagattgcgcacggtcatgatattctccccgagcacgagcgcggaaaagaccgcgccgaaaaccgggatgaggaagccgaacaggctgacgcggccgaccgggaaacggccgagcagcgcggtccagatcgtgaaggccgccgccgagagcacgatcatgtagccgagcagcgccgcgccgccggcggtcacgctgccgagggcgccgccgccgagcctgccgagcaggccgaggaacgtgccgccgagggcgagctgccagccggtgagcagcatcgggtcgcggcccggcgtatagatgcgcgagacgagcgccccggcgcctgccgagaccgcagagagcagaatcaggccgtcgccgtgcaggcggaagccgtccagaccgccgaggccgagcacgagcacgccggcaaagccgagcacgcagccaagcgttttccgtctcgtgagccggtcatttttcagcagagcgtgcgcgagcagcagcgcaaagaaggtctgcgtgcccgagagcaccgaagccttcgtgccggtcgtaccggcgagaccgatatagtagcagacgtactggagcatgctctggaacaggctgatcataaagatcgccctgtattcgccgcgcttcggacgaatgcggtgtcccatgcaggccgcgacgagcagcacgagcacgcctgcgagcgtgaagcgccatccggcgaacaccagctgcgagaacgagtcccctgccgcgatctcgaacagctcgtatccctttttgacgcagggcgcggcgctgccccagagcgcggtgcacaggaccgctggcagaacaagcgagagaagcgtattgtttttccttttcatatctatattcctaccccttgaaaatttatgcagcaggttcagtatagcagttttttcgcctttccgcaacaaatccgagcaaaagaaaggaacttccgatgcatttcgcgtttcggaagttccttcactgtgattcttcggttgttgacatcagtctgttctgctcctttgaaattccctgtattcgctgtccttagcgagcacggcgggaatttctcagagtcttagcatcgatgcgttcgctctcaagctccatagtacgagcagctaccagaccgttaaagaaacccttcatcatgattcatgcactccttttcagtgtttgtattttcctgagatcgtctttcctgatctctggtattataatacaccgcggggcacagaaaaacaagagtgagtttttatgaatgttgcacatcacaagcagcattttattgtgcatattaacgatagtgcttgcgcagtttgcacatagttaacattttgtttttattcagtttacacaatgaagtgaaagcaaaataatttgaaggaaagcggtaagcgaaagagcggaaaacaccgttttccgctctgagtccgcattatcatcgaattttgtactcttctgcgagctttttgaacagcggcagtgccttctcgacggtctcggtcttgacacagtaggagattcgcatatgtccgggagcgccgaagtccgagccgggaacgagcagcaggtcatatttcttcgcccgctcgcaaaacgcgcggtcatccgcctccagcgtgcgcgggaacagatagaacgcgccctccggcttgacgcaggtatagcccatttccgtcagaccgctgtacagcaggtcgcggttggtcctgtacaccgcaatatcgctcgtcaggtcggcacagcgggccgcgacgcgctggaacaggctcggcgcgcagacatagccgagcgcacggcctgcgccgcagaccgccgcatacaggtcggcgctgtccgcagccttcggcggcacgagaacgtagccgatgcgctcgccggggagcgagagcgacttggagtaggagtagcagacgatggtgtcgtcgtaatagttcggcacgaatgggatggtcacgttatcgtaaacgatctcgcggtacggctcgtccgagatcagatagattggatggctgtactcgttttccttttcgtgcaggaactccgcaaggcggcggatagtctgctcggagtaaaccgcaccggaggggttgttcggagagttgatgacgacagccttggtgtgctcgctgacgcgctgcgcaaaggcgtcgaagtcgatctggaaatcctcgatggacggcggaacgagcacgcacttcgcgcctgcgccgctctcgatgaacatcttatattccgggaagaagggcgcgaacacgacgaactcgtccccctcgcacgcgagcgcacggaaggcgcacatgagcgcggcagccgcgcctgcggtcagatacaggcagtcgccggtgtaatccgtgccgaaacggcggttaaggctgtccgcgagcgttctgcgcacgtccggcgcacccggcgcggaggtatagccgtggatcgcgaccggatctcccgcggcctccgcgagaatagcctggcgcacctcatccggcgccggcacgttcggattgccgagcgaaaagtcgaggacgttttcgcgtccgacgatcgcggcgcgctggttgccgtattcaaagatctcacgaatggtcgagcggtgacttcccagctcgtacatctgtctgtttatcacaggtatcgcccctttcagataggctttattatagcacggctttatccgtctgtcgataaagtcgattttttcacggtcggcttagaggatgcgccttaccggcttctcctcgaccgccttaaccggcgcgcacgggttgccgtaggcgagccagccggccggaacgtccttcgtcacgacgctgcccgcgccgatgaccgcattgtctccgatcgtgacgcccgggcagatctgcacacccatgccgatccagacattgctgccgatggtgaccgccttcgcgtactccagtccctcgccgcgcagacgcgcctcaaagggatgacctgcggtcgagatcgtgcagttcggcccgatgaacacgttgttgccgatggtgacggtcgcaccgtccagaataacgaggttgtggttcgcatagaagccgcggccgatgcagatgttcttgccgtagtccacgtagaacggcggctcgatcaccgcgtcctcgccgcagatgccgagcagctcctgcaaaagcgccgtgcgcttcgcgccctcgtcccagcgcagctgattataatccatgcacaggtttttcgcccatgtgcgcttgttcagcagctgcgggtcgtggtttgcgttgtaaagctgacccagctgagccttttcactctctgtcatagtctgtatctctccttagttctgatgtcgtacaagctcatagtcgtcgcccgagcggtaataagggcaggctccgccgcaggtctgcacgcggtagaactcgtcctcgtcgagatatgcctcgcagacatactcgtccatctcgtcgtcgtaaacattataagcgcagtcctcacaggttcctgtcatgcgcgcacctcatttctctcattgctgctatcagcatatcatattttatcccgcttgtcgacaaaccgtgcccacaaaacttccccgtcaacctgtcagtttttcaattccatgctttttattttttgcagactgtgctatgatacagatagataaaacccatccccaggagtgtgaacactatgaaactgtatacctttgataatggtgacggcgtaaagcgcgtcggcgtagagctttccggctttccgggcctcatccgtgatgtgcgtgatttcggccttccgtaccgcgatatgaccgacctcatccgtcacatcaccccgtccgaaaaggagcgcatctcggatcccgaggccgcgctcgacggccatccgctgcgcctgtccgccgtccgcgtctgctcgcctattccccatcccgagcaggacatcatctgcctcggcgtaaactacgccgcgcacgccgacgaaagcgcccagttcgaccgcaaggcctttctgctcgaccgcaagaaggcgacctatttcagcaagcgcgcatatcagacaagcggcccggacgacctcatcccctcctaccctgagctcgtgaccagcctcgactacgaagcagagctcgccgtcatcatcggccgcgactgcaaaaacgtccgcgagcgcgacgctgcggcctgcatcttcggctacaccgttctcaacgatgtctccgcacgcaatcttcagaccgagcacaaccagtggtatttcggcaagtcgctcgacggcttcaccccgatgggaccgtgcatcgtcaccgaggacgaggtcccctatcccccggcgctctccatctcctctacggtcaacggcgagctgcgccagaacagcaatacgaaatacctgctgcattccatctccgagatcatcgccgagctgtcgcagggcatgaccctgctcgccggtacgatcatcgcgaccggcacccccgccggtgtcggcatgggcttcaacccgccgaaattcctcaaatccggcgacatcgtcacctgcgagattgagaagatcggcaggctcaccaacatggtaaagtaaaggggcgcggcagaaatggcaaagaaatcggcctccgaaaagactaacgtcatgcgcgtgctcgagcagcacaaaatcgcctataccccccacgagtacccccacggcaaggaagcagtagacggcgcgtcggtcgcgcacctgctcggccaggacccggcgcaggtgttcaaaacgctggtcgcgcgcggaaaatccggcggcttccatgtgttcgtcatcccggtcgagaaggagcttgacctcaaaaaagccgccaaagcctccggcgaaaagtcggtcgagatggtgcatgtcaaggagctgctcggcctgaccggctatgtgcgcggcggctgctcgccggtcggcatgaaaaaagcctttccgaccgtgttcgacgagagcgtactaaacgttccgaccgtcatggtctccgccggaaagatcggctatcaggtcgagtgcgccccggccgacctcatcggccttgtccgcgcccagaccgcagccatcacgacggaataagcccggccgcgtccggatacagcgcgaacacggtctgcacaccgcagccggtgagctgcgcgagcttcgccgcgagcgtatccgcgtcgtcgaacagcacgaagtgcgccgcgccctcgcggtctgtgtaggtaaagtaccgcgcacacagctcgtgcgagaaaaatacctgtgcgccggtctcggcaagcagcgccgcccgtgcggcggcggaaagcggctttccgtccggcgaggcagagggcagggtaaaatcctgcgacaccggctgaaggaacgccgcgacgcggtgcgccccgtaaatgccctgcaatgaggaaaaatatgcggtcaggctgccgcccgaaagcgcggtcgaaacggtcagcaccgcatgctccagatcgcgcccgatgttcaccggaacatagagcgggatgccgtcctccgcgagcgcttcatcaaaggcgcgcagcagcgcgagggtctgcgccgtctcgcgctcgaaatccgcgaacacaccgggcgcgtttacgcgcttcgcctcaaaggcgaggtcgagagcgagacgctcgggactgcacagccgcagtccgcgcggcggatcgcacaagccgagaaagcagccgcgctgcatcgccgggagctgtctgcgctcgagcgctccgttttcgctcagcccgaggcacagatgaagcacctgcattccctgcgcggcggcgcgcacggcgtcccgtccggcgcacacagctaccagatttttggtatataccatgaaaaacgactcctttacattatcgtgacgtcactctggacttttacggtaaattcctttacactatacgcagggagccgcattttcatgagcctgccagggcgttcccacccggacttttttatcggcagaccaaatgtctcctgcaaaaatcccgaacggtccttttccgttcgttcagaaagagtgtacgaatgagcaaattcatacccgattacgttttcgactcgatatacgacatcacgcccgagatcctgcaaagccacggcatccgcgccgcgctgatcgatctggacggcacgatggtctcgcacaagaccgccctgcccactgaggaggtcgcggccttcctccgccgtctggagggcaacggcattcatgttgtcgtcttttccaacaacaacgcgaaccgcgtcggcacgttctgcgagccgctcggcgtggatttcatcagccgcgcccacaagccgttcgcgcgcgcttatgcacaggctgtggaaaagctcggcctgccgatcgaccagatcgcggtcatcggcgaccagatctacaccgatgtgttcggcggcaaccgcgccggtgcgctgacctgctatgttgagacgcttgaccgccgttttttctggatcaacgtccgctaccagcttgagcgcggctttatcgcgcgcggacggcgcagaatggaggcgaaacgccatggctgagccccgtttcggccctgccggaaattccgagtccttcgcagccgccggcttcaagaaaagcgaggacgcgcccgcatggctcgcgcagatgggccttaccgccttcgagtatcagtgcggccgcggcgtgcgctgcggcgaggagaccgcgctgaagatcggcgcggcggcaaaacagcacggcatccgcatgagcatccatgcgccgtacttcatcaacctctcctccgaggagagcgaacgcatggagaaaaatgtcggctatgtactcgagaccgcccgtctcgccgtgccgctcggcgcgacgcgcatggtcgtccactgcggcggtcagggcaagctgacgcgcgaccgcgccatgcgaaattctcacgcgaacgtaaaaaatatcctgcgtgcgctcgatgaggcgcatctcaccggctgcacggtctgtctcgagaccatgggcaagaagagcgtcctcggcacggcagaggaggtctgtgagctggtcgctgcggacgaccgtctgctgccctgcatcgacttcggccacctcaactgccgcaccggcggccgtatgaacacgcgcgaggaggtggcggcgctgttcgacctgatggaaaacaccatcggccgcgagcgcaccgcaaagctccacgcccatttctcgcacatcgaatacaacgacaagggcgaggtgcgccacctcaccttcgcggacacggtctacggcccggattttgcgccggtcgccgcagagaccgctgcgcgcggctacacgccgaccttcatctgcgagtccgccgggacacaggccgaggacgcgctggccatgaagcgctgctatcaaacctgcaaaggggaataacgatatgaaaaaagtattactcatccacggacccaacctcaatctgacgggcatgcgcgagccgggcatctacggcacggacaccctcgcctccatcaatgccgaggtcgtccagaaatgcgagcggctcggcatggactgctcggtattccagtccaactccgagggcgcgctcatcgaccgcatccatgcggcccgtgaggactgtgacgcgatcatcatgaatgccggcgcgtacacgcattacagctacgccattcgcgacgccatcgcggcggtgcgcctgccctgcgtcgaggttcatatgtccaatgtccacgcacgcgaggaattccgccacaagtcggtcatcggcccggtctgcgccggcgtgatcgccggcttcggcaggcagagctacctgctcgcggtcgacgcggtcaagtctatcatcggttaagaggcgaaaacacatgaaacgagacgatttaagagcttttctcgcagaaaagccgtatgacgcgatggtgctgacgagcgagatcagccgccgctacgcgaccggcttccactccaccgcaggcgcggtctacctctccgcgaagcaggccgttttcttcacggacttccgctatgccgaggcggcgcgcgcggccatctcggatttcgaggtgcgcgagatcaaggcaggacagagctattcctccctcatcaacgggctgatcgaggaggacggcgcgaaaaaggtcgcgctcgaggacaaaacgctgacctacgcggagtttatgtcgtggtccaccgcgctccacgcgacggcggtccgtctcgaggacggcgtggaaagcctgcgcatgatgaaggaggacaccgaggtcgaaaagatcgttgcggcgcagcgtatcgccgagcaggcgctcgaggaggtgctgaacgacatcaggatcggtgtgaccgaaaaggagatcgccgcccgcctgacctacctcatgctgcactacggcgcggaaaatatgtcgttcgacccgatcgttgtttccggcgcgaacagctccaaaccgcacggtgtgcccaccgaaaagaccatcgaggcaggcgatttcgtcacgatggacttcggctgcatctatgacggctactgctcggacatgacacgcacggtcgcggtcgatcatgtgaccgatgaaatgcgtctcgtctacgacaccgtgctgaacgcgcagctcgcaggcatcgcatgctgcaaggcaggagtttccggacgtgacgtcgatgcggcaggccgccgcatcatcgagcaggccggttacggcgacgccttcggccacggattcggccacggcgtcggtctggagatccatgaggcgccgacggcttcgccgcgcggcgacagccttctccccgccggcagcatcgtcaccgccgagccgggcatctatctcccgggcagattcggcgtgcgcatcgaggatatgctgtacgtcatcgaggacggctgcatcgacctcaccgacgcgccgaaatcgctgctcatcctctaaaacagcgcaaaagttaagggtatctgcctatgcagatacccttttgtcatactttttcgtcgttttcggttttactctgctccttcgcctttgcggcggcgcggcgctcgcgcgcgctcaccggcggaacattgctcgacacatgtacaaactgcctcgttcccgcatcaagccgcttgtcgccgcggtagtcgttcgtgtcctcggacagaccgcggttatgcagcagatggttgatgcactcggaaacgatgctgtaaatgaccgcgaacagcggtacgccgatcgccatgccgacaaagccgaacaggccgccgaagatcagaatggcaaacatgacccagaagctcgaaaggccggtcgagttgccgaggatcttcgggccgaggatattgccgtcgatctgctgaagaatgatgatgaagataacgaagtacagcgcctgaagcggacttgtgaccatgatcaggatcgcgctcggaatagcgccgataaacgggccgaagaacgggataatgttcgtaacaccgataatgaccgagatcagcagcgcgaaggacgactcgatggtcagcagccccaccgacatcatgacgcgcataccgatgaagcacagcacgccgatgatgagcgagtcgatgagcttgccggtgatgaagccgccaaacacgcggtgaatgtatgcgacgcgctcgatgatcgagttcgcccgctcgatggagaacaggctgtacgtcatctttttggcctgcgcgcagaaggtctccttgccgttcagaatataaagagcgatgatgatgccgatcagaatatcaacgacgaccgaaaccgtcgtaacgacgcccgtcatcatggtgacgaggtgcggcagcgcgatgttctgcacccagttgaccagctgttcggaaaactgctcatagacctgcatgaagttgcgcgcgatgaccgggttgtccttcagaagtcccgtcacccagttcgacacgtcgttcatataggtatccgctgactcgacgatggaaaaaatgctgacgacgagctgcggcagcaccatccagagcaggcccgccacaacggcgagaccgatgatcagcgtcagcaggctgctgatgcccttggcgatgcgcgttccgtgggcgaattttctcgacatcggcggctcgatgcgccggtaaagcatattaaagaccggcatgagcagatacgccatgacaaagccgtaaataaacggactgagcgcgccgaacagctttttcaccacgttccagatgaacgggagcttgatcagcacgaacgccacgagaacgcagcagccgataacgcagaaagcggtcagtccccactgaaaatagtggggctgctcgctgaattttgactttttgggttcgtttggattctccataaattcattcctttcctgcccgctccggacgggcgcaagccggagaaaaccgctcaggacaaagccgcatcacggaacaggcgcggcctccggcggcgcggtcttactcctcctcgtcgaagaagatccgccagagcatatacagccagctcgccgcgaacgccacaaagaacagcgtgcgcagctttttgaagcacttggaaaagcaggtgccgagccacaggccgagcgagagcaggcaggtctcgaaaatcgcgaaatcgaacagcgagaagccgtgcgccttttctacggcatgattggtccagcggctcgcggtgccgcgcgcctcgtcggcgtaatggagcatctgctctgcacgggcgcggagcgcttcgcggtcaacgttttccagatagtttttcatagcgtgtctctccttctgttacagattgcgttttgcaggagtcctgcgtttttcgatcgtattctttgcgatgctgcacggcgttttccccatcgaggaaatgcggcccatgcgcatgccgatcgtatcggcaagcacggcagcgtccggggcgccggtctcgcggagcgcggcctgcaggatcagaccggcggctctcgcgtccgagccggcctcatgatggtcgagcgtgatgccgagataatcggatacggtatccagtttatgattggcaaggtccggccatacacgctgcgagacctttaccgtgcatacatagcggcattccggcatcggcagcccgtaatgcgccagacaggcgcacagtacgccggtgtcgaacatcgcgttatgcgcgacgaggacgctcccctctgcgaggggcgcaagctcgcgccagaacgacgcgaacgacggcgcatcctgcaccatgttttccttgatgtggttgacgcggacgttgccccagtgaaatttgccggcgcaggcgggcggcttcagcagcgaaacgcgctctccgaccagcctgccgtcctcgaaaacgctgacgccgagcgcacaggcgctgagcggcgaggcgtttccggtctcgaaatcgagtgcgaagtatctcacaggcgcacctcccggccggcggccgcgcgttccttgcccgcgagcagaaaacggtaaaagggcgcgagctttttcatggtctcgagcatcggtccgacgaacgagccgtcgagcacgggcgcgaagtcctcgctttcgcgaaaatccacgccgatctccttgcggttcagccacgactggtattccggcttcgcgtcggggtatttcgggcgcttgtacagctcgcctgcaagcgtcacctccgggcagcgcttcaccgcctcaaaggcgtcgaggaacagtctgtcctcgtgcaggatcatgtcgcgcagcgcctgcatctcgcccgtgccccatgcgccccagcagccccacgcccagtattcggggtgcagctcaaagtaatagcacggcatgctttcgtgctgtcggcgcgctctgcggaagaaaagccacagatttgcgcggtaaagcgtcttgtccttggtatagcgggtatcgcgccgcacgcgcgagaccatgcgcgagggcacggtgacgaactgcgcgtcgatctgctgcatgacgggcgtcatctgctcgatcagctcgtaaaacggcgtgatggcaagttttttgatctcgtttttatgttcttcgtaaaattccttgctgttttgcaggcggttaagctgaagcaggtcgacgcctgctgcggaaaagcctgtgaatgccataatatctgtctgttccacctttgtcttgatccgcaggaagcaaaaaacgtgcttcccgccttattatattttaacccctcatgtatggtaaagcaaggagaatttcgcctcgaagatgttaagaaaatatgtccgcgcgcttcgctttattttgacaagtcccttctctgcggtgtataatacagtattataccaaaaaatataccgggaggctgattattatgaagaaccccgaaaaactgctcgacctgctcagccaggacgcccgtctttcgaccgcccagctcgccgccatgaccggcgcggccgaggacgaggtcgcgtctcagctcaagcactatgaaaagaaccgcaccattctcggctacaaggctctcgtcgactgggacaagaccgaccgtgagagcgttaccgcgctcatcgaggtcaagatcacgccgcagaagggcatgggcttcgacgagatcgcccgtcagatctactcgcaccatcaggtcgagagcgtttatctgatgagcggcggcttcgacctgaccgtcatcatcaaggaccgcaccatgcgcgaggtcgcgcgcttcgtcgccgagcagctcgccccgatggagaacgttctgtccaccggaacccacttcatcctcaaaaagtacaaggactacggcgtagagtatgacccctccgaaaaagataaaagagaggtcatgatgtcatggtaaactacgagcagatgctctccgaccgcgtaaaaatcaccaagccgtcgggcatccgccgctttttcgaaatggcggcaaaaatgccgcacgcgatttcgctcggcgtcggcgagccggactttgagaccccgtggcagatccgccgcgcgggcatccagtccctcgaaaaagggcagacgttctacacctcgaactggggtcttgccgagctgcgcagccagattgcggccctcgcgcgccgcaagtaccagctgtgctacgacgcggacaaggaaattctcgtcaccgtcggcggctctgaggccatcgacaacaccatccgcgccctcgtcaatcccggcgaagaggtgctcattcccgagccgagctttgtctgctacacgccgctcacgcagatggccggcggcgttcccgtgccgcttccgacgcgcgtcgaggacagcttcaagctgacccccgaggcgctccgcgccgccatcacgccgcgcaccaagctgctcattctcccctatccgaacaatccgaccggcgccatcatgaaccgcgacgagcttcaggccattgcgaacgtcatccgcgagaccaacatcatggtgctctccgacgaaatctacaacagcctgacctacggtcccgaccgccatgtctgcttcgcggaaatcgagggcatgaaggagcgcaccatcgtcgtggacggcttctccaagtcctacgccatgaccggctggcgtctcggctgggcgatgggcccgaaggagcttatgcgccacatctgcaagatccatcagttcggcatcatgtccgccccgacgaccgcgcagttcgctggcatcgaggccatccgcacgggcgacgacgacatcgcgcgcatgcgcgaccagtatgacctgcgccgccgttatctgctcggcgagctccgctcgatgggactcgactgcttcgaacccgagggcgcgttctatatcttcccctccatcgagtccaccggactcacctccgaggagttctgcgagcgcctgctgcacgagcaggaggtcgcggtcatccccggcagcgccttcggcgcgagcggcgagggccacgtgcgcatctcctactcctattcaatgaagcacctgcgcgaggcctgctcgcgtatgcgcaaattcctcgaaaacctcaaaaacgaacagaagtaataaaaagacccgatacagtaaaaacaagctgtatcgggtctctttttctgcaaattttagaatacgcagtactgcttcatgtaggcgtccatcagcggcaggaggtgtgcgtactccgccttgtccgcgaggtactcgcggatgtcctgtacggtcacgagggcgtgcaccttgatgccgaattcctcaccgacctccatgacagcggtcttgccggggttctggccgacctcgcagcggttgaccgagatgaacatatcggttaccttgacgtccgcgcagctcttgagcaccggcatggtctcgcggatcgcggtgcctgcggtgataacgtcctcgatgatgatgacgcggtcgccgtcctgcggcttgtagccgacgatgttgccgccctcgccatggtccttggcctccttgcggttgaagaagaacggcttgtcgatgccgtagttgcgggcgagcgcaccggaaaccgaggtcgcgagcggaatgcccttgtatgccgggccgaacatcgcgtcgaagtcgtcgcctaccgtctccttgacgagagcggcatagaactcgcccagacgggagttctgcataccggtcttatagttgccggtgttgacaaaatacggggtcttgcggccggacttggtcgtgaagtcgccgaaacgcagaacgtccgcgctcatcataaactcgataaatttcttcttcgcttcagtcagcatggggattaccgtcctttattctcgttttgttattatcagtatagcaaattggatgggatatgtaaagaggcacgccctgcgacgtgcctctgagtttgcctgacaaacgaagtttttcgacagcttatcgaactactgcgccctgatctgcggaggtgaccagacgggagtagcgatacagccagccggacttgacgttcggctcacgcggaacgtactttgcacggcgcgcctccatctcctcgtccgagatattgacgtttaccttgctgttcggaatgtcgatggaaatgatgtcgccttcctgaaccagaccgatctcgccgccggaggcagcctccggggagacatggccgatggatgcgccgcgggacgcgccggagaaacggccgtcggtgatgagtgcgaccgtggtgtcgagcttcatgccggcgagcgcagaggtcgggttgagcatctcacgcatgccggggccgcccttcggaccctcgtagcggatgacgacaacgtcgcccggaacgatctttccgttatagatagcggaaatcgcgtcctcctcgcagtcgaatacgcgagccgggccctcgtgcaccatcatttccggcgcgacagcgctgcgcttgacaacgcagccgttctttgcaatgttgccccacaggaccgcgatgccgccggtctgggagtacggattttcgagcggacgaacaacctcggggttgcgattgaccacgccctccaggttctcaccgaccgtcctgccggtgcaggtgatgagcgagaggtcgaggaagccgcccttcgtcagctccttcatgatggccggaacgccgcccgccatgtaaagctgctcgatatggtgcggacctgccggagcgaggtggcagatattcggcaccttgccggagagctcgttgagcgtctcaagctggagcggaacgcctgcttcgttcgcgatcgcgagcagatgcagaaccgagttggtcgagcagccgatcgccatctcgcaggtcagtgcgttgcggaatgcagccggggtcagaatatcgcgcggcttgatgtccttctcgatcagctccatgatcttcatgccggcgtgctttgccagatggatgcgtgccgcggaaaccgccggcgtcgtgccgttgccgggcagcgccatgccgatggcctcggacaggcagttcatcgagtttgcggtgtacatgccggcgcacgagccgcagcccgggcaggaattgcactcagcttcgtagaacgtcgcctcgtccatcatgccggccttgtatgcgccgaccgcctcgaaggtcttggacagcgaaacctcctcgccgccgaaatggcctgcgagcatcgggccgccggaaaccagaatggacgggatgttcaggcgtgccgctgccatcagcatgcccgggacgatcttgtcgcagttcgggatgagcaccagaccatcgagctgatgcgcctgtgcgagcgtctctacgctgtccgcgatgagctcgcggctcgccagagaatacttcatgccgatgtgacccattgcgatgccgtcgcagacgccaattgccggaacgagcaccggcgtgccgcctgccatgcgaacgccggccttgactgcgtccgcgatcttgtcgaggttgatgtgacccgggatgatctcggaatatgcggaaacgacgccgatgatcggctgcttcatctcctcgtcggtcatgccgcaggcgcgcagcagagaacggttcggcatacgctcggggcctgcggtgatgttgtcacttcttctcacggggatttcctcctttaaaagcagtccagcagactgcctgatagaaaaaacgggcggacgggaaaatccgtccgcccgttcggggtagctgtaaatgacacacacactgcaccgaccctcccctgtggggaaccgcagcattcgctgcggcatcaaatcggcacacgaagtgcgccgtaaaaacccgcgacatgcgcgtgggtttttacaccccgactcagcgcccgtggggcgcgtcgttcgggtatcgaaaagcggtttctacggaaccgcttttcgtatatagggggcttttgaagccccctatagaaataatgagaagctacgcttcgaattatttcttgagccagctcatcatgccgcgcagcttcttgccggtctcctcgagctgggtgtcagcctcgagtgcgcggtttgccaggaagtgtgcacgaccgcctgcacggttctcctgaatccactcggaagcgaaggtgccgtcctggatctcgcgcaggatcttcttcatctccttgcgggtctcctcggtgatgatgcgcttgccggtgcggtagtcgccgtactcagcagtatcggagatggagtaacgcatcttggcaaagccgccctcgttgatcaggtcaacgatcagcttcatctcgtgaacgcactcgaagtaagcgttctccggagcgtagccagcctcgaccagagtctcaaagccagccttcatcagctcgcaaacgccgccgcagaggacagcctgctcgccgaacaggtcggtctcggtctcggtcttgaaggtggactccaggatgccggcacggccgccgccgatgccgcaggcgtatgccagagcgatgtccatagccttgccggaagcgtcctgctcaacgcagaccagatccggaacgccgtgaccctcgaggtactgggaacgaacggtgtggcccgggcccttcggagcaatcatgataacgtcaacgtcagccggcggaacgatctgcttgaagtgaatgttgaagccgtgagcgaaagccagaacattgcccggcttcaggttcggagcgataacgtccttgtagatgtcagcctgcttctcatccggggtcagcatcatgatgatgtcgcctgctgctgctgcctcagccggagtcatgacctccagaccgtagtcctttgccttcttctcgtgcttggagcccggacgcagacctactacaacatgtacgccggagtccttcaggttcattgcgtgagcatgaccctgggagccgaagccgatgatagcaacggtcttgccgtcgagcagagacaggttgcagtctgcatcatagaacatttttaccattgttattacctcctgaatgtatggaaagtgaattgggtaaacaaatttatttaatcagcggtcaggtggccgtcaattaagcggaatgaaattatctgcggatcgcggtgacgcccgagcggctcatctccacgatctcgaagttggaaatgacgtcgaggaaggcgtcgatgcggctcggcacattcgccagctccacgatcagctcgtcctcggtcgagtcaacgatgcggccctcgtacaggctgcacagctgacggatgtcgtctctcgtcgagggagcctgcgcgtgcagcttgacaaagacaagctcgctgcataccgagtcatgctcctcgatgtggtcgacgcgcatgacctcttccagcttatcgagctgcttgatgatctgctcgaggatgacctcgtcgccctgcacgatgatcgacatacgcgaaacgcgcggatcattggtcgcggaaacggtcagagagtcgatgttgtagccgcggcggccgaacaggctggaaacgcgcgccagaacaccggcgttattctgtacggtaacagaaaggataaacttctgcattggtctattttcccctttctcagtcggttacgagatcgtcgatcgtaccgcctgccgggatcatcggcagaacgcgctcgtccttgtcgatctgacagtcgatgagtaccgggccgtcgctctgctgcgccttgcgcagcgcctcgcgcagctccgcgatgttggacgcgcggtagccgactgcgccgaacgcatcggcgagcttgatgtaatcggtcttgcggtgcgggtcggtctgcgaatagcggctgccatagaacatggtctgccactgacggacgttgccgagcacgcggttgttcatgatgaccgtgatgatcggcagcctataggagactgcggtgcagatctcgttgaggttcatgtggaacgagccgtcgcccgtgatatggaccacggtgcgacccgggaaggcgatctgtgcgccaatcgcggcgccgtagccgaagcccatcgtaccgaggccgcccgaggtcagaaactgacgcggatgtctgcggccgttgtactgcgcgctccagagctgatgctgaccgacatcggtcgcgatgatggtgtcctccggggtctcttccgtgaccgtgcggagcagctgatgcggatggataacgctttcgtcgtcctttgcgcggtagtcgagcttcgcgcgccactcattgatctgcgcgagccacgcggcgtgccgtttttccttaatgtacggcaggatcttctgaaggaaggtctttgcgtcggaaacgaccgaataggtcgtgtcgatgttcttgttgatctccgccgcgtcgatgtccacatggatgatgcgcgcgccgggggcgaaatggccggtgttggtggcaacgcggtcagagaagcgcgcgccgatgcagatcagcaggtcgctgcgctcgaccgcccagtcagccgaaaccgtgccgtgcatgccgatcatgccgaggctcagctcgtcgtcatcgggcacacagccgatcgccatcatggtgtgcgcggacgggacttctgccttgcgcatcagggcgagcagctcgctgcctgcgtccgagatttcaacgccgccgccgtagtagatgaacgggcgctcagccttgtcgatcatgtccgcgacggtcttcagctgttcctcgctgatgtcgtaggtctcatgcacctcgaccctgcccttcggggtgaactcggtcgtcgcggcagtgacatccttcggaatgtcgatgagcaccggacccggacgtccggactgcgcgatgcggaacgcctcgcggacggtatccgcgagctcctctacgtggcgtaccacgaaattgtgcttggtgatcggcatggtgatgccggcgatgtagacctcctggaaggagtctcgaccgatcaggctcgtgccgacgttgccggtgatggcgaccatcgggatggagtccatataagccgttgcgatgccggtgacgaggttggtcgcgcccgggccgctcgttgcgaggcacacgccaaccttgccggtcgaacgggcatagccgtccgccgcatgagccgcgccctgttcatgtgccgtcaaaatgtgatgaatgcggtcgctgtttttataaagtgcgtcgtagatattgagaaccgcgccgcccgggtagccgaaaatggtgtctacgccctgctctacgagcgcgtcgatcaggatctccgaaccgttctttaccatgcgaaaccgcctcctttctctgtcatacatacataattgctgtcatcgcaaataaaaaaagccttcatctctttataaagagacaaagacttactctgcggtaccactctttttgccctgtgcgccgtgcgcacaaagccgctcgttccgatcctttaacgctgatcctgcggagcagattacgcctgggccctgtttcatcccatttcacctgcccggctcccggaggactttcgctctttcctttccccaccgtctttcaccgaccgacggctctctctaaaggggcttcgggacgctacttttccattcatcgccgttacctttttattgaagtgttgtacctattataaagcggaaaagccgccttgtcaacgattatttccgacagatttatatcttttgtccgcttatattttgcgcactttggcatcatactaaaacacacccgacagaataatccaactgaaaggggaggttttcatgtccgtgcctctcgtgcgcacactcgtgctgtatttcgcggtcatctgcgcggtgcggctgatgggaaagcgccagctcggagagatggacccggccgagctcgtcgtgaccattctcgtcagcgaccttgccgccgtgcccatgcaggatctcggcattccgctgtttttcggtcttgtgccgatcgctgcgctcgtcacgctcgaggtgctgctcagcatcctctcgctcaagagccgtttcttccgccgtctgctcaacggacagcctgccatcatcatccgcaagggacagctcgacctgtccaagctgcgccagctgcggctcacgaccgaggatctggtcgtggcgctgcgcaagcagagcgtcgcctcggtcagcgacgtgaaatacggcgtgatcgagccggacggctcgctgaccatcgtgctctacccgcagcagcagccggtcacggcggaaatgctgtccctctcgccaaaggataccggactcccgctcgtcgtcatctcggacggacagctggtcgaacgctcgctcagtctgctgcggctcgaccgggacgccgttgtcaaccggctcaggaacagagggctgcgccctgaggaggtctttctgatgacgcttgacgactgcggcaatatgttcgtgcagaaaaaggagggagcgtaatgcggcggctgactgcggcgctcgtgctgctcgcgctcctgctcaccggctgcgtctggagtcggcgctcggtcgaaaaggtctgcaccgaggccgccgaggcgctgcacgcaggcgagctcgaccgcgcccgtgcgatctgggaggaggcgcagccgctgctcggcgctctgctccctcacgaggagatcgacgagaccggtctgctcttcgagcggcttgcggcagcgcatgacggaacgggcgacgaaaatctgctcgaccgtgcggagctgctcgcccggctgcaccatcttcccgagatggaaaaggcgtccttgcgcaatatactgtaaagcctgccgaaaaaactgcgctttccggcaggccctgtattgcgaaaacgcaggaaagatggtatgctcttgtcagaggtgactgattatgcgcagaaaagacagagaaattaccggacgggaaaatatcgagcccatcctccgtgcatgcaaaacctgccgcgtggcgatgatcgcggacggcgcgccctatgtcgtgccgctcaacttcggctatacgtgggacgacgacggcctgacgctgtatttccacagcggcctcaagggtaagaagatcgacgcgctgcgcgccgacccgcgtgtctgctttgagctcgacaccgagcagggcgtgaccggcgagggcgacatcgcctgccgatacagcttcgccttctcctccatcgtcggctacggcagcatggagttcgcgaaaacgcccgatgaaaagcgaaagggctttgacgtcatcatgcagcaccagaccggccgcagcggcttcacctataacgatgcgtcgctgtccgttgccgaggtgttccatgtccgcgcggactcgttcgaggcctcgcgcaaggccctgcgccctcgcaagccggaatgagcgcgctcaaaaagctggtctcggcgctgctcgtgctgacgctcgccgtttccggcggcctgctcgcctggcacggcctgcaccgcacgagcgccgctccgcccgtcgggcagacacagacgcccaccgtcccggcgccgcccgcgtccgtgcccgacacggtctccacgctgtgcgtcgccggcgaccttgtcatgcacattcccatcatcaattcctgccgcacagacgacggctatgacttcaccggcctgttcgacgaggcgcggccgtattacgaaagcgccgactatgccgccgcctgcatcgaaaccacgttcaacggccctccctactcagggtttccgcagttctgcgcgcccgaccagcttgcaggcgacctcaagagcgtcggccttgatctgctctcgaccgcgagcaatcacagtctggacacctggttttccggcctgacgcgcacgctcgatgtgctcgacggcgccggtctcgaccatgtcggcacctaccgcacgcaggaggagcgcgacacggtgaaggtcatcgacgtcggcggcatccgtctcgccgtcctcgcctatacctacggcacgaacggcctgccgaaggatgagcatccgtactgcgtcaatgtttttacgactgattacatgacaaactgcggcgaaatcgactatgagctgctgaaaagcgaccttgcacgcgcccgtcagaccgacgcggacgccatcgcggtctttatgcactggggacaggaatacgcgacctccccctccgcccagcagcgcgagctggcggattttctgttcgagaacggcgcgacgcttgtgctcggcggccatgtccatgtgccgcagccgatggagctgcgcgagctgcccgacggacgcaccggctttctgtgctactgtctcggcaatctgatctccaaccagcacgaccgctacaccaatctcaccgccgcggtcagcctcgagctgacgaaggacggcgagaccggcgcggtcacggtctccgatgccgaatatgtgccgatgtatatgctgcatccggacgcctcggccgacggacgttaccacctgctcgatctgaaccggagcatcgcagactgcgagagcggagatcatacggtcgtaccggccgccgttctcccggcactcaggcagggccttgcggacgcgcacagcatcttcggctcggaggagaaattacaattatcccccgccgaaaaggccgcataacacgaaaaaagagctgacttttaccggtcagctctctttttttccgttttatcaggtattgtgatcagaaacgtggaacttcttgaggttgccgatcttctgcgcgcggatgtccatttccttgcagacatcctccatcgtcacgccgcactcgttcatcatgaccatcatatgatagaatacgtcgttgatctcaccgacgagctcggtcttgtcgccgttcttggcggcgatgatggtctccgcgcactcctcgcctaccttcttgagaatcttgtcgatgcccttttcgaacaggtagcaggtgtacgagccctcctgcggctctgcgcggcgctgtgcgatgacagcctccatttgctcaaacgaattcatgcttactactccttttacttctcgtctttttcccacagcgtcgtgaaaaagcaggtgcggtggcctgtgtgacagaccggacccttgggcgtgccgacatagatcagcgtatcatcgtcacagtcggacaggatcttcttcacaaaaatgaaattgcccgaggtctcgcccttgttccacagcttctggcgcgagcgcgagaaaaaccacgccgtgccggtatccatcgtcagctgaagcgcctgctcgttcgcatagccgagcatgagcacctcgccgctgcgctcatcctgacagacgaccgggatgagcggcgctttcacgaaaaacttgcttaaatccaatctattcactccgttcacagtctaaccggaatatttttttctctgaggtgctccttgacctcttttaccgtcagctcgcggtaatggaacaggctcgcggcgagcgcggcgtcacagccggtctgctcgaacacctcggaaaaatgcgcgaggctgccgcagccgcctgaggcgatgaccgggatgccgacaacatccgtgatcgccttggtaagcggcaggtcaaagccggacttggtgccgtccttgtccatcgaggtgagcaggatctcgcctgcgccgcgctcatagacctccttcgcccacgcgactgtgtcctttccggtcggcgtgcggccgccggccacatatacctcaaagcccgagggcatctgctcgttcgcacgcgcgtcgatcgcgacgacaacgcactgactgccgtacttttccgccgctgcattcaccagatcggggtttttgaccgccgaggagttgatggagatcttgtccgcaccggcgcgcaggatctcgcggaaatcgtccaccgtgcggataccgccgccgaccgttaccggcacgaaaacctcgcggcaggtgcggcgcacaacgtccgcgatcgtgtcgcggttgtcgctcgtcgcggtaatgtcgagaaatacgatctcgtccgcgccctcctgcgaatagaacttcgcaagctcgaccgggtctcctgcgtcgcgcagaccgacaaaattcacgcccttgaccacgcggccgtccttgacgtccagacaggggataatgcgttttgccagcatcactccgcctccttgatcgccttcgcgaggtcgagcgtgccggtatagaccgccttgcctgcgatcgcgccgtcgatgccgagctttttcagcgcggcaatgtcctcgagtgtggaaacgccgcccgaggcgatgatctcgcaggaaaccgacgcgcgaagcgccgccagctgatcgaaattcggtccggcgagcatgccgtccttgtcgatgtcggtgaaaataatattcttcacgccgtaggactccatgcgctccgcgaacgcgatatagttctcgccgctgtcgtccagccagccgtccgtgcggacggtctcgctcttcgcgtcgatgccgacgacgatcttgtcgccgtactttttgaccgcctccgcgacaaattccgggtggcggaccgccgccgagccgataatgacgcgcgaaacgccgagtgcgagcaccgtctcgacgtcctgcatcgagcggatgccgccgccgagctcgaccgtcgcgccggtctcgcggatgacctgctcgaccacgccgtaattggcctgcgagccgtccttcgccgcgtccagatcgaccatgtggatgagcgacgcgcctgcctcgaggaaacggcgcgcggtctcgaccgcattttccgccaccttatgtgccgtgccgtagtcgcctttctgcaggcgcacgcactgtccgtccttcaaatcgattgccggaattaccttcattttcccacctccgtcagttttgcaaagttgcggagcatctgaagccccacttcgccgctcttttccgggtgaaactggcagccgaacaggtttcctctcgccaccatagccggaacgcgcgtgccgtagtccgtcacggcggcaaggtcgttttcgtccgacggcttcgccatgaagctgtgcacgaaatacacatagctgccgttttccagaccctcggtcatggcgttcgggcgcagaatatccagtgcattccagccgatctgcggcagcttgaggctcgtctcaatgcgctcgatgcggccgggcagcagacccagacccctgcagggacgcacctcgtccgactcctcgaacagcatctgcataccgaggcagatgccgaggaagggctttgtctctgccgccttcagcaccgcgtccgtcagtccggacccggtcagcgccgccatcgcgtccgggaacgcgcccacgcccggcaggatcacgcccgcggcattttcgatgacctcgctcgtcgaggcgaccttattttcataacccaggaaatccagcgtgttgtgcacgctcatcagattgcctgcgccgtaatctacgattgcaatataacccattttttgacctttcgaaaaccgcaaagcttatagaacgcccttcgcgctcagcacgccgccgccggtgacggtcacggcctgtttgagcgcacgggcgagcgccttgaacagcgcttcggtgatgtggtgcgcgttttcgccgtactcactcttcagatgaagcgtcagaccggcgttgaccgcgagcgcacgcatgaactcgaccgtcagacaggtgtcgtaccggccgcacatcggctgcggcatgggtgcatcgaacacgaggtacggccggccggaaatatcgagcgcacagaagccgagcgcctcatccatcggcacgaacgcctgaccgaagcgcgcgatgcccgccttgtcgccgaggcacagcgaaagcgcctgtccgagcgcgatgccgcagtcctcgaccgaatgatgaccgtccacctcgaggtcgcccttgcaggtgagcgtgaggccgaagccggaatgcaccgcaaagctgttcagcatatggtcgaaaaagccgatgccggtatcgattctgcgctcgccgccctcgagcgtcagtctgagctcgatgtcagtctcctttgtcttgcgtttgatctcagcagttctcatttcttcggctcctccgcaaagcgcaccgcgatggagttcgcgtgcgcgtccagatgctcgctctgcgcgagcgcaatgatgtcctgtgcatatccctccagcgcatcgcgcgtgtactcgatgacgctcgttttcttcaggaaggtgtcggtcgagagcggagagaagaaccgcgccgtgcccgaggtcggcagaacgtggcaggggcctgccatgtagtcgccgagcggctcaggcgcgtactggccgaggaagatcgcgcctgcgttatgcagatacggcagcagctcacgcggctcggccgtcacgacctccagatgctcgggcgcgacgacgtccgccattttgcaggcgtccgtgagctcgtcgaacacgatcgcgcagccgtagttcgcaacgctctccttgatgatgtcccaacgcggcagcagcttcgcctgtcgctccatttcacacgagatggcctgcgcctgcgccatggagtcggtcagcaggacggcagaggccagcctgtcgtgctcggcctggctgagcaggtcggccgcgacataggtcggatttgcggtgtgatccgcgatgaccaggacctcggacgggcctgcgatcatgtcgatgtcgaccgtgccgaacgcgagctttttcgccgccgcaacaaaggcgttgcccgggccgacgatcttgtcgacctgcgggatgaagcctgcgccgtaggtcagcgctgcgatggcctgtgtgccgccgatggcgatgaccttgtccacacctgcgatcttcgccgccgcgagcacctcattcgacatgttttccgtcgggggcgtcaccatgatgagttcgcccacgcctgcgaccttggccgggatagcgttcatgagtacgctcgagggatacgccgccgtaccgcccggcacataaatgccgacgcgcgccagaccgcgcacggtctgaccgagggtctcgcctgccgagcgcttccactcccagctcttgacgagcatctgctcgtgatagtcgcggatgttcgccgccgccttttcgagcgcagagatcagcttcggatcgcacgcatcatacgccgcgtccagaacggacggctcgacgatatacggcgccttgccgtcgaacttttccgcatactctacgaccgcgtcccagccgcgctcctgtacgtcggccatcacgccgcgcacgatctgttcaatatcgccgcgcgcacctgccgcacgcgctttcatctcgcggatgacggtctgttccgccgtgccgtccgcgagaaccgttttcagaaacatctattttcactccgttccaatcggaaattatttctccaaccctttttccagctcggcaatgaccttctggatggctgtctttttcatctttgcgcttgcaaggttgacgatcacgcgggccgagatgggcgcgacgtcctcgatgacctcaaggccgttttccttgagggtagtgccggtttcgacaatatccacgatagcgtccgcaagctcgagcagcggcgcgagctcgaccgagccttcgatcttgatggtctcgacgtccatgttcttcctgttgaagaacgccttggtgacggccgggtacttggtcgcgatgaccggggtcttatagccgccgtacacgtccttgcccttcttggtggcgagggcgaagcggcacctgccgaagccgagatctaccatttcatagaagctgccgcccttttccatgatagtgtccttgccgacgacgcccatgtcgcacacgccgtgctcgacgtaggtgatgacgtcggcggccttggacaggacgatctccacgccgctgtccggcagggtgaagatcagcttgcgcgttccggcctcaagctcggaaatatcgtagcctgcgtccttgagcagcgcgagcgttttcttttccagacggcccttggtcagcgcgatgcgaaccgtatcgcggcgcgttgcgacctcgggacggctcgcgccctgaaggctctccgcgacgctctccacgtcgatgccgaagccgcccgccgggaggtccctgccgaacttcgcgcacagcgcgttgtagcggccgcctgcgaggatggcagcgcccgcgccgccgatgtagccgcggaacatgatgccggtgtagtagtccatttcgtgcaccagaccgaggtcgatcatgatgcggtcgccgtagccggcctcgtcgagcgcctgatacaggcggcgcagataggcgatcgcgcccagaacgcgcacgttgccggtcagcgtctcgacctcgtcgagcacctcgatgccgccgaacagctgcggcatggcgctgagcgcctttgctgccggcttgctgccgaacggctgaagcgcgtcgccgagcgccgcgaacgacttgttttcgatcaggcggcggatcgcctcggaggaggccgcatccgcacccagctcctcgatgagggccttgtagatttccgcgtggccgagctcgatgcggaagttatccgcgccggtcctgctcagcgccgcgaaggcagcggagaggatgtccttgtcagccgcgagaccgtccgcgccgatcagctccgcgccgacctgcaggaactcgcccttgtggccgtggtcgccggagaccgaacggaacaccttctgactgtaatacaggcggaccggcagagccgcgtcatccagacgggtcgccgcgatacgcgcgatgggggtggtgttgtccggacgcgccacgcagatccggcccgacttgtcgatgatcttgagcatctgatcctggtcgagctcggggtttgcctgcgcaaaaacatcaaaatattcaactgccggggtgatgacctcgctgtacccgcgctcctccagcgcatcgcgcaccgcgttctcggtctgccgcagtgcgcggcaggaggaaaacagaaggtcacgggtaccttcgggggtcgaaattcgaaaacggttcattgctccgctgctcctttatcactttatcatgatgaaatgataccatagttccctatatactgtcaagaccctttttagagtggagagttaagagtggagattatctgaggggcagccttttccgcttcgaacttccgttttcgagtgaaaaagaaagagtgaagagcggagattgcaggaggcgcggccattttctctccgccctccctgtttctccaatctcttcactctccactctcaactcttcactctgttaccgctcttcactctactctctttttatagttctccacaatcggcaccagcttttccagaaagttctcctcgccgagggtgttgagcttgaagaacacggccgaactgccgcccgaagtgatggcggaaagaaacagatcacggccgttgccgaccagagtgacattcatgctgacgcgattgccgcccatgtagctgtaacgctcgaacacgcgcaccgcacagcggaccgtgccgtttgtccagtccgagccgtcctcgtaggacgcggacatactgccgttcagcacgccgtccgttacagcgttcagaacttcgtcgaaatttcccgtcagatgcttttcgtactttgccataagaaactcctttcgaaacttcatgcttacggcggactgagggcagcccgccctgcggtgtacgcggtaaagcgctctgcgctctctccactcttcactctcagaacaggctcatctgcgtggttttcggcatggagccgagtgcgccgatctggtcgagcagctcgacgaccgccttggacgccttcgggcaccggatgatcatttcctccgccgaaaggaacttgccgtccttgcgctcctcgacgatgctgagcgccgcctgctcgccgatgcccggcatggaggtaaacggcggaataagtccgttttccgtcaccagaaaccgcgtcgcgtccgaagtatacacatccatcggctcaaacgtgaagccgcggcggtaaaactcgtgacagacctcgagcgtcgtcatcatatccttctcagcagcggagatggtcttgtcgcggtccttctgcttgagctccgccatcttatccagacacaccttgtcgcccttgaccatgcaggacgcatcaaaacccttcgcgcggaccgaaaagtacgccgaatagaacgcgagcggcttatgtaccttgaaccaggcaatgcggaacgccatcatgacataagcgaccgcgtgcgccttcgggaacatgtacttgatcttcttgcaggagtcgatgtaccattccggaacgtgctgctcgttcatggcggtctccatctcctcggtcagacccttgccctttcgcacggactccatcgtcttgaacgacagcttgggcttgacgccctgtaaaatcaggtagttcatgatgtcgtctcggcagcagatacagccggacagcggaatgcccttgcgcacaagctcggccgcgttgccgagccatacatccgtaccgtgggacagaccggagatcgaaaccagttcggcaaaggtggacggatgggtttcctttaccatgccgcgcacgaatttcgtgccgaactcgggcaccgctacgcagccgaggtcgcccaggatggggtcagtgtccgggttttcgcccttgtagcgcagcgccttgcacgagtggaacaggctcatcgtctccgggtcgtcgagcgggatctcctgcgcgttgatgccggtgaggttctcgaggtgcttgatcatggtcgggtcatcgtgacccagctcgtcgagcttcaggaggttcgcgtcgatggagtggtactcgaaatgggtggtaatgatatcggaatccgggtcatccgccggatgctgtaccggacagacgtcatagatctcgatctccttcggcacgacaacgacgccgcccggatgctgacccgaggtacggcgcacaccggtgcagcctgcggcgaggcggttctcctcggcgcgcgagcactcgatgccgcgttcgtccatgtacttcttgacgtagccgtaggcggtcttttccgcgaccgtaccgatggttcccgctcggaacacgtggtcgtggccgaagatctcgcccgtgtaccagtggatgcgcgactgatattcgccggcgaagttcaggtcgatatccggcaccttgtcaccctcgaagccgaggaaggtctcgaacgggatgttaaacccctgcttggtgagcggtttgccgcacttcgggcagatcttatccggcaggtcgacgccgcaggagtaatcctcgtgccattcgatgtacttgtcgtccggacagagatagtgcggcgcgagggaatttacctcggtgatgtccgacatgaacgccgcgagcgacgagccgaccgagcctcgcgagccgaccagatagccgtccgcgagcgacttggtaacgagcttctgcgcgatgatgtacatgacggcgtagccgttgccgataatggagttcagctcgcggtcaaggcgcgcctgcacctgctcgggcagcggatcgccgtagatgcgctttgccttgtcgtagcacatattgcgcagatcgtcctcgcagccgtcgatgtgcggcggatagttctcgcgcggcacgggacggatgatgtcgcacatatctgcgatcatgttggtgttcttgaccacgacctcatacgcacggtcctcgccgagataggagaactccttcagcatttcgtccgtggtcttgaggtagagcggcgcctgattgtcggcgtccgaaaagccctgaccggccatcaggatgcggcggaaggcctcgtcctcgggttcgagaaagtgaacgtcgccggtcgcgcagcacggcttgccgagctcgtccgcaaggcgcaggatgtcgcggttccagtcgcgcagctgctcctcgtccttcgcgagccccttggcaagcatgaatttattgttgccgatcggctggatctcgaggtagtcgtagaactccgcgaggcgcttgatctcgtcccactccgcgcccttggtgagcgcgcggaatacctcgcccgcctcgcacgccgagccgaagatcagtccctcgcggtgacggatgagctcgctgcgcggcatgatggggcgcttgttatagtattcgagaaagctcttggaaatgagctgatacaggttgcgcagaccggcctgatttttgaccagaatgataaagtggtagcgcggcaggtttttcagcttgtttttgcggtcggtcgtcgcggcgagcaccggattgatgtccgccgtcgtgaccgcgtgcatctcatccttgagccgcgcgagcagcttgacgaaaatgcggccgagcaccgccgcatcctcgcttgcgcggtgatgctcgaacgggccgacctgaagctccttggcgaggatgttcagcttgaatttatgcagatgcggcagcatcaggcggctcatttcgagcgtgtcgatgctggtgaactcccgctcgatgccaagccgtttacacgctgtccgcagaaagcccatatcgaagcctgcgttgtgcgcgacgaggggatactgtccctcccctgcccattcgagaaacgcggggacggcagtatcgaggtcgggcgcgtccgcgaccgtctcatccgaaatgccggtcagctcggtgatctcggccgggatgggcttgtgcggattgacgtaggtctggaaggagtcgcggatctcgccctcgaccatgcgcaccgcggcaatttcggtgatctcttcgttcgccgggttgagaccggtcgtctcgaggtcgaacacgatgaacgtgccggtaagcggctcggtgctcctgccgcgcacgaccgacaggctgtccgcgtcgttgacgtagtacgcttcgatgccgtaaatgatcttcatgtccccgatgatgtccttctgcttgccctcctgcgcgtggagcgcctcgggaaaggcctgcgcaacgccgtggtcggtgatagccatggcgcggtggccccactttgccgcgcggcacagcagcgaggcggtcgaactcatgccgtccatcgcggacatattggtatgcaggtgcagctcgacacgcttcatgccgtcataggtgtcctttcgctccggctttttcgccttgacgatgccggtcggctcgagcaccatttcgcgagcgtaggtgtcgaacaccattttgccctgcacagtgcagtacagaccctttttgatgagcgaggccgtgtcgccggccttgtcagccgcaaggaatttggagacgcgcacggaattcgtgcggtcggtgatgtcgaacgcgatcttcacatagtccttgccggtctttttgctgtggatatccttgtgctcggtgaaaaacacctcgccctgaatggtgaccatgtcgtaggccgaaacggcctcgttgaccgagacgatggggtcctgaatgagctttccgaacacgagatcgtcctcgcggaccttctcggtcttcgggcgctggtatgcctggccctccgagcgaatctgacgggcaggctttttcggctttggctcgctctgcgcttcgcttgcggctttttccacagccttgtgcaaaagttccgcgcgttcctgctcattctcctgcaccggcccgccgtccgtctgctcgagcggcacggcgtgcaccgggcagctccgcccggtctcgcggcggatacgcgcttcgagatggcgcagtgcggtctcgaaatgcttttcgcagatggtgtccatcgggatatgcagcgcaccgtccgcatattcccagttctccgcgtgcagcaggccgcgcgccgacggcatccgcgccgccatatcgtcgtacagcgagcggatatactcgcccggcagctcgcccggcagctcgtagcgcggctcgatgcacacgcggtcgagaccgtaggcgctcgcgagctgcttttcggccttcgcaagcgtgtcgcgctttacgacttcatgcagacccagctcgatgaccatgaccgagcggttgtctccgaatgcgagagagcgcacctcgcctgcggcaagatgctgctcctctccgacacatttgcagttgttaaaaacctctatcagcttggcagccaccgattattctccttcgaaatgtgcgatttcatccataagctcgtccacaagccgttcctgcggcaccttgcggaggatttcgccgcggcggaagatcagtccctcgccgtcgccgcctgcgataccgaggtcggcctcgcgcgcctcgcccggaccgttgacaacgcagcccatgaccgcgatcttcagctttttgccgcggatctcggcgcagcggcgctcgacctccttcgcgatgccaatcaggtcgatgcgcgtgcgtccgcaggtcgggcaggaaacgacgttgatgccctcctccgcgcgtccgacggcgcgcaggatcgccttcgcggcgtagacctccttgaccgggtcgtcggtcagcgacacgcggatggtgtcgcccacgccgagcgcgagcaggccgccgatgccggccgccgacttgatcgtacccatgtactccgtgccggcctcggtcacgccgagatggagcggatagttggtcttttcgctcgcaagcaggtacgcctgcatggtgttcggcacggacgaggacttgatcgagatgcagatgtcgtcaaaatcgcagtcgttcagcagctttacgtgatacagcgcgctctcgaccatggcttccggggtcgggccgccgaacttctcgaggatatgcttttcgaccgagccggaattgacgccgatgcgaatggggagatggcgctcctttgcagccttcacgaccgcctgcacgcggtccgcgccgccgatgttgccggggttcaggcggatcttgtccacgcccgcctcgatggcggcaagcgccagacggtagtcaaaatggatatccgccacgaccggaatgggcgagcctgcgcagatctcgcgcagcgcttccgccgccgctttgtccggcacggcgcagcgcacgatgtcgcaaccggcctccgcgagcgcacggatctgtgcgagcgtcgctttcgcgtcgcgcgtgtccgtgttcgtcatggactggatggcgatgggcgcgccgccgccaaccggaacgccgccgatgttaatctgttttgtcagtttcatatctatccctcttttgaagcgaacacggggcgcagaacgttttcctgcaccccctgtgttgattttactgcatcattctgcctgtcagcaggcgcaggatgtcgtgtcccgtaacgtagaccatgagcatgagcagcagcatgagaccggccgcgtgcacaaggccctcgtacttcggcggcacaggcttgcgccggatgccctcgatgatgagaaacaccaggcggccgccgtcgagcgccggcagcggcagcaggttcatcacgccgagattgatggagatgaacgccacgagctgcaaaaacgcccggatgttcacccgtgcggtcacggccatggtcgaggccacgccgaccggtccggacaggtcgttcacgccgaccctgccgccgagcagctgaccgaggctgacccacacgagacgcgcgtcatcgagcgcggtcagcgccgcatgctgcacgcgcgaaaccacggtatccggcgttgcgccgaaggtgaggccgatcagctttccgccctcgccgtcgtcgatgcgcgcctcgaacggcacagacggcagctcgaccgtctcgccgccgcggcgcaccttgacgctgtgcgtcgtcgagctgctcatgcccatcgcgacgttcagatcgctgcgcacgagcagtcggaagccgtcgatgctgatgatcgtgtcgccctcctgcaagccgccctcgagcaccgagctgccttcgctgatgctcgcaacggtcgtggtgataaagccgttctcgctcggcgcctgcaccgcgaacagcaggatgacaaagccgatgagaaaattcatcagcgcgcctgctgcgacgatgaggatgcggcggcggaggcgcgccctgccgaaggcgtgctcgctctcgctttcgccgtcctcgccctccatgacgcacgcgccgccgaacggcagcagcttcaggcagtacatcgtgccgtgatattcgtgcttgagaatggtcgggcccatgccgatccagaattcattgacctgcacgccgccgcgcttggcggtgataaaatggccgaattcatgcacgatgaccagcacgccgaaggccagaatggccagaatgattgaaagtacctgcaaagctgtctcctttccgggtcagccgtctcagcccagaacgagctcgcgtgcggctctgtcggcggcgagcacgtcgtcgagcgtgatgtccttcctgtacgggatgctgtccagtgcgtgcgaaacgcgctccgcgatctcggtaaagccgatccttccgtcgaggaacagaccgacggccgcttcatttgcaccgttgagcaccgcgccgcggtcgcccttgagggcggcggcctgctttgcgagattcagcgccgggaacgcctcgtaatccggcgcgaagaaagtgagcttcgcgacctctgcgagcgacatgcgcggtactttgcacggcacgcgctccggccaggtcagcgcgagctgaatgggcaggcgcatatccggcaggccgagctgcgcgatgaccgcgccgtccgcaaattccacggccgagtgcacgatgctctcgcgatgtacgacgatctcgatgtcctcgggcggcaggtcatacagccacatcgcctcgatgagttcaaggcccttgttcatcatggtcgcagagtcgatggtgatcttcgcgcccatcgaccagttcgggtgcgcaagcgcctgctcgcgcgtcatgccgcgcatttcctcgaactttttcccgaagaacgggccgccggaagccgtgagcaggatcttcgagaccggatttccattcgccgcctgcacacactgaaagatcgccgagtgctcggagtcgaccggcaggatgcgcacgctttttttccgcgccgcctccatgacgatgccgcccgcgcacacgagcgtttccttgttcgcgagcgcgatgtcctttccggcgtcgatggcggcgagcgtcggcagcaagccgaccatgcccacaacggcggtcacaacgatgtccgcgccgctttccgaggcgcaggcgatcagaccgtccatgccggtcagcacctcgatgtccgtgtccgcgagcttcacgcgaagctccttcgccgcgttttcgtcgaacgcgcacaccattttcggatgcagggcgcgcgcctgctcctccagcaagcctatgcggcggttggtcgtcagcgcgacgacttcagcctcgatcgaaggcagaatatcgaccgtctgcgtgccgatcgaacccgtagaacctaaaatcgctatttttttcataatctatgctcctgaaactgcggaatgcagtgatggttggattgctctgtcagaatacgatgtggaacagaaattccgcgaacggcgcgacaaagatcacgctgtcgaagcggtcgagcacgccgccgtgacccgggaagatatggccgtagtccttgatgccggtctggcgcttgatgatcgaaaaggacaggtcgccgatctcacccagcaccgcgcccacagcgccgagcacgaccgccgcccacagcggcagaccgagcttcagcgtgctgttcatgatgagcgccgcgatcagaacgagcaccgcgccgccgatcacgccgccgaccgcgccctcgaccgtctttttcggactgacgaccggcgcgagcttatgtctgccgaaaaacatgccggcgaacagagcgcaggtatccgcgccccacgccgcgagcagcggcagcagaacgatgaacgggccgtgatggtagttcatctggaaaatgcgcagcagactgagcagcaggtacggcacgagcagcgcgccgaaaaagccccacgccacctgcgacaccttcatgctgtcgtggaatttcagctcgatggcgaacgagccgacgagcatgacgagaacaaggccctgcatcacgtcggtcaggtcaagcggcagcacggtaaaatgaccgactgcaagaccgagcgacacgagcatcgcgagcagcagctcgagccggttgtacacgagcttcgtcgagccgagcacctcacaggtcgcaatgacgcacagcgccgcgacgaccgcctccagtacgatgggcggaaatacatacagcgcgagcagcacaaaaataaagccaaacacgccgaataacactcttgctttcatattctatcacccgttttggttatctatgcggaaaacggttttccgcgcgttatacgccgccgaaacggcggtttctgctgttgaaattgtcgattgccgcgtccagatcgctcgttttgaagtccggccacagcacatcggtgaaataatattcggagtacgccgactgccacagaaggaagttcgacgtgcggatctcgcccgagggacggatgatgaggtcagggtcgggcatatgcgccgtgtaaaggtgcgcgccgatggtttcctccgtgatgtcctccggctgaatttcgccgtttttcacctgctgcgcgatcgcgcggacggcgttcttgatctcgtcgcggccgccgtagttgatgcagagcgatgcggtcgcggcatccgggccgagccggtctgcgatctcgtccacctccgcgatctgtgcgcggatgtcctccggcagcacgctcagatcacccagaacgcgcaccgcaacgccgcgctcgtacatggtctccgccgcctccttcagataggcacggaacaggttcatcagcgcgtcgacctcgtcctgcggccgcttccagttctcagtagagaacgcataaacggtaaaatacttcacgccgatgtccttgcagtaggtcgcgatcgtgcggaaggtctccgcgccgaccttgtgacctgccttgcgcggcagaccgcgctttttcgcccaccggccgttgccgtccatgatgaccgcgatatgctgcggaaccggacggttttcctgcacgttctctttcttttttcgtgtaaacagtcccaacctgtttcctccccgtttttgtccctcttgcggtgaaaatccgcctcacttcatgcaaaagggcgacgaataccgccgccccc

SEQ ID NO: 12853 - DNA, 13494 bp, Unknown
  gut microbiota DNA sequence
catatttgctgtgttggatgacataaatcttctcctttttattccttcagccattccgcgcagagcgcctgccaccgggcgatatggcggtcgggcaaacgccccttttcgatgtccgatgtctccatatccgcaagtgcgagaccgtgcacaccgtgcggaaacaggtgcatctcgtgcgaaacgcccgccctgcggagcgatttctcgagcagcagcgaattctcgaccggcaccgtctcatctgtcagcgtatgccagagaaaggtgcgcggcatatcgggagacaccagagtttcgagcgagaacgcctgctgtttttccatatcgtctcctgcaagctgttcaaagctgccgcgatgggcgtactcgccggcggacacgaccggatagcacagcacggcggcattcggctgatggagcgcgagatccgttccctgcggataccatgacgcgcggttccacaccgcagcatgaaggcccgcaagatgcgccccggcggaaaatccgccgaccgcgatgcgctgcggcgaaatgccgtactgctccgcgtgtgcgcgcacccactgcactgccgccgacagcgcggtgagcggacgggtaccgagcggcgccggagcacagtcataccgcagcacaaaggtctcgataccgcggcgggcgaaggcgcggcccgccggagcaccctcgcggatggagcagtgctcatagccgccgcccgggcagaggatcagcgcattcttgtttaccccgacggcaggaaatcgggtcattgtgccgtgcggcagcggtatttcgtgcatttttacctctttcagacgttgtaccggttgcggatgtcgatgtgcgcaaggatgcgctcactctccggattgtcgccgcagagcaggtagtcgagcagcagctcggtcggacggttgccctgcatatgtgcatcctggtcgatcaggaagtcgatcacgccgcggcggacgttctcgatatttgccgggataaggtcgtggcagatgaggcggacgcggcctgccgcacccatttcagtcagcgcctcgcacgcgccgatctggccgtttaccgagatgtacacaccgccgaggtcgggatgctcgcgcagcgcacggcacacaatgtcgtgggcgagcttctgatcgtcgccgcagttctcggtcgggagcagctcaagtcccgggaactgggactctgcctcatcgcggaagccgtcaacgcgctggcggtgcgcaaggttgttttcctgaccgccgaccacgagcacgcttccctttcccgcgagcaggagattcatcaggccggcgctcgcgcggccgaaggcatagttgtccgggccgacgtagcacagtctgcccgactccggcaggtcggtgttgaaggtcacgaccgggaccttggaggacagctccatcacccgcgcgcgcacacgcgcatcctctgccggagacagcgccagtccgttcacgccaagctcgaccagctcgtcgatcgcagccagctggcgctccgcgtcaacgccctgaatggggcgcacataaatctccgcgccgggcgtggtcagctgcgcctgcgtgcgcatgacctcctcgaaaaccatgtgcatgaacatggtctcgaccgactggacgatgatgccgatcttgatcggatttttcgcgagcgcgagcagacggccctcacggttggggcgatagcccagctcggctgcgatgcggcgcacacggtccgcgacctccgggtcaacgcggccgcgattgttgagggcgcggtcgaccgtgccgcgcgatacgcctgcaagcgaggcgatttctaccaaagtaactgccatttttctttttcctcttctgtctttctacgtcgtgccgccggggcggctttgatcggcgccggctaaagcgccgctgctgttccttttactctactatcattttaccgaaaacacatccggatttcaaccgttttttccacattcccaacaaagaaaaagagcgcactgccgctttctgccgcaatgcactctttattccatcttttccgctctcgcgtgacccaactgagcgagcagcagataatgcagccgccgtccagtcgcgaaatcgggcgccggggcggtatacagccggtcgagcagactgtataccgcgcgttcctcgtacaccttgagcgcgatgccgccgtagatcgccttttcgagcaggctgcatacgcgcctgtattcgccgggattgaccgtatcgatcatctctgcgagcttcgcgtcggtctcctccgtatgccagccgatcatcgcctccacgccgcgtgcggcaaggatgcgctgtccccaccacgcgagcaggcgggcgcgctgctcgggcgaggcgtgcttgaagtcggaaaatacccgcacgcggcagagcagcaccgtgcattccagtgctgccgccgcgagcgaagcaaggatgagcagcagcgccggaatgccgagcagcagctccgggggatagaccgtgccgtcgagcagtccgtcgggcctgtctgcgccgctgtcatccgtttgtgtcacctcgccggctgcatgccccgcgtcctctatcgcggctgtgcggcggatcgaatccggcatcgcgacgagctgctgaagggcgagcgcgtcatagtaaaacccgggcgtcacatccacgggcagccagcccacgccgtcgaaatatgcttcacaccacgcatgagcgttcgcccccgtcagcgtgaccgcgccgccctccgccgcctgcacctgtgccgcagtcagcagataaccctcgcagtagcgcgccggaataccgtgcgcgcgcagcgccatagcggccgcggaggcatactgcaccgcattgccctcgcgccccccggtcagaaaccacgcgagcgggtcctcgctccccggggcctcagacggcgtttcggtataggtcatttcgtcgcgcagcacctcgcgcacccggctgaccgcgctgtaaatgccgtcgttcgagtcgtcgtagtcctcccagaacagccggtcgagcgtcggcgcgattgtgtcgctgacagcggtatagctgtcgtaaacgaagccgcggtagaccgcctcgctctccagatacgcctgctgtccgggcgtctgcggcgctctgacccagtcctctgcaaccgtcagctcggacggacgcgagccggaaagctcggacgctgtgtagcggcgcgcgccgagcacgccgcgcgcacggcttgtgctgtcgcgttcgttttccgtgacgcgcgcgcccgaaagctcattcgccgtgcccggaatgtacacatattcgcggcttgccgcaagtgtctcaaccgtcacgtcgttcggctcagcctcgctgtcgccgcacagcgcaaggtatgccgccggctgccgcgccgggtcaaagccgcgcccgctcagccacttcatcatgcccgcgtactcctcgctgtagatcagaccgggcagcggcttccaagccccgtccgcatacatgccgccgatatatccgcgcaggtagagcgttttctcctgcccttccgtcacgctcagcataccgcgcgtatcgcggtgcagcgtatccgcctgcgcgagcacgccgcccggcaggctgtccgcaccgtagcgcagctcatgcaggccgctctgcaccttctcgcgcaggccgcgaatgccctgcatatccatatccggcaggaatgccgcggccgcgagcagagccagcaggatgccgagcgtgcgccatgccgcgcgggtcagatgcagactgatatccgagacatagagcgccagcatgcctgcgagcatgagcgccgcgccgagcggcgaaaagcagccgtctgccagaccgagcgcaatccagaaccctccgagcacggcgccgagcacgcggtaacggtgcaccacgacgaagtgcgccgcctgcgcgatgagcatcgcgccgataaaggccgccgctttttcgtcaacaatatccggcgctgtgttcagcagctgtgcgctgccgtcgtgcagcacattccagcgtgcggtgagtccggaaacccatgccgcgagaccgcgcacgcatgcggccggcatgagaagcgccggtatccacggcacgaggccgagcagataaaatgcgccgtgccgccgcgaaaggcggtgcgccgccgaggcggacacatagcctgccgccgccgcgagcacgagcgcccagcgcggaaccgccagctcatcccatgtccggaagagcacgagcagcgcgccggccatcagacagagcgaggcgaacgcaggcagggcgagggcgcgatatggacttgtcgacccgtccgggtagagcgtcttaacgctgatttcgttcatactgggactccgtttcagcagagaattttgatcttcgcgtcgtcctccgccggtatctcaatgttttccacgccgttcagaaggacggcgcgcggctcggaaacgtccttcatcaccgtcagggaaagcacgccgatgtcgttcgtgagcgcacagagaccggtctcgggcacacctgcgctcaccgttaccatgcgggtgaagcggttttcgagatgctccattcggaacagccgcatcatgcgtccggcctgctcggggatctcgatggacagccatcgcgggatgctatgctcgagctcacgcacgcttttgaagccgaacagctccatgccgccgcccgatccgggcagcgcgacgcacagcggcacgccccgccgcacaaggcggcggctcagctcgatcacgagagcgacacacctcgtcagctctccggccgtgatgtcgcggccgccctgctttcttccgaaatcgggcaggatgaccaggtcatagtgcgtgcggtcgcttgcctgacgcacgatcagctcgtccgtcttgcccgacagcttccagtgaatggagcggatgtcgtcgcccggcacatagcttcgaatgtcgaacatttcggtcgcatccgtgcccttgcggctgcgcgtcagaccgctgtcgcccgtctcgccgactgcatcgcgcgacagcgtaagatcgagctgcaccgggcgcggatagatgaccgtgcgcacctcgtcaaacggcgcgacccgctcgcggaacagatgcagcagatcacagagaccggtctcgcggcaggaaatcacgatttcaccgcagcagggcggcacgatcgggcaggaaaaacggttcgcgccgtcgctgagcgtcagcatcacccggcggtgtgttttctcgccgagcagcagattgttcatcgcgagatcgagataaatgcttcgcgcagcatgcagcgcacgcccgttctctacctcaaagcagagcaggagcgcttccccttccctgccgccgggacgcacggagagcgagaccgagaccgcgcccgcgtcgcgcttcagcagcgcgagctgcgcgaacggcagtcctgccgccagaacgagcgcacagacgagaaacggtctgccgaacagccagacgagtgcggcgagcgccgcgaccgcaagcgcataacctgcgcggtttttccacatatccgcttacctcgcggacagaaccggcggacggatctcgctcaggatgctgcgcagaacgtcgcgcgcgttcatgccgtccacgcgcgcctgcggacgcagcaccagtcgatgcgcgcagacatcgagaaagaccgactggatatcctcggggacgacgtaattccgttcatgcagcaccgccgatgcacgcgccatgcgcacgagtgcggcaacgccgcgcggcgaaatgcccagctcgatcagcggatggatgcgggtcttttcacacagctcgatggcgtagcgcagcatatcgtccatgaccttgaccgagctgaggaacttctgcacctcgatgacgttctgcgcggtcgtgaccggatgcagctcgtcaagcggattggcgtaacgctgcgccgagatgatcttcatctgatcctcgatcgagggatagccgatcgagagcgagaccatgaagcggtcgagctggctctccgggagcgcctgcgtgccggcgaagccgaagggattctgcgtcgcgatgcagatgaacggcgccgggagcgcgtgcgtctcgccgtccaccgtgatggtgcgctcctccatgatctcgagcagcgcggactgcgttttcggagaagtgcggttgatctcgtcggcgagcagcagctgacagttcgccgcgccctcacggtattcgaattcgctcgtcctgcggttccacatggtgaaaccggtgatgtcggacggcagcgtgtcgggcgtaaactggatgcggcgcgtcgagagaccgagcacgcgcgagaacgcgaccgcgagcgtcgtcttgccgacacccgggcagtcctcgagcagaacgtgaccgcctgcgtaaatcgtcatcaggaccttctcgatgacctcattcttgccgataaacgcgcggtttatctcggaaataatctgttttgactgttcgataatcatgtattttctccctctgccgcatcggtcgtctccggtgcaggctcggtgttgtttgtgtcggcggacgcgctgtcctccccgtccggcgcatcggcagacggcgtgctctcgccggtcacggtttcgccgccggtttcacccgctgcggtctcgtcagcagcggtctggccgtcctgcgtgatgtccgggttctcgtccgggatttcaatgtcgaactcgatgtcgccgccgaacgggtcggcatagccgtaatcctctttatgctcctccggattttccggctcttccagcagctccatgcccagcatcgcgcgaaggttgttttcgccgtggatagcgcggtagtcgcagacggcctgcacaaactccggccatctgtcctccggaaaataccattccatccagctgagctgggacatcgacatatcgatataatacgttccgttctcgatctcctcgtccgtatagccgatgaacatgggcttccatgcccggaaatacctttcctcgcacccttccggaacatgaatgcggatatttctatcatagataccgtccgcaaactggaacggggcgtgcggataccatgtcagcagtccaatcggctcctcggtggtaaaatagagatctgtcagcgcatcgcagccgtaaaacgagccgttcggaataatcgacataaatttaccgtcgcttttccggcacacccatccaaacgaaacgctttgcagctgtttgcagtccgccagtgccgactcaccgtaatcctccagagatacatcgctgaaatctgcctccacaatgttggtctgataaaatgcggcattcctgagcagcatcatatacgtcgactgaaccggatgaatcacgcctgtcagaccggactgcgcgaaggcgctgtcatagatgcggaccagacgcggcagctcctcccagttgatcgtgaacgcgcagtccagctgggcgaagcaggaaacattgatcgcgatcgtggtttcgggcagggtgatcgtgccgccctctgcgggcgaaccggcggcgcgcagcgcaatccagctgtccagcctgctgccttcccacagctcgctttctacctcggtgttgcagccgtacaggacattcgctccgttgcagtcgatgacccgaaactctgcaatatccgtttcgtcgcgccagccactcctcggctcgtagcagctccagctgtcatcgaagccttcgctgcctgccagacaccacagctgtccgtaaagcgtttcgcttcccgattcactcagaatatcatagtcgtttttcagctccatgtttttcgcgttcgacgcgataaagcgcaggttcgtgcagttgttgaacgcgcgttccatgatggtcacgctgtccttgctcccgagcagtacgccggagagcgcggtgcagttctcgaacgccgaaacgccgatggtcttaaccgtctcgggcagcgaaacgtattccagcgtggtgcagccgtcaaatgcgtgagccgcgatgctgtcgaccgtttttttctcgccgtcaatgatgatctcgccgtaatactcgctgatgccgtccggcgcattgactacgacgatctttccgtccgatttcacgtagaagcagccgtcgtccgatgtgcccgacgccgcaaactcgacctccgcaacacccgcttctttgagctttttattgatctcagccttctgagtttcgtcctcgcaggtcacatacgagaccatgctgtccttgaagctgtccgccgcataggaggtctttgcgtccgtaatcaggattttgaccgaagagccggcaaaggcgttcgctgcgatcctgtcgaccccctgcggcagccggtagatctctgcatcagtcaccacgcggtcgagcacggccgcgccgttctcctgatgcgtcagatagccgtcgtgaacctcatatttcgcgtcgccgccgtctacgctgaccgtcgtttcggtgccgtcgagctgtctgccgtactttgtgacgaatgcgttcagcagctcgggctgcaccttgacagagccgtgcagctcctcgaaattgaccgagggtagccggtcttccgactgcgccataagagtgaccgttccgcagtagctctccggcagtctgaccgaggtgactttctccgggaccgtgacgttctcgctgttctccgggatcgcgaggtattccgtgccgtccctgctggtcaggatgccgtcctcagtcgaggcgtagcattcgttatcctccgcgacacggtaggcgtcgaggactgaggagatgctgtccggcttgatgtagacaacgctcgtcggaatttccatcgtgcccaccagatacggaagaaaggtgacggggctttcttcccggccgtcggtctcgagcgcaaccgcctgaacatattccggtatcgtcagcgtaccatatccctcatcttcggtcagcgcgctctcgtcaaagccggtcagcgtttgcagctcataggtcatgcccttgttgatcttcagacgaaccgtaaggttctccggaaccttcacgaaatccgacggctggagcacatgccgcccgccgtcgcaggtgtagtcccacgaaacgcgcctgctgtcctccgtccagccggagaacagccggtcgatgggcggaagctcgtcataagatgtgccgctgtcccagccatacagcttctcatacagccttctctgcaatgcgaacagattgagccctctgctgaattcattataggaataatcgctgttcagcacgatgtccagcgggatttccgtatccttgtcggtcagctcccggccgagcaccagaatgcggtgcggcgcgaccgtgcagtcgatataggcgtttccctcgtccggtctgtattccgtccatgcgctgttttcgctgaagcgatacgacatattgatctgcatcgactgatccccggcgcttttcgggatttcgatattattcgaaaaatccgtgagccaggttttgccgccgtcaaagctgacgcggttgatacggatgtattttccgaggtcgctcgacgtccagtagtagatcttttcgccagccatgacataagcatagagcgcgcggacgatatccgcgtcattgacgacctgaccggcatacagggcatccgtgctgtcgatccgtccgacgatcgtgaccttgctgtcgctcggcagcgtgaccgtgccgtcgtagcgcgtgccgctgtcgaaccagggaatatccggccccttttcctccgaggtctgctcgggtggcttgccgtccgtctgctgcggcttgttcggcgcggtcggcgtgaccggcgtcacaggggtatccggcgtcgtcgtgccgccggtctctccgccggaggacgagcttccgccgctgctgctgtcgggcgttgtcggccggaaaggctggttcggtgtggtttctccgccggtcgaggggttcgccggcgtgacagacggctgagcggtattatttccgccgctgtttgccgtgtcgccgccggtcgggggcgctgcctgcgccgcgctgcccggatgcagcacgatgtccgccgccgcagggtccttcacgatgtcgagcaccgtccccggctgcacgctcgccgcaccggcggtcggaaccgttccggcaatggctgccgccgtgccgtctctgtcgagcagcccgctcggcttttcctgctgcttcacattctcgaacagataggacgcgctgtcgccggtctgcggcttttgcttctcctcggcgctttcatcgcgctcgtatatctcgctctcgccgttttttgtctgctcgtcctgcttgcctatcgtattttcgctcccgtcaaagtgcacctgattggtgcgtatcgcgcgtcccgcgccgtccggcgtaaaatcccggccgctcgtaaaagcatggactccggccgccgcgcctgcaatgactgccgatgcggccgcagctgcgccgatggtttttaccgtgctcgctgtgccgaatatcttcgcgcccgtcgcggtataaagctccttcagccccatgctttttactcctttcttttccgcttcgccagatagacgccgatcgcctgctgaagcatggtgaaatcgaccggcttggcaaagtgaccgttcatgccgctctgaatggacaggcgctcgtcctcgacgaacgcatccgccgacagggcgaagatcggtatcgttttcgcgtccgccctgtcagacgcacggatggtgcgcgcagcggtacggccgtccatctccggcatctgcacatccatcaggatcagatcgtaccagttttccggatgattctcaaacgcctcgaccgcaagacggccgttttctacaccctcgacctgtgcacccatttcgcccagtatctcgatcgcgatctccgcattgatctcgttgtcctcggccataaggatgcggcagcccttgaaggcgttatcgcagcactgttttaccgtctcgtccggcgcttccgccctctcggcggcctgctccgccaccggcagatgcaggaacacggtgaaatccgagcctttgcccggcgcactgtccacaacgatctcgccgcccatcagacgcacgagctgatcggtgatcgtcatgccgaggccggtgccgccgaattttctgcccgtctcgatgctctcctgctcgaacggacggaaaatacggttcagaaaggcgtgatccatgccgataccggtatcgtgaacgcggaacatgaagtccgcgacgttatcctgaagcatcatctgacggaacgtgacgatgatctcgccctcgctcgtgaacttgacagcgttcgaaaggaagttgatgatgatctggctgatgcgcagctcgtcgccgacgacactgtcgaccgtcatatcctccagattgacctcgtagcgaatgccgcgcgtctgaagctgcttggcgaacatatcatacagacgatcgcccagaccgcgcaggctgaacaccttgtgctcaagctcgacctttccggcctcaatgcgcgacatatccagaatgtcattgatgagcgcgagcagatgaccggacacctcgtccgccttgttcagatactgcatcgcctcgtctccggggcgcagcctgctctttgcgagcgagatcatgccgatgatgccgttcatcggggttctgatctcgtgcgacatacgcgagaggaaggtcgttttcgcgcggctctcctcctccgcccctgcgaggcgcttttcgcattcctcgatgcggtcgtgcagtgcagtgatgtcgcggaagcacagcaggtcgtactcaccgtcgggcgtgcgtctgacgatgaagcgcatccagcgtccgtcgccgctctgcacagcctcatcgaacatttctctgccgtcccacgccatgtattttttccagaccgcatagcatctgcttttgtcagaaaaagcggcattgagattcgcgatattatcccgcagcgccgtatatgacacgccgagcaatttttccggatcgccggtgcaggcgagcagcatcatattctcgcgccggagcacgagcatgacctcgccgctctccagcgtcaggacgcgctgaatatcgcggttcatcccaaccggcgcaagcgatgccctggtttttcccggctgcgtccgcatgacggctgccctgccgagcagcgccgccgccgcgagcacttctgcgcagccgactgccacgagcggcagatttgcgccgagcatcgtcagcatctcggtcacgatccccattgttcttcccccgttcttctgttctgctccgtgtatcgacagactgaaaaatgatcaataattatcagtttattataccatagcggcgcttacaatccaaccctgtcgccaactttactgccgcagtcggaatcagtccgttcccttcgctgtgtcgacggaaaaatccgtgtgcagccgactctaaagcataccggaaggcaaaaagcagccctccctgcatcaatcgcaggaagggctgctcctgtatttaattgaggcgttttcttactgcaaatccaacgaccgaggcgagaatcgccttgataatggcggtcgggatgaacggaagcacacaggccgtgatgccggctgcaagcgtgctctgcgtcagcgcgcagaacatcgcaacgccgaccacatagttcagcaccgtgcctgcgacgagcgcgaccacgaacgcccccgggaacaccttgcggtgctccacgccccagccgatgacaaacgccatcagcggaaacgagatcagaaagccgcctgtcggtccgacaaactttgcaagtccgccggtgaagcctgcaagcaccggtacgcctgccgcgccgaggatgagatagatgacggtcgaaaccgtcgagagcttcgcgcccagtacgatcgccgcgagcgtgaccgcgaacgtctgcatcgtcatcggaacgccgcccggcatcggaatggatatctgcgccatgattgcaattaccgccgcaaaaagtcctgcatagcaggtttccttgacggtaaatgccgatttcggcgcggttttcgtttctggttgattcatgttgacccctcccggagcagtttttatctgaagctattaaaccacatcccggcgttattgtcaacctatattttatttccggtttacattcgccgctaaaaacaaaaaggacctgacctctgtcagaaccttgattggtgcggacggggacacgccccgcagctgtttcgcgttttgcgccagcgtgccgccgaactgctcgatatacgcccgcacgctgacctccatgcaggcacgcttggtgtgtccgaacctgggcgaggaatacgccaaggttacgcgcggcgcacacggcgcgggcgcgctctcggttttgattccgaaacagtaaacaaacgtatagacaccggtttttcacaaattacatcataaaaccaaacaccgcaaaaagtacagaaaaagagctgaaatcaaaagatttcagctctttcacttggtgcggatggggggg
